United States Patent Application Publication US 2014/0057251 A1 - sequence listing, part 91

SEQ ID NO: 162218 - DNA, 5606 bp, Cannabis sativa
ctaggccaattcagtagagaattaagtaagggctctatatttctgactctgtgcttgatcgagagactacaacttacttcttcgaggaccaagagattgccaaagtaagcaaaataaccagctactcacttcctatcatcaaggaaaaatgcctaatcagcatttgagtatcttgttagagcaaatctgtcgatgttcttaatgtgcagtccatggttgatggtgcctttcaggtacctgagaattatcttggttgcaaaccaatgaacctctgttggagctttgagaaattgactcaacttgttcacaacaaaactgagatcaattctagtgtgtgttagatattgcaaccttgtaatcaagcttttgtactcagtaggattttcaaaaattgttccacctaatatagatagcatttttatcactgtcatgggtgttggacaaggcttcaaatgtgtcacattattgttttggagaagttctaatatatatttagcttgagataaatatatccaagtgtcatcttagtggagttaaacaccaaggaaatagctaaataatcccaaacacctgattcaatttctttgtgacctgtcttagcttctctgagttgttgcttgttacaataatatcatccacatagataagaacatgcataacatcagtagaaattttgtaaaagaacaaagaggagtcaataaattataatgttgaccatagtgtcttagcttcgaccatagtgtctcactaagtcttgacttatcataatgttgtgtgcaataaatcattcatgtacaaaagccccttggttttctgctatgagactaggtaaaacgagtctccgcttgctacaaatgaccttagtaatggttttataagccaagttgcagcaagaaatgagtctaaaatcacttactagactagttcatttgatttttagaacaagagtataagaatagttgagtttacctccttgagtaattatttgattacagcactggcagtacaacattagtgaagttttctcctaccactactaaagccatctgggctttagcttttgttatggagaataatatcgttttaacttcagccacaatataaggaatcaaaagctcttgagcttgtaaaacagtggctctacgaccttctttcacaatctaattcataacttttcttctatttcccattttcgagtcgagaagattctcatagaacatcaaaaaaaagtttctttaacataagtagcattatctaatcactgctcttgctcatttgaaatgacatgcatgtgatagcaataaaagttgtcgtgtattgcttcaaccatagtttcactaagtgttgacttatcataatattgtgtgtaataaattgcccgtgtacaaaggcccctttgttttctgctatgagactaggtaaaatgagtctttgcttgttacaaatgaccttagttgctttataaatccattgcagcaagcgatgagtctaaaatcacttactaaactgggatattttattttggggataagagtaagaatagttgagtttacctccataaataatttgcctaattgcaacaatgacagtacatcatattagtaaagtcttctcccatttggcctttagcttctgttatggagaataatgcagttttaatttgtgtagcagtataaagaatcaaaatctcttgcacaatctgctttataactttccttctatttctcattttcgagccgagaagattcctatataatttttttaaaaaaaagttgctttaacatcaatatcattatctaaccaatgcccttggtcatctgaaatagcatgaatgtgatagcaattaaagctactgtgtactccatttggacagccaagaatgaatcttcatgaaaccaaaatgtgtatatgatttctaaagttttaaatacagtacattatattagtaaagtctagaaaataagtaatgttgatagagcttggatatgccaaatagttgcatatagaatttgaatcataattaggtgtatagaagctgggaagtggcttttgtaatagaatttttgggtgagcaatacaaaataaaaaaaaagtttaaatttaaaaatttagttaaatgttcaatatttataatttagactatatatatatatataaaaaaaaaaaactgttgaattataacttatccaaaaatattaacttaatttctttatttattaaaaatttggtatatatatttctataaaaatataagttaattattatgcatatgcttatatatttatatgattggttacatagattaaagagatgattaatatatggttatttgtagattgtagatgaggaaccaaacaaaaactatttttcaccagtgaaggtgataccaatgatggtgaatgctttaggagaattggtgagaagcttcactctaccattatggaagggtaatgaatataaagaagggagtttgatgaaaattatgaggatagtaggtctgctcattccaggaataccagctcattgtcctcaagattatgtcaatgcaacacgcctcatcacctcccctcctcactttctccttccacccaaggataaatctcagtagtttattgtaagtacatgtgggctctaaaagggttccatatataatatacttaatataatatttggcatacatatcatattatgttgggttgtcgtattatgtaagatattattacttttataattcagaaatatatatgtcaaaatatttgcatgaagtatctttattggtaggattgcttctatttggaattgctattataaaattgggattctagttgtatattgtgaggtgaatagagaaaggagaaaggaacaaagagaatattaatgaatagagaaatggacaatatttgtaaattaatgaatgagatcaattgatcctttgataagatcatcagaccttcttttagattgagaaaagttaagcttaagattacaagaaaagattaataccagaattagttagaaaagttaaagattgaaaactaaccctaactaactaactaatagaatcgctagttataacacgcccctcatgaatctcatgcataacaacgcttattttagtccaagcgcaccttaagtatgggatcaataatcctctcatgaataactttccatatccatgattacatacataggggcttggtattgtatcttttgtgaagctgctctatcctccaggagcatcccaaattctagatacttaggattggagccatccaggaagttgagtgattaataccatcacccctagtgcttctatgcttggagtacatagatgggcgatggggagtagtttgtatttctctatgtttggatatgtttccaacttagttagcatgtccgcgaaggcatttttatccatgggaattttcttgacaaaatagtgcttaaaatattgtaatagctccctagactttgctacataactagtcatcttttttcctttcatctggtactctcctgacacttggttgacttctagctgtgaattaatgtacagctcaatgttcttggcctcaacttctttagctaattttaggccaacaatcatagcttgatgttcagcttcatttttggaagcttcaaattcaaatcgaagtgcactttagatttggagttgttgaggtgatattaagattattttggctctagagactttctcatttgatgctccgtctacgtatatcttccaaacttctaactccaggatgggcattttaagatcattgttcatccctgtgcgttccacaatgaaatctgctaaggcttgatctttaatcgagtttcttcgttgatattgaatataaaattaacttagcttcatttcccactttaggagtcttactcatgactctggcttctgcaacacttgacagagagggtggttggttagtaccctgatggcgtgagcttgaaagtatggtcttaacttttgtgaagcaattagcaagcaaaaggaaaacttttcgatcatgggatatctcgactccgctcccaacaatcttttgctcacataatatataggaagttgtacctttcctttttctcgcactaaaacgatacttatagcatgatctgacactgccaagtataggaacaacgactctccctcaactagttgggacaatataggagcctttgtcaagtgttctttgagtatctagaatacctctttgcactcggttgtccattcaaatttaatgtttcctcgaagtacattgaataaaggtatgcacttatttgtagatttggaaacgaacctgttgagtgctctaatccttcaagtcagcttttgaatatctttatgcttctagggtgaatgcatatctagaagggattttatcttatttgggtttgcttcaatgccatcagaactaactatgaaacccaagaattttcttgaagaaactttgaaagtatatttctttaggtttagtttcattccatattctctaatgatagaaaaagtctcttctaaatcttcattatggctcatggaagtttttgacatttgttcttccccaacacattttatacacatttttaaacattttattaaccaacctctggtaggttactctggtattcttcgatacaaaaggtatgaccttatagtagtaaaattctttatcagtctggaagatcgtgtgttggtcagctacatacattttaatctaattgtagctagagtacgtatctatgaagcttaagagttcgtagcctgaagttgcgttgactatttgatcgattcgaggaagtggaaaatagtcttttgggcaagctttgtttaatttagatttgtgaaatttatactcattctccatgtaccattagactttaggactaaaattggattggctagccatatgagatctgccttcggatctatgttcaatgcataacagattacatgagggccgattccagtcatgttagaataactacagggctaacacatcaccgttcttcttgactgtggagactatcctttctttaacaaccagaggcatattctttctcactttgatgactttggtatgatcttcatcactgatgcatacttcttctacctcttctataggttcaattattcgttccacgcctacccgtagatctagttcactctcttctcgagccacccctagtgctagctaagaagatatttcgggttctgctatgtttcctttccggaccatgagatcacagttctagttaaaatattgtagcagcttcttgtacttttttagttgtctttaattgttctaacacttctagcatcgcctactcgaacttgtgcgtgtgtgtaaggctaattaaaaaacgcactcataatttcactacatatttattactagctcagccaagacttggtggccagggctccgctcttgtctttggccctaattgtgtttgatagtgttgattaattgtatctgctttgggctttcaactaattaagtcttttagtattcgtttggtacgtcgtattataccgtattgcattgtatagtattatattgaattatattttatgcaatatttttatgtaa

SEQ ID NO: 162219 - DNA, 2066 bp, Cannabis sativa
agagagagagagagagagttcatacaattgagtcctcatcatctgaattgggaaagatggcataaatccttaggctttcacgtttagtctctaagtcactttgtacataaaatacagaaccagggtcaagtctgaatatgtctcctctcttcaaattcacacttcttttctcttcttcattaacccaactcaaacttccacttcctaaaaacaaaacccacaatttatttactcttttcttttccattttcatacatatatttatacataaatatataagagaatagtatgacaaaagaagaacctgtgtgaacataaaacaccatctgagcatggagaagagctggaagaagcaaggaattaggctccaaagtaaagaagtggatattgtaaggtcctttaatcccatcacagatttcaatggctgagatttgaccatattcattttcaactaataccttcctatgctctttcttcaccaaaggagcaaaaccaccaccactacaacctgagaaatcttcatcttcacaaccaaaatctcttcccctggctgagcctacatgcaaagtgagaagaaagaagaagaagatgatgagtaaggtcaatgagaggtgttcaatcaaaggtttgattgacatttttaggggttgtttttgaacttgttcaagtgatgtaataattactgatatggatatagtatatatgcttttgattttggaaacagaggaaaaaatcagaagaagtgaatacacgtgttggtttaaggtgacacgtggcatgttcattgtaagtcgtggcagtccctcttggctcctcatatttcgaacttgtatacatagtaataaaaggccaattattttcaaactttgtgttgttggtgataatatatatcttgaaataatgttattttttgcagtgcaatacattgtttttaagttttagggtaataataatgatttttttccaaatgattaggtagaaatgtaaattagtttttgtgagctttgatttgaaaattagttcattccttttaatttttataatcatgactctgatgggtttcgcttttcatgatattttgaaacttgagctgtgtattttggattggcattgaatgacttaagaatcttttatatatggtgttcatacaatatttaacatgatttactctgcaagatctaattcaatttgtaaaaattcgtatttgttcgaaatgagttgaactaaaaatttatatttgcaagaattaaatgttgataatctagcactcatatattgtattgcttaattaagcgaacttgtgctataacttggcactcatatatcgcgtcgcctaattaggtgagcctgtgccaggcacccaaaagctctgaaacatcttcaaatcctctttattaattgagcaagaacaaatacaatacagtcgagaactattttctgatgagttctctcaaagtgtttcaactctcatacttttacctaagaatcttctttatctacaaaagattcttcatacaaaatccaactccaatattctctctctagctctcagtcttttttttactctctctctctctctctctctcaactcaatatgatcgttgtatgtgtaaatgataggtataagtggtatttataggcttaggatcaagatctaaaagttggtagttgcaagaagtgaggctgtttagttagttaggcaataaccaacttaactaacttaactaactctcctctgagcgagatctccatttcattatatataagtaagagtgcatccaggagcgtatatgagggcttttcgaaaacacggaccaaagcactcactgaaggagtttcccagataggaaagaactagttggagtcaactatctaggactcccttttaggaggaacaactagctatccgggactcccttctggaggaggattagctttcctgaagtctacactcggagtggacatgatagccatttgagaactctcttctagatgtcaactatcattccatgagacttcttccaaatggacaggttaatttgtaacgtccccgcttcaagcctcca

SEQ ID NO: 162220 - DNA, 5747 bp, Cannabis sativa
  modified_base (4073)..(4074): a, c, t, g, unknown or other
  modified_base (5582)..(5597): a, c, t, g, unknown or other
ccatttaaaaaccaaaaattgtcctcctaacctaaaatttctaactccaaaacaaccagccactaaaattacttaatctaagctcaagaaaagcctaaattagacctataaacataatctaaactcaatttaactccccagtcccaaaatcctaaaaccctaactcaaaactaacttaaaacttaagaaatccttaaacaaacacaaagagagcttacctcaaagcttggacagcctctaactcttgttaaaccagctggaaatggacaatttgaagaagaaaactccttgggtcagatggtccttagggttcgaagggagagggagatgaagatagggttttcctttgattgatttcttaattagcaagtttatctattagctaaataactaataatataaacctaatatttaaattcataatcaaatacaaaaagacaaaatcccatatataagaaaaagactaatttacccttttcctaattacttaaattaatttaggcttagggatatttttgtaatttctaactaatctgccaaaccgaaaacttaaaattctacactagtccggtataattccaatttaatttatcttttaagtgtcgtgacatctctgaccactccgtcgagtttctacgaccgccgggccagaaaacattttatttcaaaaatagtatttacaatacccacttaacccgataaaatttctgtaattaataaattacacttcactaattcatttacgagattgtcactaattaactaacgataagttttaagtaaaattataatcttaccccattatccggataatcacatatttaataaaatacgcccaatttaaatattattatctaatttgggatattacattaagtccaccaatcttcatctttggtacataaattatggacccatttcacctaaaaatttgttgggttttatgccctcaataaaactacaattaaatgtaatcttatttcactatcaataaaatattagagatcattttttatttttgtctattgctttgtttacatgtttatttcatgattatatgtttaatatataaaattttgataaatcttgaacatatagttattcacaattatagtgtcttgtcaacacagtagaaagtaattgtaattatatgcttcaaactatttaagtctcatgatttatcagtgcactagatttacactgatatattaaattagcgacagggcttgcttataagtgaaatgtctttcccaatacattagcaaagtaaatcgggattggatgtatagggtttacatcggactgaaccgatattgatagtagaaaatatatcttagacttaccgtgatatcttttccagtttaatatcacttagttaatcatagatcaattgatttcaatcttgagaaaattaagctttaagctaattgtattattagagttctttgatttattcgttaccagcttacccgtcagtctagctcatagttacattttgggaactcagtagtttaattgagtaggaacgttaatcatagacatggatatctatagcttttatataattatttagaagtaaaattatagttttttttagcttggcttgacgggattaaatggtggactacttatttcaataattatgttagtttactaaaatatcatttacaatagctaagtgtttaaaagataaaatatattgaagggtaaaaaggtaattttgaccatactcgatgtagaccatctatagaggatcaatgattaatttgattgaaacaatagataattcatagtatattaatattgaaagatatagagtgttttatgtaatcaatcattactgagctccaatactcatagctgttcaattctgacatttacctacatataaaagtatatatgtgagtcgacagattcagtaagaaaaatataaaacataaacatataaccgtcttgtaactaggcacccatacacatatccacaagtctaaaactgggtcactcacgttcttgactaatacgactaaccacaaaaccacatgcattaagtaatagtattggtagcattagttcgtactttctgaaagcctagcatatatctgtcagtatttcagtgcaactctatgtacacttcaccaattccctgatatgccaatcaaatgactatatatgttgcatatcatatatctatcagtatctcagtgcaactatatgtacacattaccaataccctaatatgttaatctgatggcaactaaaacatgcatgttgaacatgtgcatatatatatatgtgtgtgtgtgtgtgtgttatactaatctaacttcaatttcacaatcaagtgtgtcgatcaaattgagtgaaagaactactcgacaatcagaggttttatgtcacattcacataaaattggtaattttctcgctaaaatacttttggggactaaatagcgagaaaatacaaaaaccaaggcacctaaaaactaccccgaccagtggaccaaaatgtccaaatagttcactattttttggggtcctgcctgaggaaacagttcatcgtttcgtagaagaaaaacccaaacctcaagttttcatccccaaatctttaacaaaccacaccaaacttttcaaaacaccttaacatcaagttctaaacataatccaataattaaatgcatcaaaaaccctcaaatcaaaattactactggagaatagtcacaaacaaacaagaatcaagcttagaaacatattctaacttactcaaactcaaacagaaacaaattctaaagatcaagaactcaaactaaaccttcatcaagttattcaaagaaaagagaagggcttagggttaccttgattcttctttgaatttcacttgaaacactatctgaaattcttgttgttttggtgaattagctcaaaattacccatggtttttctctaagttttcttaaggttgaaggaaagagaaagagatggttaggtgggtgagtttaatgtaattctttgatgtctacattaaattcttaaataatccaatctaaactctaaaagcttaatctaattactaacaaataccttagcaaaaagcaaagtaaggaattaaagattacaaaaatgcccttaattcaacactaattttctcccaaaaccagggataaaatagttataaccgaataccccgcataatcttaatattcgaattatcccccattcttgccccactaattctaagataataaaccgtatctaggtgacactgttagccaaaacgtcgattctactgttaccgggcataaaacatgaaaatgccaaaattcataaataacatgcatggtgcacttgaaatttaataaaaatttgaaaaattataatactaatagtaatacatatttctgacaatttgacttattttctgttaatgcacatattatcataaataatcatataattcactgataatcttctaacttccatatctacttatgtggtcattacaagggcccacgacctcctaaagcgttagcgtacatctgcccttggttcaaaacttagaacaatcatttttaaaagtaaactgtaaatattaaaaattaaaatactcttgttgggatgatttaaccataaaaaaaaaactaaccaacactttgttaataattatacctttaattataaatatattatgtaaataattgaaatatatctaatttttttgtcatgaaaccttggcctctatatgtgttcgcttgtgtatatggcccactattaaattaataataaaatttaaaggagttttatttacatcaagtacaactcaatattcaaaaaataaaaataattttgaaaatactcttaatatttttaatttttttttacattagtttgtgttaattttaataattattttaatttatttttatagtatttttaaaccttgtatagtttatttttatttttttaataaaattttacactacaaaaaatcttacttttagtcacaataaaatttgttagtaaaaaaattataactaattataaattactatttttatgttgtgactgaaaggttcgtgnntaaatgtattagtcacaaaaaatacaatttgttgtgactaaatgtagttttagtcacaatactcattgtgacttaaactaaattagtgataacttgtaactaaattttatgttttagtcacaagtaacattttgttgtgattaaaagctacatttagtcacaaaaaaaattatgttgagaataaaaatttgtcactaaaaataatagtttttgtatataattttttatttttattttttttcctaatatttaaaatacaatttattttatttgatagatatatatattttaagaatataaaaaggaaaaaaaattaaaaaaaaaaactattctaaattaaagatatattttatataaaataaaaataattaggaaaattatcctatatactattttttaacttttttttttttttcaaattaatggtttgaattgttcctgtggtttctctaatggtttctatgtgagttgttatacgaattttagttgcgatttaagttgctccgttagttgctataggggtttttatgtggaattctatacaaataaaaaaaaaaactattttaaaatgtaaaaatatatataaaaaccctaaaaattattcaaataaaatatatttataagtttttagggtacaaataaaattctcttaaaatttaaagatgttggtaaaatgcatgtataatatttaaaacaagatatccattattactcttaacgtttctcaatatttgataattcttttgtacattatataagtactttttcttttgtagtctatcttttatgaaagaaaaaagataaaagaaggattgaatatgtaaagaataatgggaagagttatacatcaaataataagtacggtattatttaatataataacatttataaaatatgttaatcatagcctaaaataccaatgctctacaaaatttaatttgggtgggtaaaaaggacaatttaattatgaatttatgatgagtacacaacaagattattctcttcaaattttacctacacatgtatgtattatcacattttcagatatacgtgtgtgtatgccatatatataaaatagtgtattaatgtacgatgttatatattaaatgtatcatgcagcatcgacttttggatctcaacaacaaacattaatcaatttaatgttcttcaatccaatctccatcttcctccatatattttatctattctttcttacacatacatataactcagatcgatcaaccgctccaattaggttgcctacataaatgttgttcattaaattcaccctttgaaaatattactctacacataaaggcctgacctaatggtgagacaaaagggacagtgactgaaggcccctcactccggaagaccctacccaaatatataaattaaaattattttaaatatctttatctatttttttttttaattctttcattttctaaaatttttttatttacttagaattctctcattagttcttttattattattattattannnnnnnnnnnnnnnntattattattattattatactttatttaactaaagatcattaaataattaatttttgggagaattatctatatgctgtatttttaattttttttttttttataaatttacggtttggatttctaaagaggttgcagcgctagttgcaata

SEQ ID NO: 162221 - DNA, 2482 bp, Cannabis sativa
  modified_base (930)..(930): a, c, t, g, unknown or other
aaaaaaaaaaaaaaaactttaatcccatgccaagatgctctcagacccaaaaatccattacatatacaatatttaaatttaaggaaatgatgaaatgaaaagaaaaaattaatgactgcttgtctttgaattttgatttgggaaggatctcaccaactattacaatcttgaaagctaatttcattttatttttaaaaacaaaataaataatactaaaataaagggtaatatgttttacaactcattttaactctatacatccacattttaaaactaatcaaaactaaaaaaaaataccaaagctaaagtaatgatctcacctaaaaatatttggtaatcacatatttaacaaataatatagaataatgtatactactaataagatggagttctcctaaatatatgtaaatctattttgtcaagtatttaagattatttttatttatttatttatttttgtaaaggtagtataatagtatttatgattaaattattgaaatacaaacaaatatttataatttgactaaacttttagcattactcatttaataaatgtagcattatcgtcattaatataatttaataaagaataattaatatttttgttactgaattttcgacactatcttatcatgtcttttaaaatatatacattttttttttaattttctctaaaatataataattacataataatgtctattctattaactttcgttctttttacagttaaaaattaacatttttactatctaaactttgaccaatataaaattttgtccccttctattaaaaaaacttaattttaaaaattataatgttctattaattatgaataaattacgtaaaattattaaaaaaaaacttgataaaatattaaatttatttaaaaaaacctaaattattcctaaaaaaatattttcaaatttnattttatttataaacacgtatcttgaaaaatcaaaccaaaattattgaaaatctaataaataatttaaacatactaaaattttttgaaaaaaaaaatcaagtttatttatatttataaactcacatatctttaaaataaattaaaaatataaaattaatttttaaaaaaaaaattataacttaaataaaaaaaatattatgtttaattaaataaatctaaatttttggagagaaaaatagactcaaacttgttcccgtaaaatttagtttttacaaaaaattgattttttaatatatttttttatatctaaatggagttttttttaaaaaaaataaataatcttttaaatcgcttaattatttttaaaaattttaattcttttttaattttcttaatcattcaaaatattttttttattataaattaattttttaaaatttactaaaaaaatattaaatctttttttatttttattttgaaaggatacgctttaatatttatcaaaatttatgggacaaaattactaatttaaaaagacacgtcaagatttaaacggaataatgagatatgatttaagagaaagaccaaatttttgtatatttaaaatttcagaattttcttttaataagttgtatattttaatgatacaatcagtattgtcgaacatagagtagacaaaattactaattatttatttaataattcatgaggaagaatgtgaaaactggtttagagaatagacattaagaccctaccaccacaatacatgccttgactagaaatgaatgaaaggatttggggaagatgttgattgtggaatggaagaaatgataagagagtgagagtgtgcttttataggagagagtgcaagtacaaaacacaaggccccactcattaatacattcaaccatattacttttttttttttctgttgatagtaacattcaaccattactttgcttttttatcttattattcaattacataatttgtggtgatcgacaccctagttggtattgttgttgaccaatagaacatatccaaactttttagtctatttcagtcaaacactaggagatgtttggtatggggttatagcatcactatggaatgtcaaataaatagtactttgttatattttaccacactcggaaaataggctaattagttaagagaaatgcttaagagcacctatataatgtttagcaccaccaccaaatattatattacttttggtataattcaagatcaggtttctttctggggctgaaaagagaagagagtgttagaatttggggataaaatgaatggggttctatcttaaaacgcaatgggaggagtagcacattcttcttatatattctattatctttccacacattaataatgtgagactctctaacatccccctcaagatggtggttattttatatgctcactatcttggataactcgattataagcgactcttttttggctcactattcctgatcacaagtggctcttttgctctactttttggatctatatttttagatttttggtggctct

SEQ ID NO: 162222 - DNA, 2374 bp, Cannabis sativa
gcagtgatacttcgaatgcagaatcagggtcagatattgacgatccttgttccccattaaggcgaagtagttctgcagtacctcgtttggcaccagtacatgaagaagtgggtcttttagattataatatggtttgtgtttatgtttttcgcataagacttaacttccgttttgtgtgcaggtcagggcatcagattcaaatgtatactttagctgcgatgatcattttccttcggttgagaatacaaatggaaatgatgatgaggcagcgcatgtccaggatcatcaattactaaataacaattgcaatgatattaggaatatttctcatcggacacttcattcggaaggtaactttcaattagaatattgttgtggctacggatttccccacctcttggatgtgtcaaatataaagtgtttaattttcatctattttcaggtagttcaattttgcattggttcaaaaatattagggaaaaattcgacaaaagggaattccatcgtgtggctggaatgtttttatcttttttgttcagactattcacaattttccgcagcgaaaggtttgaattctggagaagacagaacaacattcacccctctaacttgatcgaacacaacacgagtagccattcagaagctgttgaagctgaaacatcgaatgaagaagatcgtgtccttccatgtatagagcgtcttcagagactagaaaaagtatttagcgaaatcagtaacaagcccgctacaattcctatagagaaggaaaaaattctaatggaatctatggataggataaaaaacgtcgagattgacctcgagaaaacaaagagggtatgttttacttgatcacatctgataattaaaccaatgatttgtttgttggtttggctaataaccatctgtttcgtcgcatcacagctagtccatgctacggtggtgaggcaaatcgagattgctgaatttctggacaatctacaacagtcgagttgtcgagtaagtcaactttttttcttttaaaaacttgatatgatctgatgagccaagtgtttgtgtctgaaactgaaaagagacatctttatttgttaattgcagcaaagaagattgttttgttgaatgaagggtatacatagtacaatgatctaatgggattggtgggggaagaaagagaagacactaaaaacataaatagataattatataataaaaaaaacataatttaatttttttgggggggtcttaaaatttcctctgaaaagggttgttgtaacatggcacagattgtagagagaaagagaaagaaagagagagaattgcggcatgtttgttgttgttgtttcaattgagcttctttgtgttgtctttcatggctatgtaattgtaatgtacagcaaaaagcaaatccaacactttgaatttgaaaatctctccttttcttccttacctttgttttttcttcaaagcatttcatttgttaattattattattatcattggattgtcaaactaggatttaaggtgtagtgaatgtggggttagaaagtttatattggtgtaattaagtatcaggtttcatatttagtgttcaatagcattgttcagttttattttgagcattgttattgggtatcattagtgtctagtactttttagacgtgttactttgtaattggttaattaaattatatgagatttaatacttaattgtaccaataatgatattgacacatcgacttttagcattttttttggtgtgaaccaacacaacaccaaataataacagtactaaataatttaatgtggacctggttttgggtgatgacagcaagatttggttggagtgtgatgtcaaatacattagcctttgttttgttttttatttggacaataagacttagaacgtgctctccaaaagcttaaactaaaactaaatgtaccattcaatgttgttattaataaaagaaattagtattgttgaaaacttcagcatacttgtaggggaagtggaaaaagaggagtattataatcttagttaatttttgtgtttaaaaatatatgttaaaatatttttgttatgacagtgtttgttatagttacaatattatttttgtaaatttttgaaaaatttcgaatagtatacaaaaaataagtttgaagtttttgaacatgcaaggtagattggtatctcacgaactcgatttttcagtactgtaaattatttggatttttttttttaaatttataaggataatattgtgactatatcgaatatcgttatagtagtggcggacccaaaatttgaagtgagggggggcgtaaataaatttaaaaagaaaatataaagtgtagttagtggggtttgaacctttaccct

SEQ ID NO: 162223 - DNA, 2742 bp, Cannabis sativa
gatgagagagaataacactaactcttcaaaatagttaagggattcttttgtaaatacactatgaaaagcccaaaaaactattctctcttttataaggtttatttatagacgtttgtcaaactattacttaggaacttccttgatttggctaaacatattttttcatagataataagtcatcttgtcaaagtaccattatggttgtctaggtatattaccaatcacaatttcagattgtattttagacaacacaatttgtgtacataattataatcattttttttatatataaacttatcatttaatttattactaccaattatttataattatgtgaaaaatgatatagtaaattaatatacaagtactgtttcaaaaaaaaaaaattaatatacaattatttttttttcattttttttctttcaagaggatcagggctggccctgagcataggcgggctaggcctgtgcctagggcccacctagctaaggggcccaaaaaaaatttatcccattttaaaattacacgttttttttatcaattttgaaaaatataacattttttttttctaaataaggactcaaaaatatttttttttcctatgacccactaaacttcaaggccagccctaaagaggatatataagtaactttcaagtatttaaacatacatctgaatttaatttaaattaaattttaatcaaataacttcattttgatttattgtttagttatgttttggttaaattttaagaaaaacctaaattcactaatttaagatgttttttttaatggaattaagatgtatattaagaagttattgcgaaaataaaattgtattttttttttgtaaggaagtaatttaaaactttgttaacgtgtgttgttgagttatattaccaactcttaactaatccccaacaaaagaaaaaacttggtttgtaatataaagtgaaattatgagagtatagatatgtttttggaaagatccaagacaggatagcagcagctcataataatttagaattccaaattattatacgttttagagttgtggtcagatgttatcaggcgcatattaagtatcctgggccccaaacaatctacaccgttgaagatctcatcgaaaggctcagactctggtcctatagtagaatctccgggaacaatgacagggacgaagaggaacacagaattatgaaaagggaaagacgaagaaaatgtaatgtaaacaaaaaacaaaagaaaaaacccaaaggcctctcttctcttcgatctctttgattggaagttcccatagccactctgcaacgaggccctagagcgattaagacagagaaccgaaagggatctgtgcctccgcttcgatatatttacattggaattgcattaaagggtaagttttgaaatcgaatgtcaaagtcttagattagtgaattccaatgaaactcagcaaaccctgtttagagatagatacacttggctttgttcatgttgttgctgtttcgctttcgccatttcgatatttgggctgtcattaaataaaaatttcttttgttgggctgtcaatatagcgattcccactacacctaataaagttttggaactttgcttagagttcaagagcttgtgtttgtgcatatgggtcctatagatatttgtgttgccatgatggtagatttgtgttcaaatgtatgctcgtgtatgcttctgcagacatggttgaggatttttctttattaatgtatatctataatgctgtttcagattggtatttgaagcatatgcatggatttgtggaaatacatttcgggtgtctgaatgggaggtggctttcttagaattccggggctggagtttattctttgttgtggcactctttgctgactgatattctgtgagccaagggtgtgagtagcagtttctttgtgcataaaatggctgatgtagctggtttagctgaggctgcaggatcaagatttggttcattagaactaattgggagaggatcgtttggtgatgtctacaaagggtaagtgattaattattacggattgttattacacttgcatgtgattaattatttgttgctaaatgatgctgtattttcacatattgctttaacttggcacttaattccatgtccccacgcatacacattttgttcctgttggaacttttaagaataggaaactcaatgaaaaggtgcttttactgacacatcacacatacatgcacaaaaagtgggaatggtactcattttcatgagtttccagtgaggtaatcaatgaaaaaaatgagagatttgaatgaggttatgtaggcatcaattggacctttgtttaggtctttgcatggatggaaatagttagtttggagctgttttttggacagtgtgtaggatttttatcaaaaagaatgttgcaagttattggatttcattaagttttgcccagtaaataagagctgttattggatttgaagttggttgttgctcagtagataagagcttgttggtcacagagtgcttcatgaagttggttgttttaatacactttgagttcgctgtattacactgtattgtaatgtatagtattatattatattgtattttatacaatatttttatgtaaaactataaatggtattaacttttatatacacctaaatatataatatttttgtataaattaaagtttaacatagtattatataaaaatatgatatataatccaattcaata

SEQ ID NO: 162224 - DNA, 1107 bp, Cannabis sativa
atatataattgtatgtattgactttttgtgtagtggatacttcataattggaatgatgaggattgtgtgagagtattgaagaaatgttacgaagctattccaagcaatggaaaggtgattgttgtggaaacaattcttccaataatgggagagacttatagtaatactcagactcatgaagctaaatccaactttcaaatggatttgattatgttaactcaacttccaggaggaaaggagagaaaccaccatgagtttcaggcattggcaaatcttgctggatttagtgctatcaatattcaatcttctcttcaaactattagggttatggagttctttaaataatttatcaatctcttttattagtatattccttttctaatatatttcataatgctggtgtcttttattagtattcccaatattttggcttgatgcattttaatggaatttctccgttttctcttttggaaaacaaaaaaaaaaagaaattatttttttattttacatttttaaagatttgtgatttttagtgggaaaataacattgttttcatattgtcgcaatgttatactatattttcctaacgtgtatacaacagctttttttagaacaaaaaagtccataaaaaaaaaaaaaaaagaatattgattccatataaatgtgaattttttgttcttttttttttttttggtaattctaaaataatatatatatttatataaattaaagcatgagggaaggagatatgtttgaaaagattctgaatgtggatgccattttcattgaatcttgaaacttggatcatccatgtaatattattttttaaaatagtattccttaatttaattaaaattataagaaattaataatatagtaacacatgatgaacaaataaatccaagtccaaagactgttggatgaagtccatgaagattttttgcaaaaatcatgctgaggaaagtcttttttaaaatacaacgacaagatttcttttggccatccatgactcaagactccatggcatacgcccaaacaccacaaaaaactgctacttttagtgataattttttagtcacatcataatttttttgtgattaaatgtga

SEQ ID NO: 162225 - DNA, 5662 bp, Cannabis sativa
gagagagagagagagattgaaaaaggttttcaaatttttttctctttctgttgtttaatcgttcgttcttctgttatatatatataaatcacattatattgttttaaaaaatatatatttaaaatcctttttaatcctataaaataaaaagataatattcattttaattcaaattcaaaaaaaaaatatcatataactgaataacagaaattagttatatttattttattttatattatcttttaattttaattacattatcatataatatatttaatataataattaaaagaaaattatctatttaatttgatttattttataaataaaataatcaaacaaaattcacataggtttttacatgtcaccttacacgtgtgggacaatgcctacacacgtgggtcgtgttttaaagcccaaaattaatttcttaattttgtcacaaagaaaatttattatttattttgccaacaaataataattaattaattttcattaatctcttattttattaggattaaaataatatatttctcagtttaatattatttaaaaatactattacatttaactaattaatataactttaacaaataaaactaaataattaaatactactttaattatataattcataattgataattattcaagataatagttttcacaaaatttctactttttccttaagaattatttcttatagaaactaattctttctaaatttattcatcaaattctttcaatatattccattgaataacttttctctaattttgtaataactcgacagatgatgcacctgatgggtgaacattggaattgaaaacatccaaagtatgatttgtagaaggtaaattctaattacgctccgaccttgtgagtcttgtctctatgtttgatacatatctagacacaaaagttacaacttcatctacaacaaaggcttcaacaactaaattattaggtcgtggcatatttttcacatatcgcttatacaaacccatgtggcatttggttccaaacatccatctcaaagcaaccagaccatttaataacacttgatttggcaagttgacacagagatgaaccattatagtaaaaaacgatggaggaaatatcttctttaacttacataagattataacaattcctcctctcaatttttcaatgtcacaagtttatatagttcttgcataatttttttgaaagaattgacatagttcaatcaaagtgccacgaatagtcttcgttagaaaaataagtaatgaaactagaattatcttatgaagtacaatatgaaaaacatgatttttcattctatctaatttgttattatctgttacacattgacttatatttgaggcatatccatttggcaatctaacagtttgaatgaattgacaaaattccttacatttttctttcatcaaagtatagctagcatgaggtttttcaaacttgttagaagatgacttctttagccaaagctcttcacgaatcttcaagatttctaagtctttacgagctttcaaattacctttagatttaccttcaatatctaaaagtgtaccaataatgttatcgtaaatatttttctctgtgtgcatcacatcaagattgtgacacaataagagttttgaccaatatggcaactcaaacaatacaatccttttacacatttagctcattctctccatgcttatattttctagaagaattacttggtgccttactagttgtacaaataggaacctcatctagctgccgtaaattgtcatcacctgtaaaatctctagggggacacataattcaatagatccatcatatcctttactctttcgccaagaatggtttatattcaaataacaacgatgtcccatgaaacattgtttgtcagttattcttctatattgtgtatctcctaaacacacagagcatactaatttaccagtagtgctccacctcgacaaatacgcgtaaactagaaagtcactaattgtccacaagagtgcagctcgaagtctaaatgaacatttctcataagaatcatacgccttgacaccctcccacagttctttaagctcttcaatgaacgactttaagaacacatcataatctttcccaggtgattttagacctggtattaataaacacatgagatagtttgttctatttgtgctagcccaagagagcatgttatatgaaattaatattgctggccacaaactataggttgatttcatgttcgaaaaagggttaaatccatcagatgccaaacccattcgtacactccttgaatctgctataaatttagggtatacttcattaaaatgcttccaagccaaaccatcagtaggatgacgcagtactccatcttctttacaaacctctttatgccaacacatatccttaaaagtatgcttagaactaaacaatcgcttaagtctatcctttattggaaaccatcttaatcgtttatgtgaaattttgttttgtacttatcgattaaaattgcatataggacagaagaaggcatttgcatgctcaccatagaacaatgcacaatcatattggcaaacatcaatttgctcataccctaatcctacttcatatagaaggttccttgtctagtaatagtcattcagataatgattgtcatcaggtactatatcttttaaacacttttgaaggtcatcaaatgctttatctgtcaattttttaagtaccttcacattcatcaactttacaacaacactaaagacaattttgttttttttacaattttcatataaagacttctgaagagactcgaataatgtatcatacttgtcacctgcattatgttggaatttaacattagtgaaattactagttggaccaatgtcaaagtactcaccaccaatagcatcatgtagacctctagccaaattgtcattttcatcaacttcctcactatcaaataactctttgttttgtacttcctctacttgctcaccatcgtggtaccatttagcagtgtaagtacttaaaaaatcatgagtaatcaagtgcagcttgatcacccacatagattgtaattgcttattcacacatcgacaacaaggacatagcaccatccctttagtatcaaggaattgctttgcaatatctataaattcattgataccaacaacatattttaatgataacctatctagattgttcatggaatgaggatccatgtttaccttctaatttttaacattataaatatatttaagaaaaaaaaaagaaactcaaaaagcatcactaacttaaaattttatgaataatattttatgattcatttaccttacgtttaattatttattataatttttttttttaaaaataacactagtaaaaatatacaacataaaagcaacactttaatcgataaccataattgtcttttggtatgtatttatttgaatttaaaaattagatatatatataattctagactatcatcacatatggactataataatataagtgactaacacacactatcatcaaaataaaaatatatgtttttttaacttttaatctttcattttaatttcaacttcactttcgtttttctatacaaaacaatacattattcacaattggaaagacaaatcagtaaaaataaaaatactttaatgaacttatcaccaccgatactaagagaggtagaataggaagtgatgacaaatactctaaataagagctttaagaaattagaagttagtgacacgacatcaactcactcaataatctacactcaaatatatttgatttgtaagatttgacaaagaggaagaaaagtgtatatttctcattgatttaacaaagtgttacaaacagagtatatatacacataaagccaagaggtagagttagttgagacaaaactaactcactaactgaaatcagtaactaactaatcttgatttaacagattaacaacttgacagctcaacaagattagtgtcaataataggccccctcaaacttagtgtggaggagcaaccacactaagtttgtccctaagaacaacaaactttgagttggaaatcagttttgtaagtgtgtcagccagttgatgttcagcagggacatggttgacaatgatctctttgtgactaaccttgtctctaacaaagtagagatctatttcgatgtgctttgtgcgggcatgaaggacagggttagcagcaagcatgatggtactagcaatgtcgcaccagattagaggaggtgaagacagaggtagatgtagctcagtaagcaaggattgaatccaactgatttcagaaacaacaacagctaaagtcctaaattcggcctcggtagaggatcttgagatggtgctttgtttcttggattgccatgctattagattgcctcctaaaaagacacaataaccagtggtggatcgcctatcatccggatcaaccgcccaatccgcatcacagtatgcttccaaattaaagtgaggagatctttggagatgtaatccatagtctaaagtgtcaacaatgtacctcaagattcttttaacggcaacaagatgagaatgaagtggttggtgcatgaattggcaaactttgttgacataaaatgcaatatcaggccttgtaatagtagcatattgtagggctcccacaatggatcgataaaatgatgcatcaaggactggttcactgccgtagttagaaagtcttaacccactgttcataggagtactttgagttttaactcattacatttcaactttgcataatagagcttgaaggtacttttgttgagagagaattaggccatctgaactgggaaggacttggattccaaggaagtagttaatagagcctaaatccttgagagcaaattgagaacttagagctgaaataagagctgaaacttcactttcgttgttgccagtgacaagaatatcatccacataaacaaggacatagagacaggtttgaggagatgttttcacaaagagtgaattgtcaattttggcaaaagagaacccaaagtgagtaagagctgaagacaacttttcaaaccaagctctcggagcttgtttaaggccataaagagctttgttaagcttgcagacatgatcaggaaagttgggatcaacaaagccatgaggttgagtcatgtatatttctttattgagatccccattaaggaaggtattatccacgtcaagttgtcttattgaccaaccctttgtgacagcaagagtgaggatgactctaattgtgataggctctgtaacaggactaaaggtcccattgaagtcaaagtcagcttgttgatgaaagcctttggcaacaggacgagctttgaatttgctaactgagccatcaggattttcttttattctgtacacccatttgcaaccaatggggattcagtttggtggtaacttcacaagaatccaagtgttattcctctttaaggctgtgaattccatgtccatggcatgaagccgtttgggatccttgagggcagaggaaatagtggctggagtaatagaagtgtaacaccctaaataattaggcacactacccaaaatacttatgaaaccctaatcccctaaacaggattactaataaaaatagcgtagaatttaaacttt

SEQ ID NO: 162226 - DNA, 2341 bp, Cannabis sativa
actttcagaccttcgaggaagcagataccaaacacgatgggaagattgacaaggaagaatggagaagccttgtgttgagacatccatcccttttgaagaatatgactcttcaatacctcaagtgagttaatgtggttttatttatcgcctattggagtgctcttgcttgaatgacttccagtcaaatcttaaactgatagagcaagtgtgaacatttgaagtacatgaattagtagttatttatgtgtctttataatgtattttcctgcttattattactagtagaaaatgtcatatgacttttgagattttgagctaacatcagttttgttttttgcttggacagagatatcaccactacattcccaagttttgtgtttcattcacaagtgaacgattcctgaaatgtgagacaaatcaagtttgagagtatatattggggaagggaatgctttggtttgttgagacaattgtcattttttgtgcagaaaaactacaaattgacaaatgtcgattgtgactgttgtctctttgatttggattttcaattgctagaacacttattttggttggttagatgaggctcttcagctttgaccactgggttgtgcatgtttgtttgtgtgtagcagctgatcggggatcaaacaaacttggcccctgtatttgcatgccattgtatgtttttaagggaaaatattggtttttggctcaggctcaggctctcacgccccacttttgtgtaacatcttttaattgcttttttccttctaaaatttgtaaagccacctccctctctctttcttatttttctttcattatgtttgggctcttttcctgtaataactaaatttacagccaatcgtggttagtcgattgggaataatgaatttaatatttctttcttttaaccgggaactcaagaaaacagtatctgcctatctagtcttagggactaaaattttatcaactctaattcctcaacttttattttatttatttattttgcccattatcaccacaagctatttattttagttcttatgtattatttaagctatcatcattttatacggtattgtttatagcgattaattagaaaaataatactattctttttaaggtgtcttacaaactctatcataattaatactcaaattactgaaaatttcacagaaaagagcgtcatatttaatcttagcataaattttaatttttaaattgtttttagaaataaatgaaaattggaatcaatctataaaaagacgaaattgccctccaggtagaatcattcgggtccgtactccgttctttcttctgggaacataaagaagggtttaagccaccgagaaaactctatttcatattcatcaaaaaaaaaaaaaagaaaaaaaggactctcactggtcaatttccaggtaattattttttctccgtctattgtcttcggtgtcatctgggtttttctttttcttctccgaattgttatgatcgtgtatcatttcgcgtctctgtctgtgttttgggttgttggaggctgaagaggaaaagggttatgggagaactgaaagctcttactttttattcatgcatttatatctatagcataattggatcatcagaataatgtacattactttagtatttgcggttgagtttgcagataataatagtgatgtcggagaaaggagggaaactgttcacagctccccagccccagaagagaggaagaaaaccttccctcaaatccactaacggaaaggaaggtttgaaaaatttctcattcatagcttttgttaagttcttttttgggatcttttattttccttgcccctattagaaaagccggttcattgtttggagaaagcatttttcttggaagtgtgagcatttgttcactttgtttttcatcgtatacttcaccatggttaatcaatctgataactttgttctattcatgtcaaataacatgagttttccttacagtcttttgcattcataatagtttctttttaagtttgaaccttgaggtgtgcatgggattggaaaaccttacattttttctgaaggcttaagtaatacataaattgtttttatgtttttttccttacctttttgtgaattttattttaaaatatcttgtactgaatgaatgcactatatttttagcaccattaaaggggaaggatgatagctcagaaaagtcaaagaaaggaaggaaagttaagtttgacacaggtatatatgcttttgtatgatccttctcaccccacttctccagttttctttttagccttcagcttatgagttaagaattagtgtagtttttttctttttcttt

SEQ ID NO: 162227 - DNA, 3616 bp, Cannabis sativa
caatgacagcatttccataagtcaccagaatgaaccccagcttgctcaatgtgctccattattccaccaatgacagcatttccataagtcagcaagtgcatcaacatcgatctcaatggtatttgacaaatacttgtcaataagcacgggaagttctgggtcgacctttacagcattttcgaggtaggtcacaagtttttcgtcattacagacaatttccatagcctgaccacccaaaacatatcagcttcacttttggcaattcctcctttcggctgttcaacttttaattctttaagaattgcattaaacctttctctgtcctttgctgcatctattgaatccagtgttgtaccccaactgcgtacattcccatcaccactagcacatttaagcttgtgttcatctaggacgttccaaatcaataatgtttcacatcttcaacggttagtggttcaaaatacagacgatcactcgtgtcataatctgtagacactgtttcgggatttgaattcatcatgattgtctcataacctgctttctgaaaaggataaaagaacaaacaaaacatttacacaatcagatagaaccaaaagtcataaggaatatttctctacttatttttttctttaaaaaaaaaaatgtcaaaataaacaaacataatcgaaaaaagagcacaaacctgaagggcaaaggatgtgtggcaacagcagtagtcaaattcaatcccctgccctgattaattcgaatcagtccaccaccaagaatcaaaaccttcttgctttgggtgggagttgattcacactcaaaatcatatgaagaatacatgtagtgaggagtatcagcctcaaactcagcagcacaagtatccactcgcttgtatgttgaagcaacacctagagatagcctagtctgccgaacttctgtctcagtcaacttggcggcaaaatcaatctgtttatcgctgaaccctcttcttttcacttcatagaaatcgttctgtgttagattagacaagctccgagccaaaaggaactgttcctaactcagttcacgaatgtcatctatcttcattcccttagtcatggcagcatatacagcatgaattcggtctgggttaggaacatgtaagctatacttcaattggttcaagtcccaatcagagtggccacattccaaagatctcactactttctgaaaggattcttggaatgttcggcttaatgccattgattcaccaacagatttcatttgtgtcgtcagtattggctgtgaaccaggaaacttttcaaatgcaaaccgagggatctgcatgatgaacattggagaaaaataagtaaaaataaataactatatgaaaataagtcattgcttcattatggttgaaaagatgcctagttagcaagtatattgacaatttcagtcctaccatacagaaaagaccaattcaagatgcccatgaagaatataaaacacaacacatagcttataaactaatgcaatattcttatgagagatcaaaactaataatatacaattataatcagatatccgtttgtgttttcttctatatttattattcaatgtaccaaccatggagctaatgaacacaactgaaaaaaatgaagaatatatattaattaataagaagaagaaaaacagatttgtgcatatcatcgaacaacaattaactaacattttcagtgtgaaaaatgaggcttaactctgccattatactgtctaatttcgaaataagaactacatatcaccatctcctacaaacttacaagtttaactatgcctaaacagagtccattctactatgaaaccaaaaagacaatcattgtcattgcagcacaaagacaattacaagttctagtttgcagtaagttatatatataaatataaacacatttatcatccacaacaaagtatcagaactaaatagactatattgaaactatttatgttagcagcaaagtgaaactgtttatgtacatagagcacacacacatgtataaaaacaagaattatacttgcctttgtcaccacataatctatggaaggctcaaaactagcaggagtcttccttgtaatgtcatttggaatctgatccaatgaataaccaactgataacttagcagccatctttgcaataggaaaaccagtagccttagatgccaaagccgatgagcaagacacttgcgggttcatctcaatcaccatcaaccggattaacagaaaactgcacattagaaccaccacattcaactccgaattattgctaccgagtagtctctcaacctctgatactccttatcaatcaaagtttgagctggagcaacagtaatagactccccaatatgaactccaattagaacaaatgataaccacattttcatccaaaggtttcataacttcaagctcatgttccttccaacccaacaaagatttctcaaccaaaagttgagtagtcaaactagcattaagccctgctttacaaatggtctcaaattgctccctattataagcaatcccaccacaagaaccacccaatgtaaaagcatgcctaatgatcaaaggaaactcaccaatcccataagcaatttcaatgcaatcatcaagagtcgtcccaatcctgaaggtagagtttttagagtctttatgcccaatgttcttcattgcctccttaaacaactctctatcctcagctttcttaacagcttcaagcttagctccaatcaactcaacccaatatttttcaagaacttgttccaccaattccggagtcatcggagtaatgtaagtccggtcagcaaggtcaggattggaatgaatcaaaatcacttcgtaaccctcttcttttaaagccttacaagcttgagtacctgagtaatcgaactcacaaattgggccaatcacaatcggtccagcccccaatatcaaaatcaagcaaattgagtcggaccccatgaacggagcttcaaagaagaggcctttgttggtgcttggaatggaaaggtgttggctttagaggaatagagggtgaaggagaaaagggtcataattacaatgattgattgtacaatggctcattgtgaccttccttcttcactctgtgtgtgtaaacttttgtttgttacagtaaatataaagaaaagaagaatgaaactgaaaaaagcaaaagcttgagctgaatattgatttgaggtggaaatggtgagaataaggtctatgtagttatgtgttgcagttgcactatactactactgctactactacacatcacagggtacaagagtacagagtttgttttgattctgtcgtttgattagtaaagtagtattactattcaaactcaaactcaaactcaaacgtggccgacttggccgtacttggtctggtgtggtgtgtatgtaagaatattaaattttattaaatcaaatcagctacgaagatagcttctaaaccaggagggacaaaactctcgcgagaaacacaaccaggaatagaaccagaagaacgagtcaaaaagttagccgtctggtttccggaccgtttaacaaagctaattgaaataggaaacaaaagaaaggattgcataagagcaacacaa

SEQ ID NO: 162228 - DNA, 4197 bp, Cannabis sativa
  modified_base (4130)..(4132): a, c, t, g, unknown or other
agaagctgcatcttgagcgatcacccttaatgattgtgattttagttccaaaaccacttatggaattttacatcctgaacaagtggttttggattgtgatttttcgtttcccaactagacaagtctcaatgagtaatgaaaccaagacctcaaaggagcgaaccataagccgaccacttgattaacttcttttttctgtttaactaccatgacaactttagttacttgctgtgcgctaaaatttaggttagaactcgtgggaagtagaaattggaggacaaaagcaaaaggaaaaatgcccttgataaacaagtaatcaaattcttgagtggattttttgtttactctaaataactgttaatatgctattgtaccaatttcaacactcatttcttgacaagaacatacaaaacaacacgtccactattgtaatctggatgccattgtgtttgatcaactcttccaacctggaattccttcatagcaccctttaaaaagtattcaaggatagcatctgtaacagaaataaacattttagagcaatctcttgagagtaaaagtttaggaaagaaattttgcaaattttaccgtttcgaagttctccggctaacatgatagttgtattgcatccacagagttgttgaagtgtttccaacaaatctgccacagctccctcgctatagatcacgtcagatccgagaacttgaataatgtttcaaaaacaaaatgtaacaattgcatcagaagtgaaaatttctgaaaatatgaaaactcaagcattaaaatgtacgtgttattcaaaaaaaaatgtaggtgtttttcttttgttctccaagtcacaacaggaaacctatggtgtgtttggtgtaagagttttacttggtggaatttagttgaaagggattgaaattaagagaatctcaaatttaaaggtggagtttggttagaggtaattagaaaaggaaataacttttattccatttctttgtttaaagtattagaatgtcattcctattctagctatgttttcattccttccaactaatggccacttaatgaggtgtttgtgttgtgggtttgagttggagagagtaggagagaatattaaacccaagtgtcagaggagattaacattaccatcattttaatttaaaagtgagacctatttagaaacacaaaccccttggtcattacaatttaatttatgtttgacatcctcattcccatcaagtctaaacctcataccaaacgtcccataaagagtttgagattacccccaaaataaacttaaaagtgggatccactcaatcataaaccctccactaaaactacaccaaatataattttggttttgcattcccatttctaagaacccaaacctgaaggcatgtcagttcatgccataactaaaatatgctatcaaatacattctattttagtctccaaagatggagcgtgatctttggctataggagaacaagaattgtgtttacataacatattgtaactaccaaagcatattctgcgctagaccatgggataatcaacactgaagatgccctatcgagctcagtatacagggttctatagcattactaaaaggatgttatatattaaaagttgctagacatttctacaatagtattactctagaaatttttacacatttgtaggaaaataaataaactagagaggcctaaaatctttaaaagagtttagaagtaattaatcaaaaaaaatttagagcaactgtgaatcatatagaactagaacaatctagataaattattctagtcacaaatgtaggggcatgcaactacaataccccatcaaggttccattttgtaaccaagcttgagtagctaaatcaagtcttttactactaacttactaccttgtctcctctttttcctacacataaaaattaaaacataactcttccttgttccaccaattatccagtttatcaactcatcaacatcatcatactacactgactaatatccatcctattcaacctccacacacagtaatttaaataattcaaatacaaataacaactattttattcaatttcatttaacaatctatcattacacatgtcttagtcttaaataatgaattaccacgtcacaaagaagtatgtcgttaagacttttggagactcctttcagaatagatacagtaaaaaaaaagagccagaatagaagttgaccaaaggggtattgcaattttaagttcaaacatttggttattgcaccacctaacaaagaggggaaaataaattgcccttttgtatagtaaataaccataagatagaatatttggtttcaacaagtttttggcacatacaaactagtatctagaggcattgaatatgaaatagacttaccaaaatcaggtaatggctcaatcacttctgtatcaggatcatctccccaaatcaactccgtcactgttgcagaacctcgcacatttccatgatcaaggttgacttggacattcttttttagtagtctcagtcgatcaggcagatcagttaggataacttgaccacctaaaagagctgcaatgcagctggaataacaaatcaatacaatacacttgaaagaaaaataaaaatgctactctccagtcaagctgctaacaaactctaatccaactacgattacctccatctttctatgtatagaggaacacaattgatgaattgttagaatgtttattaaactgttgaatgaaaacaatgatgataatctgctcatacccaactaatccacatccagagcccagttcaacaatcttctttccttgaagattaagcatccctgaatctaccgcatgctccaaaaatttgcctagaacaattccactgtcccacattaccgaaccagttaccccaggagtgatctacaatccatgacaaaaatatacacagagaaccacattcaaaattaatgaaattgatgatcatgattcattgagaagaaaatacccttctaagttccaagagtatctcactttccccatttatttcttattgataaaaattactatactaatgatttattttctttacaagcataaacagcctaaaaaaagccttttgttttgcaaaaagttattgtatatgatcgctaatttgtacctaaattattgcaaaataacattcagctcgaaggaatcattgttacacgagccaattatcataagaaggttattttaatcatttattttctgtatcatttagccaaaatagtactagaacattgaacaacaaacaaatatcgcaaaaactaggcatcaaaacaaatcaggaccagattattacttcattcttgtaataatcgtacgatatcaaaagaattttatttatgtttccttgaagattaatatggtgagggagagaagtagagagaggtaccaaggaagaaggggactggtgaacagagagagagtggccgcaggcgtcaatagtgaggtgtagagaggactgagagacgaaggcgttaggtttggagtgtgttggctgttgaataccccaaagcagcatcgtctcttcagaggcggcatcatcgtcatcaccatcatcatcatcatcatcaagaagtagcctcaccatccctccgtacgatcccaattttactattctttcactctcatcgtcgctcactgctgctactactacttcttctccttctgctaggtcactagccatggtctgtcgaagcaactaaaaacttgtagccataaaaatatgaatatttacaaattacaattgccgcaaaaccttcaaatctccgaatgttatactttgctacgattctttgtctaaaattttgaagcaaacctcattttttgttcggtgccgttatttattatttattatttttgaaaataaaggatttttgttaaggaggtcgggtcaacaactgaataacagcgcaaaacgaagttgtagttttcaaagaattgtagagaggagtgaaattcaccaaactaaaagcatctcaaaaatcaacatttgtaaaaagtacatatattattgtaaaatatatatatttttttgagaaattctataatgcacccttacaaacgatacatctttatctgttttagtatccgaaatnnntttttagtcaaattttttttcatggtcatgtaaattatacttatttaagacatccagtaaaattt

SEQ ID NO: 162229 - DNA, 3194 bp, Cannabis sativa
ttttcagttaaaaaaatcctacaatcttttaggaagtatgaggtgaaaatttaaacttgtagaaatcatttattggtaaaaactgaattcacaaatatttccccgatgaggaggttttgaggaattggaaacgaggacatgttgtgtggtaggaaaatacacaatttcagtcctaggaagaaaccattaaagcattatggttcgttaggttaaaaaaaaaaaaccaggcttcagaactcattcaattttccttgtatacactccacatcttagagaattaaactattttgttgatttttcggagagaataatttgcttggtattgttcctttgtaatgtttaatgtttataattgaaaacaataaatcatatccaaaattaagattaacaaccttaactatgaattccaaattccatttgacatcttgaagacttatatcaggaaataaaacactgggcttttatttatatgatttttttcatgccaaagcttggttttgcccggaacaattttttattttaagctatgtgaatttagtgttgtatgctctacatgtgacagacttgattttgtagaacttgtagatcattctgttatttactattttaacagtaattcatattgctgcaggtggggacaatcactctacttgccttgactggattgctcctctttatggttttctttctggttgcaactttcaatgccattgttatctctcttctcatatcattggcagctgcaggaggatttctggctctttttctcgctggtgtgactgctatatacatcggggcattgtctatagctgtttttgtgatttctgcaacagctatttctactactatagcaattctgatagctacaggtagagttatgatttacgagtcctttcacttaaagcacatttttttggcaagaatcttacagcttatttggtgtgtttctttccttaaatatgcttacaaatcagggttaccgtttacctatatggtaagatacacagcgaaagtaatgaaaatctctgtaattggttgtaacttagatatcttttatcatcttttaacatcttttgttccttattaaaataaataagtaattaaaacataatggactggtcatagaccagaatctagatagtccattcagttaattagataggggcctctgccaaagactaccaactgttatctaaccaatcccttcaactattatttataacaattctctttcatcttacaatagccctaacaaattccagcaaaattaaccaaccagattccaactgagtagtgttctccattttttttagagatactatcctaaatgttcttttattcaaacctacttcttattagaggtttatcactaagaatggctgatagagccatcttttgttacaaatttgaagggatataactttcaaagaaggattaccaatctaagtggagtaaccgaacggtcatctgagtcttttgattaaagaacaacatttctaactttacatacacataaaaacacttgaagctgctagttcaaacatttaattaaagttatttattttttacagttttgccttaatttttatgattgatcatccttttttttttcctgaggggttttagtttttattagtgtttagaagtttactatttaaaatatactttcaatatcagataagatttgtggttaatgtcttgaggctactgtacacagtgatcccagaaattttattttgttggagccatttttctcgttatatgttgacatatattatttgtattaaccaatattaaaattcattattgcctatttttaggagaaaaatcatattttgtgaggatttaattgctatagaaattatttgtgggggcaatttactaatatttagttagaggttaacaaaatgtaacagtacacgttacatatttttaaagatttttcttttttcatgtgggggctttacccccataggacctttacttggtccgtcattgactgtggccttaggaagacattttgccttgagatgtaaagtagcctttctaaacattgtgagcggaaggtcctaaccctgcatttcgttaaagacatggcattttcagtaggcttcaagcaactgctattttcttccaaatatattcaatatccaccattggttcttaatgcatttcatatttgatattataggttggcttggatttttttgtactgtgtggttggcaacaaagaaaagccttggactggccaaacactctctgaatgtgactggctctgcactttcggcttactcttcttctaggcaagctcgccagcatcctgtggaagacaagggttcagaataaagggttagaacaactgaaagtccatgtttgtttcttgattgtacatgtttattgcttggtttgtacatgtttgtcgcttgattttttcatgttggatttcatggaagctgctagatatatatattatatgtgtgggtggaaacttgaaacctatgaattcgtctagtgctagttcccaagaccacctacattctaccatcatattttcccgcttacattgtactgttttgcttgcttaaccgttcatatgaagcaatgtaaaagatggaaaatactttttctaatttatcttttgtatataattatacatatatatatatattccaataattatgaaaactttagtatatgtgtatgttctttgcatgtttggttccttatgacattgcacatatgaaatacaccaaagtgatttttttaaatgagattgtaggtggtctgcttacactagctcttataatatagcaacttctacttgtgggatcggtgttgcaaagtgtcccctgttatgctatgtcaacggctttggttcctaagactgtttgcgatgagttggacaggatcgtggcgagattttggtggattggcaattcggaaaaacagagatatcgttcgtttaagacctggactgaaatttgtcaaccaaaaagatgtggtggtcttgatcttagaaggtttagggatattaatttggctcttttgtcaaaactgagttggggaatgctttctagagctgacaagccatgggttaagctgttggaatcaagatactgtcatgggttagatgcttggagggtggagaagagagcgggtgattcctgggtttggcaaggaatcttggaggctag

SEQ ID NO: 162230 - DNA, 3295 bp, Cannabis sativa
aggataatgaaaatgtagtcatatggcctatagtataatatttaagtttagggaaataatattaggatttattatgtatagaatttcaaatttccctatatatacgtaatttacatatgtttataattatttactcgattaattttctatatgcaaaaattaatttttttaccaataatatttctactacttttttttttatatttaaattatataaaagtatatgctatgtttttattttcattttactatttttatttttaatgagctatcttcaatttcttaaaataattataatttatgtcctaacttatatataagtagtatctatatagatttttttccttatgggtggtgatttcgccgtgtttcatattttgagaaagtataattcaattttttttgttaggataaatattattttcaaccttgtgtgggcaaaagtgaccaatttaattttctattttgttgaatagtaaattagactttgtaattctaaaatggtacaaaataatagcttgagatcaatttttctcaattttctatttttaaaaaaaccaacttgaagcttttttttaacatgaatatatgtaaaaaataattaaatatttggttgcatgcgtaattattttttcttatacacgtggtaagtaattgttttttaactagcagtaagcaattgtttaaaccttatttctcttcattgtaaaccattaattttttttttgaaaatttataggtggtcttaaataactacaacatattgacaatcatgataaaataaattggactaaaaaattttctcggatgttgaaatagataaggaggtctaccaaaacactcctttagtggcgtactatattttctctaagtttttctttttattatattttaaatgattattggttgaaaattttataatagaagtaagaagtttttatggtgcatcctgtactattttgacatccaaaaaaaaaaattagtttttatataaatttttatcacaataatttatgaaataaaaattaaacaaataaaaatataaataaaataaaacaagaagaattaagctggattgcacgtgctaatctcacctagtttatataaatttatgcaagaattatctacctgaaaagtggaattcatggattcaatgagaactatcataaaatcataaaatcacaaaatcataaaaacattgcatgttacatatattgggataattaccacaaatcacttcaacaatttattcagatttaagaaaaagaaaatcaagatttcaaaaaataaataaaaaataagaaactcaaggatgaatgatgaatgtcttatgagcccaaaaaaaaaaaagtcatatgggcaagtaagtataaactttggtgggtttatgagggtccatttatgtaaagaaaaacaaaacatataacccaggaaaatggaaagacgaataaggcatctaacatagctgtgtgaaatgtggtccaataattccctttggaaataggaaattttagatgcctcaatcaaatactttttccgaaggctctaatgagataaaagtgatccaaaaagcaaagctagaattttcaaagaagtattctttaaagtccatgatttttcttttggatccacctataatgacttgtgtaactttgcttgcttggcccacatacaaacaaaagcaaagttctctttttcccctttatccttttcttttccttcttttctttttcccgaaggttttggttaaatacgtatgattctggttaatacccacctatatttagcctctaacatgtatattttcaattaagtcttactttaatagttcatgtttaccaaagaagctcaaaaaaaaaaaaacaaaagtttacgaaagaagttgttctagaaaaaagcttcaaaaggagaatttttaaaagctcgatacttccctaatggcactttcttttcggcggaattgggtaacaatccaagcttcgtttggcgtagccttcttgaagcacgagacttagtaagaaaaggaactcgttggtgtgttggatcgggagaagatattaatgtactgcatgaaccgtggctgccctgtgaggaacaaccttttattgagtcaacacaccccggtttgttgggcagtaaggtgtgcaaccttatggaagtgggaggtgggagttgggacaaggaaattttggatgatttgtttgaggagcgagataagaagcttatcctagacataccgttgcatagtactcaaggcagagatgaactacactggattcatgaaacatcgggcttttattctgtcaagagtgcttacaagctccttcaaaaggtacaaggcagatggcagcagctagaggatgagcaaacaaaattttggacaaagttttggaagttaaaaatccctcccaaggttaaaaatctggtttggcgcgctggtagggaatgcttacctacgttgaaacaattgagattaaggagggtagatgtgcaaaccctttgtccaatctgccgtgtcgctgaggagtcaatcgagcatgctttactgctgtgtacacaacccaaactggtctgggaccgtgtgggcatcgggactgcaactgcagctactggtgcgaataacttcctgaactggtgcatccaggcatttgctactgctgatgccgcacaaaggaagctgctgccggttctttgctgggcgatatggagcgctcgaaatgacttcgtgtggcaacaaaaatcaactactgctacttctattttgaacacagccatgagtttccttgatcaatggagtaaagctcagaatactcttatcgagacgtcttggtcgggttgcacgactaatgacggagctgagcaatgggtcgttccaaatataaatacaatcaaggtaaacgtagatgctgcgttgtttaatagtagtaataagtatggttgtggtgttgttgctagagatcattatggtatgctcatccaaggtaaaacacttttgctttccggttcgccttcgcccgagcttgctgaatcaattggcatacgggaagcgttgagttggataaaaggtcatgggtggcaacatgttatagtggaaactgattgtcttacggtagttcaagcgcttagaagcactatagacatgatttccccctttggtcaagttattttggaatgtaaagagttgttatctgctctgaaaactgtttctgttttatttgttaagcgatcagctaatatggtagctcataactgtgcaagagcttctatattatatcctggttgtatcttcgatatg

SEQ ID NO: 162231 - DNA, 1465 bp, Cannabis sativa
atatatatactctataacaaataaaatatttgtaaattaatgcatatagtttatacgtacgagggcgtatacatcagatacttgagaggagggaagactgagaagaaccatttgggaatgaactcaaagttgcagtgccccaaattgttcatgaagtcaatataaatcatgtaaccaaatatcgctgcttgggagccaattccagtgactgtagttgtagccggtgggattgaaaatagaaagatatatgccaaaagctctgcaaatgggtgagttacagctgcaataatatagaaccaaaattaatttatatatgctctgcttgtttaacaagagattttctcctaatcccaagtgcttacaagtaatgggctcggtgacaatggaggaatggtgatgagagtgataacgagagtagaggtaatggtggtgtagagctctgtgaagccaatagtataagaattccacaacaaaagcatgaagcacaattgttataattactccatctgtcctccatatagctatgtttctaccatttggaagtatataggccgccaaataatgcagtattgcagtgaacaatatttggtcatcccttaaaaaaaaaattaaatgttaaattaaaaaaatagacaattatatcccaaataaataaggtatatgtataaaccaatttgtttctctatcgacttgatcaaagtcaaggctcttgtcaacgattcggttgtttcctttggctgttcgataacgagagagagagagatacaaatctgattgtgagccattcttaacagcaaaaatgggaaaatgagaaacgttgaaaagtctctctccattggatccttctttgttacaaacatgtacgtgctcttcatcgcccatggtgccaataataaatactgcaaaaagaaaatgaagaaaagaaacgtacagttaaattattacgctctagtacaaaaatatgcatacattcatattataacaagtgattccattttataataagaagataaatattacttatttaatttgtcataagatgtatatatacatataatatgctacgatagtatttaattaaccttgaagttcccaagtggcttccaaggccaatctgaaagtatcccaaccccagaagccatacatatagcacggcaataataaatgtttttttttctttattcgttaaaaactaagaagtataaaatttgatgaaaacagaggagagctcgtgcactatatataggtacattttcaccacaatttaattcaaatcgcattcaataattaaactaccctaaagtaattgttcggactcttgaatttgtttttgccaactttccaaaagatgtcgtaacaatggagatatttttcatacatatggagtagacagagttggtcttgagttgaaatgggttataggcaaaaaaaaaaaaaaaattaggcccttactgtaaagataaat

SEQ ID NO: 162232 - DNA, 4234 bp, Cannabis sativa
ttttttgtttttataaagaaccccacttatgttattgaatgtctcaatcttattggtacaattttttaaaggcttttttttcttcctggaacctacctcttcctggctaccttcgctccattgtctggcactagtctctccaaccttgttatagtaaattgatccaaacgaacccagatcttgatacccatttctatcaaaatggacttcgacgggttcatggtatgacccagatatgaggatctcgagattaatatgaagaggttcaataagaattcagaagacaatcacgccagcatctctgattttgatacccacagtactgtttccagggatccggataggaaatttggtttcagctcgatgagggcaatggggatctttgtcgtttttttgatgatattttcggtattgttttcagtgtccgtgattctcaaagacccgccttctgatgctgttttggaaacttcaggagctagagttcttcgaattaactctaatgaaggtacttggttttgtttcgtttgtcacatttgttgttggactttgattaagctttattttcgaataattgtgtatgatattccaaatttgtttctgggttttactttatttttatgatgttggatcatatagtttgagatgtgataatgctggacttcttagtgattcttattattgtttgaatcgttggtttgttctctcgttgaactgttgtggtatgctgaaaagacatttctcatgacatttccatactccatctaagctgttcgattgaatatagtctagtctacgtgtttgagatttgtatcattggttttagtctaagcttagctagatattcatctgacagtttctggttcacagttcatagtgctattacactcgagcatactaactatactttaaactctattctactacttaatctagtttgagctctgtatacttcttttttattattctttgaaattgagctgaaaaaaagaccattttctttatgaatcttgcttaaattactttcagtatggtgtttggtcttcttttgttcagtagggagcggcataagtggtcctcgctgccaaattatctcccattatatctcttgttgccaaaaaaattcaatccatgatccacccatgcatatagagcactgattggctgcctaataagtattaacttaacgaacaacattttaataatgaaatcccttgctcaagcactttataatagctccattaatttctgtctctcttttacagctataggtacagaggagaaatcatctgacactgttgactatccagtggataaactgctttacggccttcttactgccgactttgacgaaagctcatgtctgagcaggtaccagtcagcttcatatcgcaaggaacggcagcaaaaacctccttcttacctcatttcaaggttacgaagttatgaggctctgcacaaacgatgtggaccttatactgaatcctataacaaaacagtggagcaactcaaatctggacaccacagcagtaccacagattgtagctatgttgtatggatttcgttcagcggactagggaataggattctcacattagcctctgcatttctttatgccttgctcacaaatcgagttctacttgttgaccctggtgttgatatgactgatctcttctgtgaaccatttccagaagtctcatggtttcttcctgcagattttccacttaaaagtcaatttgctagcttcgaccaaaaaaatcctagttgttatgggaaaatgttgaaacataacaattttacaaatcaagataattttaagctgccaccttatctctatgtgcatctggtccatgattatgattttcatgataagcttttcttttgtgaccaagatcagaatctcctccaaaagatgccatggttgatcatgaaaacggataactacttcattccgtcacttttcttgatcccttcctttgaccatgaacttagtaaactctttccaaataaggatttagttttccatttcttgggtcgatatctcttccaccccacaaacaaggtatggggacttattaccagatactacaaatcttatttagctaatgcggatgaaagaataggtattcagattagagtctttgatgttgggactggaccattccaacatgtgttggatcagatcttagcttgtgccattaaggaaaatctgcttccagaaatcagcaacgaagaagccattatcagtccctcaggaacttcaaagtcaaaagctgtcttaatgacgtctttatcctcgggatactttgagaagataagggacatgtactgggagcatccaactgtgacaggggatgtgataggaatttaccagccaagtcacgaggagtatcaacaaacccataagcaaatgcataaccagaaagcacttgcagaaatgtacttgctgagcttgactgatgtgttgatcacaagctcatggtctacctttggctatgtggctcaaagtcttggtgggttgaggccatggatactctacaaaccggaaaacgcgaaagcccctgatcccccatgccgtcgagccatgtcaatggagccctgtttccacgcacctcctttctatgactgtaaggcaaaaaaaggaattgatactggagccttggttcctcatgtgaggcattgtgaggacatgagctggggtttgaagctggttcatggtcatgttcaaatataggttgagcatgttttgttgctgtaggttcatgagtattgtttttgcattttggtgtgtacaaatagagcgagcaataggattttgtagttaaaaaagaagtcttttggtggtcatagacatagttagtgtactatacccctcttcacaaaaatgaaatctttgtgagatcctaagttcgaatatgtcctctcccaacgaaaaaaacagagatcttttgactactcgttattttagttgagaattttggactactcgctactttttagaatgatgtggctgcttatagttaagcctagagtgtcaaacatctgaatattcttaccatttttgttatttggactaaattttccaaaatgaacgagagcatacttgtattatgtagctatgtcaagaaatacttctttttttataatcaatgagcttatacaattttcgggaagaagatagcgttgctcaatttttacacacctatattatggaattttgcctagttgcttttgtactttctctcctttgaagctatggctatgatgggcacaccaacacctggcttgatatgataccacaaattttccgaaatcaggctcttgcatgggggcagcttaggtaggatattacgatcattcaacatcttccaatattttaacgataaaatatctgatcatcgatgaatgataaatatataaataaaccattataaatatagatttcgacaagttgagagagtattatgttcttattgaaagttacgtgtcttgttgtagggaatttaaatgattacttttttgtgaccaacttcttcccaaggcagaaaaactccaatcataaaggtaaatcataccaaatacataatcctttgtcttgcataacatgaattaccttaaatgaagcacatcgataaatacacaggatcatagtattaagaccactgcagattcagtttaatcataacatagaggattattagttcttccttccttcagacaagataatgtggtatccatggctgcatttcaaaacaaaataaacgttagctggtacgagaagtatggagccaggagcctgcaacttaataagtaattacatttaaaaaaaaaatgaaaaaaagagttagaaaaaaaaaatatgggaattcaaaatcgtacgtggatttgaacggcgcacttgtaactccaactggagtgttgaaggcgacttcctgaaaaggccctgccatcttacctcgtgggaaccacccaagatctccacccttttttcctgatggacattctgaatattcttgagctacctacaaaagaaaatcatactacagttcaacaagtttgtcttgaaaattattctgattgatgtatgaagctaccaacaacaatatcagaccgattttccaagctaaaccatcactaaaggcttgttcggtaactattttgttttttgtttttctttattcaccttaacaaaattttataatttgttcttagtttctgattaattaaacagaaaact

SEQ ID NO: 162233 - DNA, 1325 bp, Cannabis sativa
ttagaccactcggccatcctgacgactcaatgttgaaatatttattatttccttcttagatatatatctatatcgttccaatcaaggaagaagaatggaataactcaaaactgactcactaaatattgtacattctacgtaatttttctcaaggacgacacatatatgctacaattatgctttctctcattatcgttttggaaattctaaggtgtaccctagaagagatgtattgatgtacttttttttgtaatggcatttgggaaaaaattttagtttaattttttttttggtcatgatcgtgaatgttatagttatttaagaacacttattttgagaaatgtagaaaaatttaacgtgttgaaaatacgatttaaatagtctgttgtatgtgtacctctttttattttattacgcgtttaaaatagattgtttaaatattattttttatattataaattatttaaaatttttcaaaattttacagaatgccttaaatagttataacctatatgttcataaagaaaatatataccaaaaaaaaaaaattctaaatgtcgaaatagtaaaaggtacatcaatacacagtaatcctatcctttttcatagttaataagtgttatctttttgttttttaactaaggaaagcttaccttttaaatagggtaaacttagttgactaaattgtggctagtttagtatagttgtgctgatggggaaaataactttagttgtgttgtgagaaaaagtaagtgcaattgaactgtgaaaaaaaaaaaactaaactgaatgtttggtaaattataaattttaaaggattgttaaaatttaaaattttaattataatgataaaaatattataatttgcttcattataatcacaaatatataaaagattatgctatacaaatttttttcttttttatgtcttaatttaatattttttttttcctaagaatctatatgaatttaaatgtatttgataaaaaaataatttaaagttatattttatcacatgtaacatatcataatatataagaaactttaaatttatgaaatttgttaatataaatttatgaaataaaacaaatatacttaataaatataaaatatttttttaaaagttgttaacccaaaaactaacaaggctaattctcgagattagtcgacgtttagtcacaagtgttatcccaattttttttcacttgacgtggcatgttccagtggccaatatcaatgccacgtgagagtacaactcgccaataaagaggctaagccatctactcaacacttcaaccaatgaggggtccgagtacttaggaggg

SEQ ID NO: 162234 - DNA, 3681 bp, Cannabis sativa
ttgatagacataattttagcaagaaccggctgaggagaaccgatcctatacaaagcaaaaacttcgaggatgtggccatcactgtcacaggatagagcaccataaccaaaagcccccttaatagcaaataacgcactgttattttaataaaactagttgctggcttagaccagatcacaccaccattggctgcaccagagggaacccaaagatgatcaaagcatcaatctcaggcatgtttccattggtacagtaatggcttagcaacatagacggtggcagcagcagagttgaaattggattgtcataacaactcatttctcccattccaaactacccaagcagtaactacatcttccacaacagccatgggttgagtgtccaacaaaccagcaaatcaacttgagaactcagctatacagaagttatgagaagccagtgaagtttcaacaagacattgcaaaagggcaattaaccaacacatgggagatagattcctcaggaacaccacaaaatacacaattaatttccattggcacgtgtttttatttaagctgagtgtgtgtggaatggtagctagttaacaacttccacaagaagtgatggttttgggtggaatactcaacttccaaagcttgctctagcaaactaaatttggtgtaaaaatatagtctatttttgtgtttccaaaggtgatacgcgctcttaatagagtataaacccttgctctccaaagaccaaccagcggtccattgcaaccgaatcattaagaggaatccgaagaatcaacccttgatctctctctataaacaagtcttaaacaacctccacatcccattctctcctaccaatttgcataagactatcaacaataaaactatcaagcccaggtacaactttcatgacaaacggatgagtgtcatctgaaagccaaggaccacccacaatacaaactgaagtgccagcccctatactaagacgcgcctcgatagtaataaaatccttagtctcatgaatgctacgccaaatgaagcttagattattaccaagattagcacacaatagagaaagtacctagctttatacacccgactaacaagggaattatcgtttgtcaacagcctccaaccttgtttaccaagaagagcaagattataatcatctaggttacgaaaaccaagactgccattattattgctaccacataggcgcttccaactcttccaactaacccctcgagaattcttcgaattagaatgccaccaatacttagccatcaattatctaactcaccacaggtttcaaggggtaaaggaagacagacatgtcataactaggaagagcttgtgctgccgttttaaggagcacctccttacacgcttgtgataaaaatctaccctcccaactattgatctttttctgcattttctccttaaggaaattcaaaattgttgtcttcttctaacctataatacatggcagaccaagatagaaactgtttttatctgcctcagtcataccaagcaaaccacaaacacattgccttattctcaaagaagtattggagctaaaaaatacggaagatttcccatagtaactttttgtccaaaagcttcctcaaaccgtccaagtaagcgaatcacattcaaagcttcacgctcgttagccctataatagatttaactatcattgacaaaaagcatgtgagaaattataggggctccgttagcctctactttccaacctttaatatcaccattcagcttaaaatgttttattaaagaagagaaactttttcagcacagagcaagaataataaatacgaggataatgggtcaccttgtttaatgcccgtatgagggataattggtcccaactctcgaccatcataagtcaccttgtaatagacagagcaaaccgtagcaaaaattatatcaaccaaatgattatcaaaacccatctttaacatcatagcacgaaagaaaccccattcaatacgatcataggccttgctaagatcaaatttgatgaccatgaaaccctcttttccttgcttcttcctcttaagataatgcataacctcgaaagataccataatgttatcagaaattaatcttcctggtataaaagcactttgagtgtcggagataaccagagggagaacaaccttaagtctgttagcgaggacttttgaaaaaactttatacaaaacatcacatagtgaaattggtgttagatcccccatattaatagggcatgtcttcttcgagatcagcactatgtttctattatttagtccatcaagaagcgtaacagacaagaagaaattttttactagctaatcacatcattgccaacaatattccaacacttttgatagaattatggggtcataccatccgttccaagggatttatcagggtacatttaaaaaagagccttcttaacttcctcatccgagacacggatcaataaatcgatattatgcaattgagagatcttgggatgggtacaatctacaacgggctgccaatgagaagaacttgaggaaaataaatcattaaaatagtcatacacaagctctgccagacccaaatcccagtcaacccaaacacccgaggaattctgaagctaatcaattgtagtattattcttcttgcgagaagtagctttggcatggaaaaacttactattctaattgccttcacagagccataattgcttagagcgctagcgccaaaaacttctttttgaatgtaaatttcagccaaattcttctttgcttcagcatattgtatagtagattcggagtcaaaaagcagcttaagtctgttgatttcttccttgcatctcctaatctgctccttaaaatttccggtgtaatcacgacctcaactaaaaaggttatcgccataagtttttattttcaccataatgtcacaattagcacacatttcccacatgtgttgaacaacttggacgcaaagaggctcctagagccaagcattttcaaaacaaaattgcttaaccttggagacaaattttatggctgaaagatttaggaggattgggaaatgttcaaaaactgacacctccaaattaaatagttgagcaaagttaaaatagccaaccaactatcactataaccaaagctcgatccaaggaacctcagtccaatttgcactgcctttacctctttcccatgtgtatggataacccgtaagaggcaaatcatgcaaagaacaatccaacaaagtttgattaaaactatcaatcaaccaactaggatatggattatcacccacatcattacaattaattatatgaaaatttaatttttttttaatggatatgaaaatttaatttaattcatcagtactttatgctataatctttattaattaataaaagataaatgttaagggacacttggtgtcaaacattataatgagtggtatattactattggtgcaaaatactatagattctcacatattttgatttaataaataatataaaaaattattaactatagataatgcacaatattatggtgttaggtactataaaatgtcaaataacactacaaaaatttttacttttagtcacagtaaaatttgtgattaaaaataaaaaaattgtggataattataaattatcattattgtgttgtgattaaaa

SEQ ID NO: 162235 - DNA, 1162 bp, Cannabis sativa
atatgagcgtagatgaaccacatttcatgtttttgaatagatttgaggaagtagatggactgtgaaagtgtacaatttgtaaagattttgggttactccattacggttgtattgtctagtgagttcacaaacaataagaagtttcaatttttcaaccagtacacaaaagaataagatgcatataacaaataaaatgtgagtagaattgttacaaatttatttattatcatttttttataatcttgtctcacattttgagaaatgacatacttctatgaaaagcatgaactcaacgttttgctactaagtctcccataaggcctccgccaatctcgtaatgtctcccttcggaaaaacctacttccaatgccagcttctccaattccttacctgaacataagaacccaatttttgactattccagtacatgtgttgtccatgaagcagtaaatgaatttttaagagaaataccaatagtgaccacaggctcaatttaatcaaaatagaaaaccatgatgataagctactaagagaaaacaagacctgttaagaattctctgattgaacttttcaaatatctatactcctcttcaagcccattactagttgcaactgggacgacaacattatcgatcatccattcctagcaaagagaaaaacattcaaacctttcaagatcttatgtaagcaacagatgcaaaatagtcttgctaatgacatttgataggcagagcacagatttaaaatcaaatcaactatgcagcaagatgaagcatagtgactagtcatttacaatatagacagcttgtgcttttctttaatacctgaatgaaggtagtaactggtagggtgctcttattaaagtcaagaacagatattctagagcctgaaaagtacagaaaaaacaataaacttaaaataatcctactttcaaaagagggaggttagcaaatttaagctacctgcttttagcactctatacatctcctgcaaagctttccgcttatcgactacatttcgaagaccataacccatagtaatagcatcaaagtaaccatcaggaaatggcaaatcaagggcatcaccttccacccaccttcaaagcaatgcttaacataattatcagtaccaatgtctggtgatcattgaattacaatataaa

SEQ ID NO: 162236 - DNA, 2651 bp, Cannabis sativa
tggcataattagttctatatgtttctgtggcataattaagatggcacgtgtcatgcttttgatttaatataataacaaaggcataataatctactagaatatgtttatacttcatcttcatgtgagctgaaattggaaaacaagtagattgattcatattgaagtgaaacgaacaattgtgttctatgttgcataattttctccagttacaaatagctttgtataaaccaatgtaagtaaggatgtgcatcagcatcatttgtttgtctcgaattaacttcgtatttcgttcagcaaaaagagaaaaagaaaaaaacaacttggtgatttctatagctgtctttttgtgcaggagtggcttgtactcaattatttatttgtttattttactagaaatgttgagtagagcagaagtgcctgaggggaaatcatttccattatagtgcttatgctcaaatttgcttgttgactttgctgctgatacattatttctttttttgctggaagctaatacgacttaaaatattgtagactcaatccagatgagttgccatgagatattttcatcttcttaattcagaaaataaattgaaccttacctacaagttcatcaaattacacccaataaaggcgtaactccatttgcatggtggattataagatcttttatagtttcattgtatcagaggagacaattgaacataaaaattggtatcaagtagcacactaattttcatcctattttttttcctccttctaatgcactactctttctcttttataattacataattgttgtacattacgattttttttggaaactgattaagaaattttaaattaatgaattttagtccacaaatcagtagaatttgataattgatgccttgacctttttgtttaaaatcactctataccactgcactagacactgtttgccacccttttgtgagtaagtagaggagacattttattgaatttgttaggaatacaacaaaccttccgtgagtacgtagaggagacattttattgaatttgttaggaatacaacaaaccttccgtgagtacgtagaggagacattttattggatttgttaggaatacaacaaaccagtgaataaattcggttagaaattagttttctgttattttcagttatcattttataacacaattagttaaactcttgcaaagctatctctatttctttcctgttgtactccggttcttcattgggctatataaaaaagttggccatctcagttcagagatgagctcatttttccaccattttatttttcactttctttctcacttccacagtgggattgtgtctgtgacacatcgaaacatgtccgaactacaaaatactctcagagatagtttggtcccagatggctttccaacctttggtgaattatggcataaaacaattattcgataacgaactcatcttactttgcaaagttatatttgggaatacatgatgaagctaactactaaagatggtcccaaattggttaggtgtgccttttgcaacctgaaactcctaggtgggaggtccaggctttaaacttgtttgatcatgttccatcctccgggatcgttgtgttttttacattcttggaaggtaattctgagctagtcttggattgctatgctctagttgtatttgggcttgacgtgccccttgctgtcttattgggacccatttatgaagccacgtgtctaagtgttggaaaatatacatataatcttcttttggaaatttttaattacatacaaaattataaaactattagtatatataaccttaagaaactaatataacatctaacgtgacctattcgatggattctgtcgttgcctgagtcttttactctagcgactgatgcttcagtggtatcaggcaggggttttgttagtttgggggggaatgatacgggtgtggtttgggtggcgtggtcatttggtgtaggtgatttctctgcgaagttgcttgccatttggttgggtctatctcttgtgcatcaacgtggttttcgtatctcccttattaatagtgattctacagtggcaattggttagatgaataaacttcacataaattttggtgttcagtcattttattagatgtctattctttattagttgctgttggtggtggttcttgcagcgttgttccacgttcggtaaatggtgttgcccacatactggcaacctctgttactaatttaagagattatgtttggacggatacttgtccacgattttgagttcttcagtaacaatagatttagctcaatgaattatatctttccctaaaaaaatatctaatgtgacatgtcatcccataatactggaaagaaaccatagtgcacaaacttggaatctgcttcaaaaaattcaccgaattacacatttaactttgatagtgcggtatcaaaggtaatagttcaaattaacaagagaaaaatatatttatagcatgtgaattatatatatactttaatcaaacaaagaaaaaagatacttgcattatatttaaaaaaaatgtagtagagaaaattttttttttttatttatttatatttgttgaccgaggttttcggcaaccaatataatagtaatatttacgaaagctataagga

SEQ ID NO: 162237 - DNA, 1762 bp, Cannabis sativa
  modified_base (1705)..(1720): a, c, t, g, unknown or other
tatatatatatatatatcttatagttatttcatgtatggatatatcatatttaatgaaggtcaaattaaaaatatgtttattaaaatacatgacgactttttgttatacgaacaaaatacataatgatcacttgataggtcgttaactctaattgccccccgcatgttggatataaatatttgtatatatagtacaaaatgagcaaatggccattgatttcggctaaatatatgaattgcacattaattaatttcgactaattatgagttgcatgcacaccatttagtttgacttatgacaaaaaagcaaaaaaaaaaatcgttttgactcttaattatgtgtatatatatagagacatgtcatataccgtaatacatgttaacttatatactatatatattgctactatatgtgaatttattatttgattaatgcaacaggcctaggccaggaagacggaggaggaggcatgaccatcatttataagatattcttaacttagaattaatcatctaacgatgaagtttagcaaagagccattcaacaagtccaaaaatttcctccttactatgtttcaatgtgctattgttctgatcaccttacttttagtgcaggcacagtcacaagctcaatcaggtttgataaacaactatctcttgtggcttatttttttatttctttttctataatatgatcaagcctcgatatatacattatattgtggatcgaatcccacttttgtgactatttttgttaaattaccaccaatacttaattaatcatatatgttattttaggatcattaattacaaatgcatgtattatattagagcattattaattggtattttaaggtttttaaacatcacgcgtacgtctaattaaaatgtgtgaaactattattcaaaaaaaaaaaaaacaatgtgtgaaactatatattgaaatacactcgtaatagtatggcgactaggttcttagcattatctactcattatattatatattacatcaattgattagatatatggatatggatcactttttcagggttcattagcattgactgtggattatcagagacctcaagctacacagatgaaacaacaggtctagcttacatttccgacacaaacttcacggatgctggtgaaaactacgaaataacacctactcacaaattaataaccgatgaaaagcagctttggaatgtgagaagcttccctgaaggaaccagaaactgttatactctcaaacctatgaatgggagtggtgaactgtacttgatccgagcaaggttcatgtacggaaactacgataacaaaaacagtatcccatccttcgatttgtatattgggggtgacctttggagtagtgtattgctaaagtattcgtggagtattcaaaatgaagagatcatgcatactccattgtcagatcacattcatgtttgtctagtcaatacaggttttggggttccattcatttcagccttagagttaaggcctttacacaacgaaacatatgtaagtgaattaccagcaacatcattacttctccatgaacgccttgattttgcttcagctaccaatcgaaccaccaggtaattaattaaccactctggtgtaaaaaaaaaaacaattatatttagcagtcaaacttcttattaagtatttgatcaattataatagggtaaatactattttnnnnnnnnnnnnnnnnaaaagttacagattggaccatgtgttttgttaaatgacaaaa

SEQ ID NO: 162238 - DNA, 8360 bp, Cannabis sativa
  modified_base (96)..(97): a, c, t, g, unknown or other
  modified_base (235)..(242): a, c, t, g, unknown or other
  modified_base (7536)..(7547): a, c, t, g, unknown or other
aaaaaaaaaaaaaaaaagcattggaggaggtgagacaatttttttcataaaattacatatttacctttcacaaaagagattatttcacaaatacannaaaacaataaaaaaaaaattacaaaaatacagttttacggaattttaaatatttttacatttttttattttatttatagaaaatacgattttttttatgttgtaatcttgttgatttttgttatttgtatgttatttnnnnnnnntgttttgatattatttaaatgttattttcatattacttttatgtagttttcttattgtttttatggaaaaccgtaaaaatgtaaaaaaaaattctttaaacataaaaaatgtaatttttttataaaaaaatatgccttctataattatcccttcataaaatatgaaaaaaaaaacatattttatcaattactttttttaaaaaaatatatattttttaaattttgagaatcatttcttattggaattgttttaaaagatcattacaattatttaataataataaaaaaaaacaaaaaaaacatattaaatttaaattatatattttatcataaataatcttgatatgaaataatatttataaaaaaatcattattaattaatactattactattttataatgattatggaatttaaataatatatattaatacaataacataataaattaaaaattaaatataaatataaaatattaaaaagtggcaatatagtaatattagaattaaaactctctccatcctttctattatcactccaataccaaacaaaaagaatgtggagttatcttctctccttcctaacataccaagcaacataaagaattttcaatttcctctccctctttcctcttctccatcttttttaactaacccattcatctttcctcttcctaacataccaagcaacataaagaattttcaatttcctctccatcttttctcttctccatctttcctttaatttttatttacaatttagtctttttttaggtatttttatattctttttttgctacattacgctttttttttgtaaattaattttcattatgtcttaatttttacatttacttcccatctaattttttttttgtcccgctgaacaaaatttctaagtttgtcctagcatattagtttgcaccatggaaaacgtcttagttttcttttaagtgatctataaatttgatttttacgtgagtcttaactactcttgaaagaataatcttaacaactcatgaaggatcaaaaacatcaagaaaaacctcttcaatcttctctatgaggcctaggtatgctctttcctctccaaagttgggattagtctcctcagagctcttgaccccaagcatagagtcatttgttatcttctcaaggatgccatgaactccatgtcatggtttcttggcccaatcaagagaactgagcttcctattggtcacctcaaacacaattggcttccacttagagcatctttaatagaagataatatttatagttgtcaaaatatacacatcatcttaagatattatatttttattttttttttcagccacataagatctgtcactttttttaacaaaatactctaatggttgacaactctaaaagttgtccaccatgatcccacatcacattaaattaataatttttttttttaagtaaaaagagaagtatttttaatagaaaaaattaaaaaaaaaatggcatgtagccattgttcatattaaacaccactttacataaaattaatcttgaaaattgaacaacattacatatgtagcaagaccactctattaaataactctattcgagatgctcttatgtgagaaatttgacaggaaaatgttttgatcatcttgaacttaattgattcaagtcagctgaggatgtcattgtaaacaaacaagcaatcaactatgacatacattcatcttagtagtgtggctcgaaaagcatcctcctaccaccaaggttatgggttatctaacccattttctcggttgaccaagacttttttggaccttcatgttgatgatttgtaccattaccaccaaaaggtcattgtgcgggttacacaattcccaagcatgatatggggtcctcaaatgatgatcctaataacccatcaatgtttggagcaactaatgagagccaacctttacttgaccttgtgatcacctgttttcatgagtcatgaccctggttgtggttgttttcatggaagttactaagataacactgttattcttccaaaagtggcttcatatacatatataaacatataccagttatatacaattgtagtcaccttcatataaagggaattgttttggtatattatatataaaaaaaacatgtctccactacaagcataaattatataagttgcagggctgactgactccgcaagtactctgaactgaagtcacatagcaaattacagaagacaaatgatggtatgtgtatctacacgaccaataaataaaagtaaatataaaccgcacaaactataagcaacaagttaaattttacaaggcaaagaaaagaaaagaaaaaagattacaaacaaatatatattatatatatagcctacttctttggaaacaaattccaaacttatgctttgattttctttaagagagtttccagtctgaggttggcacgtaatgttgcgttcgacgcaaaaaccaccccagaaaaacaaatttcagaagctttagtaaatagtatattttcttcgtctttcaccccttgaaacgaactacgacgattgatatgtcatctttgctgtctttgtttagtgcctcagctgctaattgtttcgctgccctctgtggatctttagtcttttttgcaacatcaactgcttcttggttagacataacctgagtttcgggcgaatgaagatgtcaaagattgttgcgagaaggcgagcatgaactttaaggtaattgtttgtgaaagaaaagttgaggaggaaaaggatgattaattaccttccataaaccatcacttgcaaggatgagaaagtcggcgtctgagttaatatcttcagattttatgtcgggatcagagcgcaagtgtgacttaagattcttgtctccgaatgctcgagaaactgccagctgcccattaacccgtgcaacatctcctgataatgtaggcaaaattaaaaaaaaaatggaccaaaacagatgatgagctaaatcaaactaagatttcatgcaagtactcctttggattcactctaacaaatattatcccacacacgggcactgtcgttttcactttcacataactagtaaaatgttcttggaatttaaagacatgaatcaaagtacagaaccatggagttgatatcatcaataacaaaaatgtgaaacacttggaagaaaaacttatttgcagaaatgagtataaaatatccgaaaatgccatcatgtgaaacttttcattttggtaaagtatttaattgaccatatatctaagcaaaaggcacagtgtcagttctctggaaaaaaatatattaaacatagttcttgctaaggcatactaaccaaaatacatcattgagatatcaatgttactaggtcaaatgaagagattgaaatactagagtgtggctcaaaaattaaaaaagaaaataagtcaaagtcaataaagactaaggtggcgtttggttgggaggaatgaaaacataggaaaatgaaagagaatgggaatggaaatagaaatagatatagaaatggaataagatttaaaatacatgctgaaaagtttaaatgcaaccaaacaaaggaatgagatgaaaattgtttcatttccattccattctatttcagtacctccaaccaaacaccacctaagagtttgaaatactcgagcataactcaagtaaaacatgctgaaagtttaaggtatgagattcaaacctcagctgaaccaatttaacaaatgggtaactactaactcttttgtaaaaaaaacaaatcaaagaacacaaaatgaatttcacttgaagttaatgcaacaaaacgcaaaactggataaatggaacaaatatgtcaaaacaggaaacgaaaatgacaactgtggctcaaaaatcaaaatataatttgtatagattttagttgtttctaaaatatttagtataaaacacacacacacacaagaacttgtttaaaacataaaagaaacagatgcatctcaatataatccaccacagataggaaaacaaacccttggttgattcagtgaaataacctgaaatttagatgtagttgaaaactttactgcaaaagttaacagaaaacagaccgaacaagcgatcttgttgccacaaaaaacacatatatccaatatagacaaagtacttgccaaacatgcatgtaagagaagatacttccaaataaatttaataatcaaaaaaacagttcatggattgcaattttcttaccacaacagcagataataacaaggtacgcacgttaaaatgtactcgcaaatttttatcacatatagcaataaccttcattatctttttgttagacttatctagtgtaaatttaatcatactagagtatagcagtcaccctttgttatattctcttagtctgaaatattcaattattttgttttgcataaacaaaaccgactttttgaaagttaatcatggaactatcccagtagattttcctagattaaacttattccctcaaaatgatagaatgaaactcagaaaacatattcattttaggccttcagtaatcctaaatgacgttataattcaatccaaactaagctagtctcaatctaaaatatagatcaaggctagatagaccactgcaccactataaaaattttgataatttgaatgaatgcatgggccaagggctgatatagttttgcaaatgaatactttactcctccccgtgaaatgcaaggaacatactaacatgaacatatgccatagacctctggattagtcaaacaacctggcatgtttgagacgaagccacctcggttctcaatgctaccacgctcagtgttaggttcatgatcaattgtcatctgaactgcctgtcctttctttgagagaactgctcgtgagtctccgacgttggcaatccataactttcggttgtctatcaaaatggcagtaactgccgtggatcctcctcgtcccaagtctgggctgtgagaaagaatagcctggtctgttctctcataggccttagaaatggacctgctgggatcggtccagaactcttcctgcaattcattagaaaacctatgtataagcatccctcatttgacttgtacacttccaaaatcgtataaataaccttagaaaaaaaaaaaaaaaaaaacccttcaacaatatgaagccaatgactcacatcctttaagatattagaaaataagttcttttgtagataagcaggtacactatctcccaaatgcccatcatatatagcaaatagtccaagttcatgtccttgcatttgaacaaatttggctacatgatagtcttccatgggatgatttgcttttcctttaaccaggctgaacccatacttgaccgaggcctgatggctcctgcccttcccggagctacatgaagaccgtcccccaacaacctggcatggatagtaaagttagggaaatgaaaacaaagtgcataagaaattgcagaagttgtaaacatcaaaaagagaagttggaacaaaagaaacaagctaaaaaagataacaggaactctacaggcagaaacacaattgagttgaagacatgttactaaatctggcgggtttgtttaccaaatcgattgaaaagatttcagcaatcacttgaaacattccataacatatgatgaacaaggaccatcaagacaaagaccatcattaccttctaaaatttccaacatattttacataaagcattcatttcacttggaattttcaaaactgctgtaaaaataggagcatgttatagatgatgttccatagatatcatgctagtttcactcttgaatacattaagaaaaaattcccgaaataggagccctttatgtagtaaaataacacaaaaggcaagacaagtcaaaagtggtatacatatgcatagaatgcacaaattggaacttgcctaaaattaggattgaatattataaagagaaacacataatagcatgatacaataatcaaaatctccttaaatatattaaagaattagaggaaacacccccatatattcaaggaattatatatatatatataaatatatagatttataaatatatacaaagcagaagtaagaacacaaaagtctcacctgagaatagacagaattgaagcaacatagattatccataaaatccaacccacctcaagctctccctgtattattcaacatcgaccacttctgcaaatcaaaaacaataaaaattaaaaaacttaataaaataaaatcaaaaaagaaaaaaaaaaagataactcttctgcatatccacaaataacaaacatcaacgaaaaaaaaaaatctgatcataaaatagaaacaaaacccatcatcaaaaagtaatattttagaaaaaaaaataaacaaaaacatcaaagaagatttaattaacaaatgggtagtcaagaaatttacttaccgatccaccaatctactattttttccagaaacaaagctgcagaagacttgaattatcgatttttgactctttctcttgagagaaaactactatagagataattatatacaacaaccactaagacacataacaatttattaattatatatatatataaaaaaaaccaaataagaaagttaaaaaaatagatataaaatatatttctttattatatttttttttctaaaacaaaataatatgtagagatgtgtaatatggaatggttgaagatgtaaccgttctagtttttgtttttgggggtgaagtcttagaatggctgccaaaaggcagagcttgcccttattgactttgcagttctatttttactttttattttttgtttgtttgtttttatattttatgttattattttattaattaataattaaaaataaaactatatattattattattattatttttaaaagcaatatatataaattattagttttactgacactgcttgtttgattattacttacagctgtttatgtttttgaggtttcatagatttgatcaaatgaattgggcctttgggtttggtcttctctctctctgtctctctctctttaatgtggggtcacccacagacgaccttgctaccctttctttacaaagtcagccacttcttttttgtttttttttattatttttattctttttcctgtaagaatttaatatttatttttaattttataaaattttatagtgcactctttaaaagagatacactaatacaactctttttttagtatttgaaataattttttagtcaaattttttctcattttcatgtaaattatagttatttaannnnnnnnnnnnaattttaagaaattcgaaaaaatttaacacgctgaaaattacgttcaagcagtgtgttgcactcgtgattattttattttatacagtgtgaaaatagactgtttgaatattgtttcgtatattttaaatttttctgaattttttaaaattttgtaatatcttaaacaacattatatgaatatgaaaaagatattagactaaattttttttctaagtgtcgaaacaagtagatagtgcattaatacttttaaagattgcattataaaatcacctaaaaatatatatttatttttaataattttttttttctaagaaccttggttagtccgtttttcttttccaaaatattattcttatcctcacctatgctttattttatctttttaaaatccattaaaatagaggatagtaaattacagttgaagaccacttgtacaaatttttcttttttgaagaagacttgtacaaaaatcatatgatactaataaatgtatttacttaagcttttctttttaattgtggatcaaaacctgaaaaaaaatttatcctgaaattataaaaagaataatattataattgaactgttaatttaataatttgagtaccataataaatgaaaaagtagttatgggatagatagtaaccttttgaattccattgttactttgtcctctttctttgactctttagatttaagggatttaaaatggggttgagatgtaaaatggtcttaaatttggtaactaagttagtatatgtcaattttttaaaaaaattaagaaaattgtcaaatctaataaattagctaataaa

SEQ ID NO: 162239 - DNA, 3941 bp, Cannabis sativa
  modified_base (1032)..(1037): a, c, t, g, unknown or other
atatccaaacaagaagttaaaactgtaaaagtagtagctaaaaatatgatgatggagggagggaaattaaactatctcccaccaaaaccataaagtttttacacgtgtgtttactgtttaaaacaaaataattactgtttgaaaacagtgaaagaggggtgaaactaacaagagtaaaagcttttggagttttgactcttaaaaataaataaaaatacaaaaaagtgggggcctaataataatagtttcttcaaagtacgtgaattaacacactactctagggccttagtaggggaacccatgatgtcgaccattgatttttatacctattttttctaccatcacacacatatatatattatatattatattatgcatgtacatgacacatatgacatgatcatcatcacaatgataatgatatatatatatataaaaagtatatgaaagaagctgacatatatatctgcccccacttcttctgacacctgtccttttgataacgacatgattctacaaaaaaattgagtttgtataacaacaactgaacaacactgtatattgactattgacccttcagattcatctctttaatttgcctatttcagtttttatttttatttttttttagaagaaaattgaaaattgatgaagatatatgtaaatgttggtagtgaggaattaaagtttgtgtttgtaataattaatgaaaacatgtgtgtttgtgtgaaatagtttaaaagctaaactgtgaagttacttaatatgtaacctgtttgtgcaatgatgtgacaaatagtacactttcttttagtaatatttacattaaattaaatttaccagtactgcctttattattagctcactatttttatcttccttttaacaaccaacttaaattcctctcacattattctagtcagactcagaaccaagttaacatatatatatatatatacatgagcatggttatgtaaaagtattcatagtgcttagcagaggtataatcttataattaattaataatttttnnnnnnatttattaaaataaaatatataagtaagattcgatattgagctgtacaccactagtttctagaattctcttatgtgttaatattgctattggtccaactaagtatcaagtctcatataatttaatgtaataatttttaagtagtatcactagtcaatcgcaaattgatatatctacaagtgttaggcaccaccgatacccaataataatactcataagagtattacatctcataataatactacacttcataccccttaatatttttatatatatatatataccaactttcttcatttaattatatatatttatatactagagccaaaataataacctatctatctataatttatttgaattttaaaatttttattattggagaatgtttttatgaaaattccttaaaaaaatacctcttttttagattaatctcaacagttcaaattattaattttcactttattattagaaaattataaaaaaaaaaaacaaataatggaaataatgatattgctcttctctatatttatttatagaagaagaggaggaatattaagttattaattattgaaaaaacccagaaaccttgaaacgattctagctagatgaatcgaggggatttgaaattttcagcaattaatattatgaatcaaaattggattattaatcaataataaacaaaaaataaataaaaaattggtagcatttcaaatttgaaaaataatattactgatctcatcagatgagggaataatatatatatatatatatatggatcatgaatatatagggtaatacaaatattgataaaggagatgtatttgaagagagtgagatttttttattctaattataaacaaaggttgtgaattttgttataaataaattgacaaaagaaagaatataatatatgcatgggtataaaaacaatgaagacatgagaaaattttcttcagttgattagaaatataaaagtaaaaattttaccaaacaaacacaactaaagactttctatacatagtataagaaaaaatttatctttgagaaggtttgagaaaatacctatcataattagagacttcaaaacaaaaaacaaagataaacgaaaatgtagccaaataaacaatctcagtcgtttgcccatcaataaatgggaaattaatattttatggagacatataagaaaaaacttataaaaaaaaaaattattatttggctaatttttttaattaatttaagacaacttatatattttacataatttatgttatatatattcaagttaaataagttttgttatgcttaaagaaatttttggtgttaaagtatatacattatacatatatatatatacgtacaatgaactaagatcaaaatgtatatctctaaaaaaagacagtgggaattcaaaaccatatacgtacgtacttttacaataataatacgtgatatttattgttgtggagtaaaagcctttgtccctatatatatatgtatgaataattatgttattttgatagaaaatatctaataacgtctcagaaattaaattattataatggctatatatatatattaatatatgagatcataaaatcgaatttaatgttacgtacaaatcataataatttacttaataattaatagactatatatattattaaaaatccaatgggtgtttttagactgtataggctatagaatgaacattatttatcatttatggtttcttctctcaactttatgtcatatatattatatatatatatatataattatttttatgtgtgattattggtgtgatcttgaaaagggctacctgtcttattattttgaattattgattgtaaatatatatatatatatatttatatgtatatggttgtagtacagacatatgggtgcgcactatcccaacattattcgaaaagaacaaaacctttttttttctcttttccctcaaatcgtgtacaaaagttactatagtcactagatttaattggacaaacaaaattaattaattatttttaagtgttcttaacccaatattattacatagtcactcctctagaactcatatttgaacagatggaagaagtttacatatatatatttatggtataatctgtgtgtgatcactttcaaactctttcagcaaaataaaattaataaatgatctgaaagaaatgtataacaattataataatgaacctcaaattcttatgagattaataaatacatataaataactaaatgaccaaattaattaatagtactaattaaaccgaataacgatttttggctgagaaaatagatctagctagggcagtacaatgtatatattttaactatagacactataaaaaaaatagatacttttagtaataactttttaatcacaataatataattttttgtaattaaatgtgatttttagtcataataaaaaattatttatagctaaaaatattgtatatagatacaaattgtgactaacttagtataattaatcacaatagtgttgtgaaaacatatatatttattcacaataaattatgatttgtgtgattaatatttttagccataaatgttttaatcaaaatataaaaataataatttataaagagatagaatgtattatactgaaagttattttgagataattatatatatctactcaataatttttattaaatgttttttaagcatataatctcatttaagttttatttctggttttgtccgtaccaatattttggtctctaataagaaaagtttgtttttcactgttgcgacgtacgtatgtgcaacttttatttgcaacaaaaagtaattaaattacgagtaaatttaacattgaaacaaacgaacactactgtaacgtccccgcttcaagcctcca

SEQ ID NO: 162240 - DNA, 2036 bp, Cannabis sativa
aaatcattatgtgtatgtatatgcaaagaaaatatcaagacaaatatccaaattaaagaaaaggagatatatatttaaagacaaaaataaaacaattaaagattagctggccatgatattacataaatgcacgcaaagccaaataattaaatttgagcatatgtcgaaaataataataaaaaaaaaataaaaaaaaaaagagaaagaaaaatttatatgaatacaaaaaaaaaaaaaaaaaaatcctatataatcaagatgagaattgaaacgtagagaatatattgtgtattgattattgcaatgactaaaaaaaaaaaaagctctaactaaatttgtgggtgtacaagtattaaaaatttatggtctttcataatcaatttataacaattagagaacattttctttaaaaaaaaataagaatcaagattcacatctatgggatgaacatgaattttgataatcaaaaaacaagatatatatggagtgcaaaattaattaagtgatatgaatcaaacaagtataatacaatatcacaataatgtatggatcaaaaaaataggagaagcaaagtatgaacacaattaaataaagcaatacacaaattaagattagggtttaaaaagatgcaactcaaatttgagggtatcaaaacgtgcacattctaatgatctctgttcaaaatttttagtcctaagcctccatagatgcttaaagctattatctcaaaataagagtgagaaatgggatatacaagccttgtgaaactcaacaaatcaagcattttttgaggaagtttcttgaagagaataagtaaccaagttagagcagagaataagaggtctagagagaggtagagaaaatatgttatcatcataatttcattctcataaacccaatatagtgcagaagtcattctagctaggtctcagccattatgatatgacacttggaattaaatttggagccaaaacatgtttaaaacgcaaagctaaaaattccatttgtttgccctaggaaacatgtcgcccaatacgtaccaagcgatatgtcgcctgaaactttcaaacgaaaattattttttgtgtttttggaaactccgtctcattttcgagatgacatgatgcccactagtaggcgatgtgtcacctggagcagtcaggagcaacttattttggtacatgacccttcaagatatttattaaagacaacaaatttgagaatattatggtatacataataatataaatgtattatattttcttatgaatgatgtggaataaaactttaaaaatcaatttatatatgcaatgaaaaggatcaaaacacctttaattattgattctttgaacttcaatagatctgacacaaattttgatgtgcagaagaaaacaaaacttgtggtgtgtaaggcttccaagctctctctaactctcttagatagatttattatgtttcacaaaaagagtagtgaacttggagaccggtatcttatatttataagtgacatactcaatcaatatatccgtgtcacattaattgttagaatgttttgacaataaattcaaaaaattaaatcgaaaaattaaatatttattgaatcaaaatctgaccatatttaaaaaatctatatttattttattcttaatttgtgattaaacatagtgaatggaaaaagtaattttatcttcacacatgtaaaatcaatttgattatatagaaattttcaaaatatcatttttcatttataatttaattcgtgaagtttttatttataaaaatataattgtaaatctaaaattacaaaaataaattttgtttaacaaaaagtaagaaaacaactaaaaaaataacaagaaatcaaccacacaataactataaatcaactatataaataaactataaaacaataaaaaaaaaaaccaaaaaaacaacttaatgataattcactacgaaaaatcttacttttagtcacaacaaaatttataactaaaagtaaaaagttgtgactaattataaatcatcattcctatgtt

SEQ ID NO: 162241 - DNA, 1983 bp, Cannabis sativa
  modified_base (1385)..(1390): a, c, t, g, unknown or other
  modified_base (1854)..(1886): a, c, t, g, unknown or other
aacattatttgttaacattatttaacaattgtttaacatgtaattaaattgattattttgacagattaaaacacatttcggacgacctaattggaaaaaagtattttcggatttagcaagtaggcatcaatcttctcgaataggtacgtaattaaacttgacctacattacactgagtaatttgcagtaaaagtactcaacatttttttctccatagtgaaaatatccaatatttaattttggcaaattatgatttttgtctcatgaactttgacacatatcaaattatatccctaaacattttaatctgttaaaaattcttcctgaacaactgagattgttagattcaataactattttccaattccgttcaattttactaacgtggttattgtctatatattaaatcttgctcttcgaactttcattcacgccaaagttcttgaatcaacaatctcaatagttcggaagaaatttctaacatcttgaaaaattcaggaaatataatttaatacatattaaagttcgggagttaaaattcttaattagcatttctaattagtgataataataaattattaaaaagtttagatatgaagatttatattttggtttattgatttggttaaaggtgtgttctactgtgggactgctgcactcaccaaaaagttgaaggagctttgccaagaatatactttgaatacatcaactcgattcgattttcacaaagagaacttttagacaacagttgagttgtcccattagtattactaccaaatttgtgtacagaaaaaatcaactactttcttcttattatctttatctctatcttatttggtatttttttgtgttttgaaattaaagtagaaaagttgagcaaaaagtagtgtgatataatcctacttgtggagcaatgcttgtctatttttaatattgagtggaataaaaatttaaaataaataaataacagttgggatttattcaattgtcttagtcatctccaactatagcactatatttagtattgcaccaacattaaaactagcactatatattttttcctattccaacggctaaaaactactccaaatattacttttcatattattatattaatttcattattaatacatacataaagttatataatattaatataattaaaaaaaataaaaatatcgtaatctacaatgcactgctatatataatgggatactataacaaaacggtaaagtggtggacattatgtcgttcagttggagaaaaattacacactataaatacatagattatttcaaaaatacataaaaacaataaaaaaatttataaaaatacggttttatagaattttaacatatttatgaatttttttattttatttacannnnnnacggtctttttatgttgtattcatgttaatttgttgttgattttttttattatctgtatgttatcttttgttaatattttgatattatttagatattatttttatgtagtttttttgttattttcgtattaattctacagaaaccgtaaaaataataaaaaaaaaattaatataaaaaatataatttttttacaaaaaaatagtgttttatgttataatcccataaatatattatacaatccggttggagcaacccttagctcagtatatatgaaagaaccctaagaaaatggtgtatctcaagctttttttattttcaaaaaaaaatacaataaaataaaattagaagatattgatattttactataattagtaatactagaggacttccaacaacttctcacctctactattcaataaatattattcaataaatattattaaggagaattatctcatatacnnnnnnnnnnnnnnnnnnnnnnnnnnnnnnnnntacggtttgggtttctaaagtagttgcagcgctagttataatagagatttctatacaattttttattacaatttagtttgcagcgctagttgcaata

SEQ ID NO: 162242 - DNA, 4619 bp, Cannabis sativa
  modified_base (1471)..(1471): a, c, t, g, unknown or other
tcttaatcttttaatcaagaaaaaaattaaatatttaaattacattagtttttcttgattttttatatttgaaactatatttttttttataaaaaaactttaataattgttaaattatttaatattttaaatatattttaattaagtttcataataattgttgaatcaaaattattttgagaatgtgatgttgacttgtactatcctagtcaaactttttttttttctgttatcaaatttaatacttggatttccttacagaaaaaaaaaatacttgagttaataatgagtaaaattacaataaattcttaactgtagtaagtcttatcacaaaatattttacataagaaattgtatgttacaaaatagattacttaaatttatttgttcctattatatccctattaattataaacatagttatcataatatatatgtttattaggggtggtaatttgtattgttgtgtgatatttatatttatattcatgtttaattggtcaattctaacatgacttatatttatttcgtaccaaaaaatctcaataccctaacacgaccacatatgtgactatagttatcttacattacatcaatatagttagaattgcacatttgatttttatatatatatttttaggctctacctaacatgtgaaatggtgaataaggatgttgtaatcagcttaaaacataatcatgaaattaaaagtaccataagttcttaaggcataccatcagaaaaacttctttaaccaattgggtaataaaacagcagtagcaacgacaatatagaagttaaaatacaatagcaagcctaggataggactgacaaaacggattagatacgataacacgacttgaaactcgcacgagagttagcgggtttggatttaccttaaatgggttcaggttgactcgtctaaccagtttaataaatgggtcatgttcgggttgacacagctaacacgaaattgacctgttaatgacctatttaaagttattttagtactttaatatgtcataaatggattataaacgtgttgaatacttcataaacatgttattggttgacatgtttaaataagatatgcttataaacgagttacacgggtcgtgtcgtgtcattccgtttataaacgggtcgtgttcgggtttcattttttgacacgattattaaacgggtcgtgttcgaatcaagcatgtacatgttatacatgagtctcgacacgacacaacacgacccgcaaacacaaattgccacccctataattatattaattaattaaataatttattacaattaacataattcgtaatatcaaatataaattaggtattttatatgtaatttttttctaattaagatttttttatgagaataaataataatatattaagtataaattaataataatatattaaatataaataggtcaattcatgtcaattttatatatatatatatatntatatatatatatatatatcacacggattataaccttaacccaatctaaataattatcttgtcattcgggttcaactcaatttcaattttttttatgagcttaacttacaataatttggtatcatgttgttgtgtggtgaccttaattacacctctaaattctaaattgttcgttataacactaataacattcatatttccatgtaattaattcaaacatattaattaagaacaaaaaccgaaattgtagaaataccgaccgacgaaaggttgagtttctgaaaagatataggtgttaatttgttaaggaccacctgcatttcttttttcattttcattttttttttaatattgtacctatatttttgttggtgtttttatgtccatataataaatttaacactataaaataataataataataagtacatatatgatatatggagattgaagtgagagatgtatataaaaagagatgaagtaggtttgctcatattaaagatgattcaatttaaggtatctcaatctcactctcctacacttctctaacttctcttaatgctttgtcgccttgtatgttgccaacgacaaagactctatctgtgttttgtatagtataacacacaaaaaaagcacatattagacactattccctctctcttctccttgtgtcgttttttattttcatttatgggtccctaccattttctaatatgtaatattaaattctttaattagagagtttaggaaattttagttaaatttatcgtttcaactttcaaaacccaaatgatgaacatcattaagaaacagcatgcttacgaagttattgcaaatgaatatacacactaataaaaactcaaatacaacttgtaatatttcaaaacgggtatgattcctaacactatacagataaggttcataaaaattatttcaattattaaatcatatatggttatatatcgatgagctctactagggtcaagaaattgtagcttagaaccacaaattatattatatagtgttaaaatttattgaaacatttaaattggacccaatattgtttgtgacagaatcacatgcatttgccccaaaaatcaaacctctactagagaacgtaggtccaacattttgcttcattttttattattattattataattatttcctctacgaatttaacttaatattattaaatttttcttgaccgcaaacttcgccgaaatttcacagcagaattaaaaaagaaaaaataaaaaagaactcaacaataataataaataaataattctgagaataatgctgacatggcacaatcacaatctttgaaggtgccacttgtcaacgacaggttagtgacatatgggcctttaatgggccgtggtatccgtcaatcagctgacccaatgaaaagtacgtctcctgcgattttattcttttccctcacgatatgcctttctttacatatcaaatctagaccgttaaatatggatttatcgataaatctgtaccgttggatcagtagctagtgtatacagtttacttattttttatggagaaaaaaaaaaattaagtttgtgagaagacaaaagataaccaacgtgaaggtctttgttaatcggttagggtagggctccaataaaaaggcacagccatgttagctggttttttatttgtttattattattatttatattaatttttttttttttggattaaagggtttatggaaattagctggcaaatgaaaacaactggacaacctctttcatctacttacacgtggcattcacgtgaattgacacgtggatagtaactagtggtttttctatagctgcacatgcaagatgttcgagcaaagaaatttcacatcaaatcatagattttgttaattttcttgtctagtatatttatgcagtttaattttctcaattagttgcttatttggagggttatttataatttattgaaataatggaaactatttatggactctagtatggtaatgtaggatctaatctaactagctagctaattaattaatagcaaaaacggtatttgctctttttactttttagagattattttttagaggaatatatatgcatgctaccgacaattttatttttgcatgaataatattgtaacacattatttttaatacataaaaagggtcatgatcaatcatcaatgtgcatttagatttagagaaaatttcatttattagctacagatccgattgtgggactttttttcaacacacacacttacatatatctcacacacacatatatattatatatgatccacacccactaattacaaccacatgattaaaagtgggggcaatgcatatatatatataaatagtcatatattaatttccttttattgtaccctcaatgtacttatttttacagaagcttcataggccacaccatttaaaataatggtacttaatcatcaagtaaatatattacaaatttgaaccctacatttttgggattttttttcaataattagaataggggttttctgcaacacattcatgaaccctagccaaacaaaaataatgcataaaaaagtacttttattaaattattataatgtttttagttgatgctgagctatatatattttcttttattttttttaataaaaaaaattcttttttgaagtgatttgcctgaattaataagataagttatagctagggtatggtttttttggtggtagggctgaacctgttttgattaagctaagaagatgtgtcatttcaggaaaaagtagagtttaaaagcaatatcattaataataataaacatacctataagacaaagttaggtttatgttattagaaattaattcaaattaatgatatcagttaatcaaaataattatattttcaactaattctggttatgtgaattgaaaatttgtaccacactatactcatcaggagacatattttcatttttctcttcctattttttattttttatttttacttttacgtttttttttcttaaataatatggaatttttttttatggtttttaaagtataaatttataaaaatatgatttttttttcaaaaaaaggttattttatgtgaaaattttagaaaaaatattaaaaaaacagcata

SEQ ID NO: 162243 - DNA, 1004 bp, Cannabis sativa
  modified_base (896)..(921): a, c, t, g, unknown or other
  modified_base (967)..(973): a, c, t, g, unknown or other
aaaaactgttttgaaatgtaaaatgaaaaaccccttttattttatgtcaattgtacctatttattttcgacccacctcttattttgttgattttagctcataaaattagtgttatgtttgtgtttatttggccataacgaaaccattttgatactctcacttataggtttttttgaaagagacccctacttataggttatcgcatccacgatattggtagcgtaccctttgtttgctattcaaattattttgattttgattatgattttgtatttttgtggtatgagagaacaagtgattgtaccaatccacgtgcgtagacccatatgtgctgttccacatatacagagcagttccaacggttcatggtccttttaaacaccgtctactataaaagcctgtctgtcatcattattttttatatatttatatattatatttatgaatcattattgtatgtattgacaacaatacaaattattttttttaagggaacaacgatatagaaatcaattttccattccacacgcacacaaattcataaattaacttatttgtcgtatctcttaaacaaatctcaaatcattgttttatcttaataacaattcatcttcttttcaaatattctctatcactaaattgaataactatcatcatacttaataattaatttataaaatggaaagaaaaaaatgtaaatttctagagtaatcctatgtttagtggagaaaaaaatggaaagaaagaaaggaaacgaaaaaaaaattgtttgttagaaaaaaaacagagaaaagataatggaaaatggaaaattttcaaaaatattttatttaacggtctaaaatttttatttacataaatactcttgtaaagtttttgttgaccgagattttcgnnnnnnnnnnnnnnnnnnnnnnnnnnaagagctgtaagaaagtgagatgaagattttttacgtggttggggnnnnnnngagccttagtccacgagtctctgttattaat

SEQ ID NO: 162244 - DNA, 1380 bp, Cannabis sativa
aagaacatcgacaccctaacaaaggtcaaccgagccctttggtgtaccaccaaactccccattttcccattagaaactccatctccattagaaaaatggagagtttatcccattccattagttttgttatattaacctttatcggttatctcaaaacattttaacatttttaagaagttataagtggaaataaaaatatctttattggagatataaaactaaaataaattagtaactcaattatcatattgaaacctttaaaataataaaattagaattataattttgttaagagggaagtatgtaaggttatttactaatatatttaaaatgttttattggtggtcatattttcaaaatttcatcataatttttaaatattaatttaatgaagcttaaaatgtgtgaattataaaggtttgcatgtttattcccattttgcaggacaatacaacaaaattaaaatcttttatgtatacattccaggtaaataataaattcctaaaaattgaatattaaaattttaaaaaaatgttacttttatttattaaattaataatatttttgattgtacgtatagtatgtataccattggaagcaaggcatgaaataggtgtgtttttaaagaagattggaagagaagtgagaggtgaattttacatggttaataacaatggtatgtttgatcatgttaataacaatattaatcaacaattagaagtaatggaattgggattaggaagagaattccacataagcttgggaagaactgtgttctttaatcataatgacagtaaccactttcattcacttcttcctatgctgcaacacaagcttaatcatcaaacgaggtacctcactctttatttttttcattaatttgcatacataataatgttttataaaaaattctattgacacactacttttgcacctacagtaggaaaatctctatttttagcacttaagtttttttataatactactcattttagttataacattattttttttttaaaaaaatttagaaaaatttattatgttaaaaataaggtttaaacatgttgcatgatatttattattattttttttctatacacatgtatattaaattctgtttttagcaaaataaattttataatatttaaaaaaaataggaaaatgttgtcaactataattatagtgtaaaactttattaagaaaatttataatttctctaaatatagttaaaataattactcttcttatctgacaagtaacgataaaagtgatattactactataatttggtacgttgtattagatcgtattttattgtattatactgaattagattatatatcatatttttatataatactatgttaaattttaatttat

SEQ ID NO: 162245 - DNA, 1441 bp, Cannabis sativa
tgcaagtctttcactatgagacatactgtgagtttgatcaaaagagctattaaagctatagtccttaacatagccaataggaaattgaacatgagatatttgactattttagattttattaacaagttgtaattgggagttttgtttctatgcttgtgtgaaaattgttggtgattaataagatattttttttcttcttaattatttaaatatatataaatctatctatatatatttctttaaaatttattaataaaagcacatatattaatgcaattatatacgtgctagcactagtttatataaatgcaatttaaccttttcctaaagaaactagtgtgcaatcacacgcaataagaacaaatatgtaaaacccagtcagttcacactcagcatgcattataaatttatgatacaaagaaaaagaaaagtagagtatgctaaagcaattttttttttccttgttctcgtactagaattatttttgtcctctataagtatactttatgtaatatatgtatatacatatgcttttgatttgtcaaacacaaaaggtttatgatggtcattcattctcaactctcaaggtatggtaaagataaattttggaaccaagtacaaatagtttaattgttcttgaaattgtaattataatatttttgatctattggtaacacttttattttttaaatttttaatcaaaaaattaaaattaaaatttatgttttataattacttttgttttttaattttattttcattcttattttttgattttatttatgttgggttcgagtatgggggccgggaccgtggtccgagtctaagagtggggccggggtcagaatccgagtcctaaagtccaggttggggtcgaagtctaaaatattgattaagaaaaaaaaaattgtgaaagtaattttttttttttattttcaaaatttttaaaattttgattctaaattaaaaaattaaaaagtaaaaacagtattataaaacatgtttttagaaaatattttcacttttttaattaaaaaatatgaaaatgattaaaaaagtgttaccaacgtacccttaaaaattggagcctaaaaattgattccttgaacttgttattttttttttgcctgaaccaaagttcattaaaacaagaaagaattgggatccacaggagtaggagtggcaattagttttcgtgggtcgtattcgtttcgtgtcgagaattaataggtatatgcttgatcgaaacacgactcgtttaataatcgtgtcataaaatgaaactagaacatgacccgtttataaacaggttgacacgaaacgactcgtttaactcgtttataagcatatattttgtttaaacatgtcaaccaataacacgtttatgatccatttatgacatgttaaagtactaaactaactttaaataggtcattaacgg

SEQ ID NO: 162246 - DNA, 2624 bp, Cannabis sativa
tggcatacctttgcataatttccatctagtgctatggccaaactacagtcagcaatggcatcagcaatctgacccagagcttggtgtgctgcagcacgattgcaaaaacagatagctgcaaatcgccgtgattcaacattgctagaaagggcgatagtgtaatgctccactgcttctgaatattttcctgatttaaacgcttcattacctgcattctataatatacaaagaacacatgattaattttctattatctcctaggactacaatgcagtttaattggcgttatcaatcccgtccctatccattcccttacataacccctccaactaaacatccatacataacaaaatcctccggcttttccctctctcaaacatactgacatatcatacttcctagaataaagagaaggcaactttgacctagctgagtaaactcgaccccaaaaattctaaccatcatcgaactcagatcatcttaaaaataaattacttgagaggtgagcagcactagactaaattctccgctacgacttgtaaactcaatgaatattagatctcaaatccgatagaaaaaatattttttcaaaacaaaaaggttaccttctggtgtaaaaggtcacgtatagtagctgccagcagggttgatgactccagctccttttttgcagacctaaaaatttgaaattattaatcaacatcgacattttcaataaaaaagataaacttttttattattctaattgttaggaaaaatgataaattgatggcttatataaacttaaaatacttactcgtcctctacagatccgatttgcttcagtttatcaagtataggaagagcagcctcgagccttcccaaataaaagtaagacttagatatcaagcaccaccgccatattctctcaaatgaatgatgttcaccaacagaaccatatagatttgctaccaatgacactcctgaagaaaaattcttttcggcaaaagataaactcttttcacacagttgaattgcttcctcatgcctcttcaactacaagatgccaacagtaaataagccaacagatagacaaaactaaaaagaaaaaaaaatgccgataggaaggcatccaccatagacatatttcacgatacaaaactctaaaaagttcgaagggaaaataatgaagtacacaccactatcagagcctcggctttcattttgagtaacttttctgagtacaaactaattgatagggcttgagaaattatttccaaagcactgagagctgcatcgggatttttctgttccaaaagtttagtggattgaccaatactaattgccaatttctgcaaaaaaataaataaataaacatatagataaataagagccgtgatatctgaactaacaaggatttaatctgcttcacgcccaaataaactgcacaaatttaatatacaaaacttaaagccacatagcactagctgaaagcaaattattgatcagattagtactttagaataggaatatgatttctatgtactttagatttgttcaccagataagttgatagtatccattatctatgtagttgttcttcatttaatatattattcagattcagatctctgttgtaaaacagaagtaataaattatctattctggttatgtaaagctcatttgtaaatcaaacactgtaattaactgtttaaacttctaaattgtgttaatcccacagtcccacccaagtttgaatccccccctcccccaaccacaatgtcaaaaaattatagatacattaaggcaaagagatgcagaatagattcaataccatcctgaaactgcaattatataaataaagaatttatatgacagaatgtaacaagcatgtaattggtttgaattctaagtataataagatcaacattttaacaagataataatagtgtaaagacagacctgagccttctgctgaccatcagctgcatctaatatgattctccggtccaaacacacacctgcccctacatccaagcaccgattgaagaattgtaacgcattttcaatctccccaagcacaagatgacagctgtaactcaaaaaaaaaaaacaatattaaaagacatgtaatgacttatgatggaaatggaaacaacacttgcaaaaatatatacaaaatttaacaagttcaaaatcattctagcatgttagatgaagaatatgactattaatttgatgtttaaaatcacccgaatttgatttatgtgatgtttattcatttatctttttaacccctgtacaaaagtaataaaaattagataacatactttgcagctcttaattgcgctttgagaaagttgggatctaatgcaagagccatcatgcagtcgcctattgcttcccttattcttagaagacacatgcgagctgccgcgcgattgctgtagcagagcaaaagtggcttaggacaggaacctgatctttcacttgaaggtacagaaataatcccctgtgtgtaaaactcctcggcctttgcaagatccccatctttgtaagattgatttcccctgataaaaaccaaatattcaaaatgcaaatagcttaataatggtcactaaagagagacaataatcaagaaaaca

SEQ ID NO: 162247 - DNA, 4510 bp, Cannabis sativa
  modified_base (286)..(308): a, c, t, g, unknown or other
atagctagctattgccttttttaaaaaaggaatcgatggacttttttttaatatatacatatggccatgtaaagaaaggcatgctcatttgcctagcatagcctttttcttctttaattttgttttttaatctaatgaaatgttggtgcgaatatatacataagaaaaatatttttttgttgttgcattttccaaatgtaagaatttgcattaaaattgttgttgtgatgatgaataagatttttcaaagcttattcaagagctgttattattattattattattnnnnnnnnnnnnnnnnnnnnnnntattattattattattatacgatgctgctcgagaaacccttttgctaccagttgagctttatgatttttgacaatgttattagggttctctttcagcttaaaattccacttacactttaatatcctataaaaattattatgataattaaattggcatattttattaaatatgtgattgtattatatatgatcttacttaagctaattgtatgataattagtaaaaatttaataagtggttaataaagcgtaatttattaattacgaagattttatcagatattgtgggaataataaacattatttatgtgataaaatgtttttgggcgcacgaccttcgtgggagtttggcggagtggtcagaaatgtcacggcaataaagtatggattaaataggaattatattgtactagtttagaacattaagttgttagtttagcagattagttaggaattacctaagttacccctaggggtatgtttgggtttaagtgtagtattaagggcaaaatggtaaatgtgctaagttgattttaggattttgattaatagtttggtattatcttgttagattagataagattttatattattaatattattaagtgtatatgcatgagataaaataaaagtttagaaaaagaaagaaaaattagaaacccatcacctttctctctcctctctttcaactcaagggaaccagctgaagcttagggagaattcagcccacttcaagcaatttcttggcaaaattcatagtactaggtgttacccaagttgaggtaagttcttggtatcattttctttgattttccataagttttgaaatgatttttggttagggttttagggttttagaattgtggtgttgagctgtgataagagggtgtttttagggtttgtttagattctaattagaggtattgtatggctgttaggattggagttgtaattatggtttaaaagcttaaccttggcttttctatggtgatttgaataatttgatgagttgtggtgaattgatgatttggatatgttatttatgtgatattgaattgttctagagattttggttaggtttggtggtgatttgatcattttgagggaagaaaacccaaaaatttcttccctgtcaaaactggtcgaccagttggttctggtatggcaaaactggtcgaccgattgccctgcaggaaaaaaatttctaggttttcttcgagttcaattttggctctgggtggtacctagtatctaatttaggttatttagatgttgtatggcctattttgaggttgttggagattacgttttgtccggttacgggaattagggtttgtccccgaaattttggtttaaggcatttattgaatttttttgttgtagtgacataggattgggatcgtcaaactttgttttcacccaggtcggcccgcacgcctgacattgaattgaggtaagaaaagttttatgcactgctaagcgtgttggtaagaaacgattattatcgtttgtgactcgattacgatcaaggtaataataagaaacgattattatcatttgtgactcaattatgatcgaggtaatagtaagaaatgattattatcatttgtgactcgattatgatcgagataatgatgtggaacgattattatcgtttgtgactcgattatgatcgagggaaggacacggtcattaccgttattgagattaaataaagatacagtcattaccgttatgagtaattacttgttgaaactgcagataggtttcttacttatcgtttgctttatcggacaacgatagtgacatagatagctcgtggatgacgagtggtaagggtgctttatgaagcattgagattatgtgattgtggtgatgtgtgattagagtgctttatgaagcactgagattatgtgattaggtattgagtgaataatcgtaatttgtaatgatgggttgccatgattatcttttaatgcgtaatatacgtgtttgtatagacttagattatatttacatgctgaatatgtaatgaatcacgaatatatatattatgtatgacacatatttcctcatcattgaaatatgaaatacattatgtatactaacactggtggtaaggctagccgatacgctacctacccgaccttctcgagcatctcgaatggccctaagaacttagggctcaaatgttttgagtttgctggagtctaacacatctgctaacaatcctatacatctactatgtcgtaaatccttttcctttaaagctgaaatgattagaatctgagaaccatgaatggatcctacaaaacaaaaggctcctcatccctaaactgaaagatttccattcccagattgacgtcccattcgccaattctaactttatgagatcaacacttaactttctgtcaaatgtcttaatccataaaaattaatctaccttttagaaataaccaacttcctattaaacttactaatcattttaactgccacctataaatatatttaagagtcaaataatattgagtagaaggaattattgatgagaagctgacctgttgttattgacgaattagttgcagtgtcagcctatgtaatagcgaacactcgagctaggatagtaatttctcctcttcttgactctgctttcttcaattgagggaagtccttttttaaattccccacaagaccacactgaaaacatgttcttctgttgcattcacctagatgatgctttttacaacgaggacactcaggataagtataagtttgacaaccacctctgttttgttttcacgaaatctcttactcagactcgagtcacttggtgctggatgagtttttcttttctaatctttgttggaatcaccactatccctaacataaccagaagtaggaagagtgttggtcccacaagcactagaagtccccaggggcttttgtaaaaactcaaatgcaccttcggctcaaagagccttatccaccatctcagcatacgtgatggtatcattagtagtaatgaccaaatcatgctcaatcttggcattcaatccagacaagtacttctttttttttttttttgctaaaatctatgggtactatacttgaagctaacttagcaagtcgatcaaattttgttgtatattctatcactgacatatcctctccttgaatcaactcagtaaattctttcctcttgctactacgaactcctttattgtagtacttagcattaaacatatcttcgaattcctcccaagtcaatgtagtgacgtcgcgagtgagagataccattttccatcacacgagaacgtcttcctggactgaaacgtagcacaggtcaccctatcatttacttatttaatttattaagatcttatttgaattggtttctgaaaatttcgataaacacatctgtttcaccatcacgtggtcagaaaaagctcggccggagttgggtgaagagctcgtgagagagagaaataaaaaatgggagagagagagtgtgtgagatagattgaaacaatgggagagagataaagtgtgagagggttagagaagggggtctagggcctgtcgacggtggtgtgttgcccatttggtacgacagttttaagctgtagagaaaaaagatagagggaggtgaaagagaggatggtggagatggatttttaggcttaggttagagatttttattttgttttgttttatgtcttttgttagtttcaattttaatttttaatatgctttagaaagaaaaaaatattatgattaattttttattttaaatttaaatatttattcatctgagccaattaaattgcatcttgtgtatattgtgtttatgtgagcaatttattgtgtacatatagacaatacaatatgataattaataaccaaaatagatgaaaatggtaaatcactaacagatcatgagattggggtttctacgttcaaaaagtaaatttgaaagttaattgctagatgaaatttttgaaagttttgtagcaatttaatcttacttataataatggaaaatacttttcaaaattataaagttccaatccattattaacaggaaaatttgaatttatatgcatacatgtggtgtatattaaatttttgaacacaagcttactaaaattaaaaaaaataggcacactttatattcatacacattatacccttctctcttctctt

SEQ ID NO: 162248 - DNA, 6309 bp, Cannabis sativa
  modified_base (6229)..(6235): a, c, t, g, unknown or other
tttgattaaaaacaaagctggttaaacaacacgtccaaagaaaaagaatcagagaacaagaagaccatgataaaggcttacagtgtggagtcattatgttctgatcaactacatcgtcacctctaatttccttgactatatcttcatgcttattattggaactggcccgagcaaaaatccacgtggcgttcatctgtttgttaatcatacatgctgcgtagtaggggatcctgccacgtttgctggacttctcagacttgattctcattctctctttgacaaacgtcaaacaatccatcaaactctctctcgctaaccctttcatgtcataagcctgggatcttctccacagactcttaccatgaggactcaccgcactagataaacacaaagctctggttgtgtcactaatggccaaatcaggttttctcagtagtaaataacactgagctctattgctatgaatcacaattctatcttttctcctctttaatggacacaagtacaaagctttcgaatatttcttcacagcgttttcaatatcccctgaccaaaaacataaatttccttcctttttgaattgtcccaccaaagtttttctctcactgatttcttcttcactcattatcttctctctctttcttctatcaaccttcatatcccatatctcctctaaagctttctccgccttcttactcttcaatctcaaatcaccatacttgattttatggtaatcctgcaaaagggtctgagtgattctctgtccaactttttgtcttccaccacagcttcgaagctcgaccaaatcaccaagacaaagaactgagctttcaaaaactttgtacctagtttctgggtctttaagaagaagcagaagagaatcaatggccatgatttgccaatcatccgaagacctcgatatattacatatggtctctataacatggtccaactctgctatactctgtctacccaatttggtttcacaaagagttttgatcaatccaatgccagatggcgagctcggattggctaaaccaccccacattccacaaagctccatcaagaatttcttgttacaaattatttccaaacacctttctctacaagcaatacaattaagaagataaagagaccaacactgaagttggctagcccatttctcagctttcttattctcaatctcataaccaccaatccccttggtaagaagattagaatgataattcaatcttttcttgtaacttataccaacaaacttgtcgtatacctcatcaatacaagtcaaagctatctccattgataattccacgacctctgtttcataccttgttgcaaaaatggcttcgaaggttctgtcatggctagcaatatgacccaaagcacgaaccgcaactcttttctcgacccaagtagtagtagtactagtagactttaaaatctcgattaagggcaaaacgacgccggatttgacagctttgtgggcaaagtgagccttgttgatggtgtaggaaccgataacgtgggctgcgtagtagggaatatagatgttctgaccggtgagtaaccatttgttgtcgttgagagctctttggatgagttttgccatgcattcgaaaattccgagggaaggaaattcagggtcgtttggttggttcatggctatgttccatagagtggtcaaagcgaggacgtgttgttgttgttgttgttgttggtcgtttcttagaggcatttgtttgaagcactggacgagtttaactcggcggagggaccgatttgactcgttcatggcgcagaagaaacatgaagagtcgctgcagccttggcccttggccttgccctcctgcctttggtagtcggccataatcaataatgctttgcctctgttttgtcgttttgtggtcttgagaaattaacaagagaaggtgctttcttatttcttttggtttgaaagggttcaactggttatcctatatattagctacaaatagatactggacaaaagtcaataattatagtggagagactcgagggacagagaaatatatagaatgaaaaatttagataccatgtttaccatattgggtaaatcaacattacacacccaaaattcatttaatttaaagatcattctaatagtttatactaccaaaaataagagtattgttattaggtaatccgtacctttaaacatttctctacaaataattacttattgcttactaggtgtgtataaaaaatatttaaattatatttttaatattataactataaaaatacttctaatgaaaatacaaataagtaattaaaagttaagctataaatttttagatttttgacacatggattgatttcaagatcagcaataatgtaattatttagaaccttttgtttagaaaaaaataattatttagaacctctcagacaaaagtttgaaaaattatgaataatttatagtattaaaaatacaaaatatatttttttaatagaaaataaacatattgttcttaagctgttttataaagggtgtgtgtcttggaggtcttgggttcgagtcccatataaaacatgactgtaatatataaacgcttaaataaaaaaaaaaaataagttgttttataaataattttttttgacacttttcagtacagaaattcgtcaaaaaataataagtttttttaaatgactacaagttaaattataattttttcatgtacctaaacagaaagactcttactagtggggcaatggcacgtccctaccaacgtcctatatatatatatatatttattaagtatatggaggcaatggacaatgttaggatgctacaccactatattcctttttcatatattatatatagtaccaacaccaacttgtttaagcccgtactgaccaataactgggccacattattgcttctctaacatcagatccaggatccacacataaacaagtagataaatatattattttttatgttcaataagtttccaatgcagaagtagagatcatgatgaccgtggtccatgaggagtaaagtattatatacacacagaatatatgcactatatatggctttagtatgatgagcaactcttatatattattagctgaacacacgagggactgaaaactgagaaattgaaaacgattctagttctagactcccaaaataatttgaaaaaataagttgtaaaaaagaaaaatgtgtaaatatgcttgatttataagaagaaaacctgcgcaggggattggtacttactagctagttcctgccatttgtaaaaagccaaaatgtaataaagtaaaataaagtactgatttaaataatttttaagtgagttaaactcaaataaagaaaaaagttcaatcaaataccataattacatgaatcttgcaagtacaactgggttggtctcaagaaaatgcggctaaatttttattaccatactccacatgaaaagcatatatacctagctagctatttagtcacttgtaacttggttggtttaataatattgctacgtactttacctaaaacaaagtgccatttttggaagataactaaaccttttaaggattttgattatagttaaatatcttttgagggttttacgcctgtaatttatattgacaatgtatcatttcatgaatcgaaaatcaagatgtatatatgtatctcattttgttcggcgtgcactgtagagaaagagtttgaaggcacatgatctcgtgagttggcaactcagcaccacactttcatctctttatgttataaatctttttattttatttttcaaaaatgaaaaagaaaaaaaaaaaaaaaacattgtgtgaaggcttgtaacttgaggcataataattaatattttctatctatatctattcaaaggcgtgtttgtttaagctttgactattcataaataagcatgctgcaaataatatagtcatagagatgtgaaggctgtaacttgaggcattagctacagtagctttaaagaaactttattcctttattgtactaaacttattgttacaatattgatactaattaattgttttgttttgtttttttgatccaaaacattgctactaattgttaccataacgtgtacaacacccactattaggccaaccgtgcatcatatttatgatgtccattttttctctccaaggcactattcttgaaccaaatatatagtaagtttatttacacaatgattaagaattatgtgattgattagtaattaaatttacttttaattggattaatgaattagaattagtttaaatatgttgtttacttcaattgcaggaatcataatgaaaataagcactattcttattgatgtatttactttactttagtaacgccactactacaatttatacatttagtgacacaatttagtgacacgcacaaaaattatgggtcactaaatatcttaaccgatatttagtgacgcgcattgcgtgtcagtaaaaaatttacattgtgtttcataatgtgggtcactaaaactttggaatgtcacaaaaagcttatttatttatctaacaaaacatgttttaacccacaaatccattttcaagtgcttaaaagtctggatcctcctcatcaacattttctggatgcttatccatgatctgcatatgaaatgaaaaaggcattgttcaatatcataatgagaattttctaagactaatcatcaatattaagggatgaaaatgatgtacctacctctgttcgaaaatacttttgactgtttgttgggagcttggctttctagcaacctcagtcgattcaacttctacattctttcgatctgagttcaagtgtctagttgcaccctaaaaatttgaggaccaaatcaaacgaagataaaaagaaacaaaataaaattgaagaaaatgttattgtttttaacatgaaatagttactacttacagctacagagcatcgcaactcaactaagctatttgcataccaggggtttgttgattagccataaaatggctagtaaaagggtgtttgatgcctgagataacttgccaacataaagaggactttcacagactttgcctttttagtttaaaaccccgttgaaggcacaattgataagttatgtatatatggatagaaaacaagggatgtttatttttactgaatagatcagattaagtttcttatgaatgacaatgggatattctgctctgaattcagcctagtatcgtataaatgtaagaaccatattgtttagtatggcaatttatgtgtttgtaccttctgatcacctagtagttccatctaagtatgtattttttgggtttacattttaagctttgacaggtcagctattaagtgataaatatcttggctagctgtcacgagctgacatgtgagctgtcaaagttggtttggtgagagttgaggttatagatacttgattcttaaagtgcctaaccaactctcactcatttgattcttttataaagatttttctcactagggcaaaaatatttttattcttcttctttgtttcttgcaggttcatctattgttgaagagcttaagcttttgtgatgaagtgataatggaggtatttcatctgaagagagttcagattcataactgaagggatttcaactcaatcaaagtaaggggagcttgtctttgaatctaaggagacttagatttgaatctcggttggttaatcaagatcttagggtaaaattttgtgagaatttttactgtattgttttacatacatttgatttactaactggagtttgtatcttgacattgattcttattagagttatttaccctagtttagggatcctaagcactacctggtcgaaatgtgtgttcgatgcaagggaagcttgtaaatcttaaccttctctgatttacaatcaactttatattgtgtgattgaatgctattatttcaattagtagcatccaattagatcaacttttcatttggtatcagagctaacttttttgattaatgaaatcgagatcctgtggctattggattgattttaggtcgtgtgtgttgattcttgtttggagtttttaatcttgttgtcctccatctgtttgtttattattttcagaaaactgatccactctaagattcatctcgtagtgcaacaaagttgttgtgtgttgtctatgtgtgtgtagatcaacaagtgttaattccatttttggcatnnnnnnntgacaaaaatattttattatttaatgtatatttcggctggcatataatgatatggtttccatatttgtgtaaat

SEQ ID NO: 162249 - DNA, 2020 bp, Cannabis sativa
  modified_base (1855)..(1857): a, c, t, g, unknown or other
tttttttttttttttttgtactcttttattttcacatgtttttttagaaagaggcaacttgaaagataagaaaattaattacaaaattacataaactgactcttttctaacaatactacccctctagtaatgttatattcttaatttcaaaatattttgattttaccaactcaaaatatcaatatatgttcaaaatatcgttttctcaattttcacctcttacggaaaaataaaaactttaaacttaagatttttctcaattaaaggtgttaaaaataatcttgtcatatatgtttggtttgtgtataaaatatctctagaattacttcttattagataaaatagtaccaactaatttctcaaaatatctcaatattataaaatttattttagcagattttgactcaaagtttcaacaacgtaattatctcactactcccaattcaaatgagatagtgtcctcaatgtctaaatatgtatgataaaaatatgagatgagaacaccaaagtagtttagaccatgaaaagtgataagttttgattacttagaaaaaaaaaggactaaaaataaaataacataagaaaaaaaaaggaaaaataagctgaaaataaataaagaaataaaagatagaactagaagttaaagaatagactaacttggataaacacaattgaagaagtatttcaattaatttagaagtttcagtcttcttacttctttggaaggtttcaatgcttgtccaatttagattacatgtgggaaaatgggctattagatatagtgttgatttcttagatttttttttcaacaactcatccacaatttttttatattattttattagcaggcagtgcctaccatatatatatgaaagctgaaattcaaaaatagaaaaataaaaaaagtgtaaaatttaggaggtaatgcctaccatattatatgagtacaaaaataaaagtagagtaataagtatttaatcgaaatatatatactatttactaatataatataaagtacaaaatttaaaggcataattattaatgaataaagtaaaattaggaggcgttgcgtgcaaaaatttaaaagtgaatatttaaatatttaatagaaatataaatatttaatattaattatagtataaactttattataaataaatattaatactattatatgataatataatacataccttacttagttattaagtttaactatatataataataatagtattgttgatccttaaaattttctaagcataaattttagagaccacgtgattaaatgaaggaaagatctcaaaatgcaactaagtaagggtgtatgggaaaaaaatgggaggccaactagcaaggtgagatgccacacaagaggaagagctagcacgaggaggggtcaaggcacgggttgagctccctgctctccctctctctccctttgctccccattcttccaagagagtgttgcattttatgccctaaataaaatcaatttcaatataatcttatttgcaatcaatagaagattagaagtcatttaagtttaaatattattttcatgattatggtttaatatacatttttgataaatccaaaacatatagttattcacagattacaatgatgccagcacagtagaaagtaattatgattatatgcttcaaagtttagtcccataatttatcagtgcagtggatttacactgacgtgataatcagcaataaagtttacttacacattgatatgtggtatgtcttttccagggtattggtaaagtatactagtatcagatgtatggagtatacatcagactggaccaatattgaacttgtataagatatcataaacttannnttatatctttctaagtcaatattacttagttgatcttaggtcaatagatcttaatcctgagatggttaggttttggcttaactgtattatttatgttctttgacttatttgttaaagctgaccagatgaattgtaacgccataatgctaaggcacgctacagt

SEQ ID NO: 162250 - DNA, 2425 bp, Cannabis sativa
aattaatttcatctttttcttaattacaatcttgcatgattcgtagtaagtattatattgtattatattacatgatattatattaaattgtattatatatattatatttttatatagtacatatacatatgcacatacaatattttatgaaataaattaaaattttatataatataataaaaaaaagtatgatacaatacaatttaattatataataatatcaataagatatgatctaataaatatttatataataaccgataagtaattcacttcatgttactaatagaatctaacagtaaaaatgttaatataattatataaactatagtagtgtacgtttttatatatcaatatcatatatatagttacagcagaagaagacatgtagatgtataggacttgtaaattataatggaaccgttcgtgtgtgttatatcgtttgtttcgttggtgccaattccataaaagttgtattattagcccaaaatctcatgcgacggctcattcactcattttatacattaaataatgtagagaggatatatgtcttgatgagatgaaaatgaaaatgatataacatctatagatatattttttataatatataactatggtagtaaacaagctaatgtcatttcacgagtgaaaatgatattaagaaccaaaattaaattttgaaaaagaaaacaaattaaagtatatatcaataatcagaggtcaatattatacatacagtgacatgtcaatcgagcgcatcggtttcaacaccatatgttatgtgtaaagtgaaatttgatgatatatgtctgttatgagttagggtaattaattaacattgtttaagagaataattatcatttattaattatatattttatgtaggtgcaatgggagatggatttatagcaagagacataacatttgtgaatagtgctggaccaggaaaacaccaggccgtggccctacgcgtgggttcagacaggtcagtggtgtttcgatgctctgttgtcggctatcaagatactctatacacccactccaaacgacaattctacagagacacagatatttatggcactgttgatttcatctttggaaattctgctgtcgttttccaaagctgcaacatttccccaagaaagccttcttctagtgggcttagaaactttatcacagcccaaggtcggtccagcccagatcagaacactggcatttccatccacaattgtaggatatcagctgcgtctgacctggctcctgtcaagtccagctaccaaacatttttgggacgtccatggaagcagtactctcgaactgttattatgcagtcgtttttggatgattcaataaacccatcgggctggtcaccttggtcagggggatttgggctcaagactctcttctatgctgagtacatgaatacaggcccaggggcctcaactggacgaagggtaagttgggcccatgcctcactcacggcccctgaagctaattcctttacggttgctggtttcatcgctggaaatgcttggttgccttctacaggagtatcttttgattctggcttggttggataaatagaagtattattatgatctacaatcgatcgatcccactggaatttcgtcacaaccactaatgtttatacatgtacgtgtttgtttttcggtttgattttcagcaaaatgccaaatgtataaattaaaagcttcgttactatttcgaaaataagtatttgcttctaagtgaagcaccaacactttgatgttttgtgtaaagaatgttgttgacggttacaatatcataaataaatgtaattacaatgtaaattactcaactgtttagtattctttttaataaatagcaaacttgtaattcaaacaatcatgaaataacaaaaatgaaatcttgataaaaacatagcatagaaataagaatctcgtgcaagagtatgagtaattttatttgtagactgtttaagaaaagacacaaccacattgtttaaaataataaaagacttataccgtcatttataattaatccatatgaaagaaaacaaggtattgcttgtcaaagccaagactaaagtaagtgaattagtatccaccaccaccactttgacccacgccttttgtttgattcaactcagagccttgctttttaatctgtagagcttcaataacctcccctgatgcatctcttgctactattgcagcaccatagaaaccttcattagagaataatatcgcatccatgttaactttgatcttagtaccacttagcttgactcaattattgctccacgccatcatcattttgtaacccaaactgaaaaggtaaaattctccatgacgaaaaatatataataataagaaaaaaaaaaaaaaaagaatcggtcaaaaaaatatatattattaattaa

SEQ ID NO: 162251 - DNA, 4226 bp, Cannabis sativa
agagagagagagagagagattgcgaggagaggaaaatgagagagagagagagagagagagagttcgatgagaacgagagataaaatgactttttgtctctgttatagaactaaaagactactattatatttttttgtaagaactactattataattttttttgttttttttgttttcttagttgttaatattatatttataagaactatttaattttattatgttattgtgctatgttaatcaagaaatttacatttgatattaattattaatttttattttatttgtgattatagttattttttataaattaaaaatcaatatatcaaataatataatttttgtttaatttaaaaacttttaggaacgacattgtcgcccctaaaagtcaaaaacaactattatgacaacaccttttagggacaactttatgagtattaatgtcgcccctaaaaataaacataaaaacttcgtgtactacatttagggacgacattgtcgcctctaatttcaggtaaccattttttcgctcctactagcatttttagttgcgaattattaaagacgactttttaggggcgaaaagtcattaaagtcgcccctaataattatatttgttgtagtgaaatgaacttgtgattatggatgatcataatcttataaatttggtctttcttaatttatccaaagctaatattaaatgtatttaccccattagtgggtctagcttcataagaaaatcctaacaatctaaactctagcctgtaaataaaaaattatatctccatacaaagggttggaaaattattattcaaacactaagagttaaattagggttctaaagcttgagcaagaacattatctttgtgtaatacgtcaaaaaatttcagctaatataatattaactcgtggactaaaagtagtatgcttactactaagagtagtatgcaaatttatgtcgtccgtagaaagacctaagtgtagattctgatatttagatccaatactaggccagttcatatttaactcttttttaagctaaactatcagctggatgtcttaataaacagtcatttaccctcccatttgcatgccatgataattttttactatgtttggcacttctaaacaaacaaatgaatcgaggaataggcggtatataccaaaaaatcttagtaggcactccttccgtaacattaataccatttttttcttttgccatcgtcactctccataagtaggacatgtatatgcatatgaaaaactattctggtataatatgcaattattaggacatgcatgtattttttgataatccatacctaatgagcacattattattttttttttggacttatagaatttttgttgtaatttcattatctatgggcaataaatctcaaaaaattcaatgaatatgtcatacttcgatcactccattcgtgtgttgcctttaaattgtataacattagaagcgctgataattttgtaagacttttacaaccacggtaaatcggtttctcaacatcactaaagagtgtctaaacttttttggttcttcttggtttccaaattttgcatcatcaatcattttatctaatggatcatagttcactttaaaagtcttagcaaaggatatgcaatggttatggcactcgcagccgggctcatgaaggagatgagtcctccatggttcgacctttgtctcaaggtggtatacaccatgagtgacttcttagatagagcagatggttttatcaaacttgaagaagttgtcacccgagcaaagggctcaaagggtggcaggaagaagtcgccaaacaccgaagcccctgctactgaggcgtagggcaatgggaagaagggaggttcgaacaaaggaacgagagccaacaacggtgtcaagcaagataactcccccagaggaaatgaagaaacctaagaccggggacaagcccttaagagattatgagcctcgcttcaccacctactccattctcttggctccaagagaggagatatatatagccacatagttaacagtgtcgtattgcaaacctcttcctttcaaggaatttgggagtaagggcatgaacaaatgttgtcactagcccaacaattacgatcatgatactgatgagtgtaatcagttgcgggatgatatagaatttctcatcagatagaaacatgctactcttcagcagtatgtatgacattaagctccaactagggcaatgcacctctccaatctgcactagttttaggtagattagagatcgtgattggaggccctcacatagctggaaactcaaggaaggccttagaaaggtatacaatatcactttgggatgaaccaagagccaaagtcatgtgaactaatcacatttggagaattagactcttattatgtcatctatcctcataatgatcctctagttgttggggttcaaatagctaatatgatggtggccatggtaatgattgacgacaaagcatcatcaaacatcctgttcaagcgagccctactcaggacgggtctgacctttgaagacctaaaaccatgcgaatagctcatgtttggtttcaacgtagtcaacactcctccatgtggcaagatcaaactgccacttactgttggcactaaccgaagcagaccaccatcatcaccacgttcatagtagtggacgtgaagtctccattcaacgtgatgctcagaaggcatgtcctttatgatctttgagccatatccactactacaaaatccttaatttgcgtcggtcatggcgtttaactaaaatggttgaccgatgcaataaataagcagtgattttaggcttcaaatgataactgaagctaaaattaatacaattagcgtcacttagctaattcgaagccaaaagaagaaccgaggaaaaaaagggaatagactagaaattatcttttccttttgcttcggtttaaaagtgatgctaatctaatttgcatcagttggaaactgagggtaaaaacttagccactcttatccactgaagcaaaatattttaattttttttaactcccaattttgactgaaatccctataatttcatcttcatcaaaatcaatttgaaccctagcacaacatagccgcctttgaacccctgccctcttcgaccctctcccccgccagcagcagcaaccctcttcaaccctttcccctgccagcaacaaccctcttcgaccctctccattgctagcagcagcaggctagcgatgcaccaaacaaccatgagcagttgcccgaccacccagtctacctccccttcgccctcttctttgagaaatcacagctcaaaccaccaccagagctagcagcctgatgacccaaccatgacatgcctcaactttcttaccacctgcgcacgcatcactcacaggtaaggtctttcatatatttttacaaagattttttttcttcccttaattttttatttctctccatttctgtttggttctatgattgcgttttgttctaaaaaatagtttagaagaagaggataagttaatggtttggaaatataataatactgatttgattcatctatttttacagtgattgttttctctgcccttaatttttatatattactggtgtttgcatattagcttgatttttgtgttgtaaatggtgtttttttagcatattattgtgtttgaccaccttatcgtatgatatttattttaatttcgtacacacaagataatctacaggcattaattaatttcatgaacttattatcatgtatatattaccatttggtatttttgagttcttcccttgtttccataattatttttcgcaaaatttgtatttgtaaacaagttatcctgtgattgattgttattttgatgacataagaactttaaatttcaatcataaaagatattgtacagaaatatgtatacatatattaagaacatagattattagaactacaaatcatgctttaattttatgcatcagttcaagatagagagaaaaattataaaaattgatgtatatttccaattttaacattgttaaatcttacattttattgtatttgttttagattaatggatgaaattatcataccgtccacatacaacataatactctcttttttcaaaatatatctattctatataaagtgtgactatataacagaatttttgatttatgagaaattcatgagtgactttttatt

SEQ ID NO: 162252 - DNA, 2598 bp, Cannabis sativa
aaggtagttagggtgttacagtccttggcctacctcagcatgaagccgttcttggccaatcttggtgtagaaccgtgctcggcctgtctcttctcgagaccgtcctaggcctatcccgtcaagaagctactcttggcctacctcgaatagaaatttccttggcttatctcgacatgaactgtcttaggcctatctcggtataatgccaccttaggcccatctcagtatgatgtcgtcttaggcctatctcagcaagaaaatcttgtttgtttttattggtgtgtagacttttctcagttttattattatatttcctattatctttatgtctttttggactttaattttgttcggcctattgggccttatcattttcaaactgtatttatttattttaattttctcactttttctcccaaatactattccccagttcaatttatacttatgcatatttaggtcctgatccaaatagtagggttgattttgtcatcatttttgtatagttttgtgtcagttgttgtctggtttaatttaaaatatatgagatttccgtgtaatgacggtctatgtgatttgacagtggagtgttgggaaccgctcatttttcaattaatggtttgttgattccatgatttcatctttaaattttgatggcgcactcttgtgtttataagatttctaattttaaaaatctagtgtatcctctcttagacgttcatttcgacttcttgctctgaaatgtatttttccaggtatatctagatattccaaataaatcttcataataaattatgcttatttattcacttatagcacaattcataatttacactgaattaaattactaagatcataatcctgctcgttactctctaattaacccataatatataataatcctattcataattaggtttccaagatattacaaattggattcgaatagatctgctcctagttggccaaccattttttatctagcttaatggcctcccgcatcacccatcgcatctatttcctctttaaccgtaggcaaattacgatagctctcacggttatgtctcaatatacttctggagagtccacatggtgactaaatcctccacttgtagtacgtcaggtaaaatctttcgataatccgcctccctggtcaccaaaaagttagataggggtgtcagtctaacattagctgcaagggtggaacatctttcgttaggaaagtgaacacaacaaacaaaaaaaattgaaaagaaagaaaggattaaaaatgaatacctggagtggagaaatcaagggatagagttggaagcctctttaacgggaaacctgttgtgaagaaccagtagtcctgaagtttgcaacatacttggtgttgctagaaggacaagttattgtagagtgcttctccaacctgtagaacctaattttggacttgttgttccgcatgggctgcgatttaattgtataaaaatatagtatctcttttgggcctggaacttttatctatcggatcttatagagaatataccatctggtcaaaagcttgtaagattacgggataagttgaaaaggcacaatccccacagccccgcagaagttcgtgaagtaacttcctagtggaaggttagctctatagaggatgtgcacctaactccacgcctcaaagcctccaatgcacttagctagcgattcccctaagaggaaaagtctatgtcagcaaagacccaaaactttgctaactccacaattatcagcatatctctacaacatatcgtagcttctaaacttattgggtccatttaacatatggaagaatcataaaccactaatggggctgaagcttactcctccgccaatttcacaagttctacttgcccttcaaccagagctattgcttcaaggtcaaactcctccggcatgatgtttgtgactaaaaacaaaacaaaaaaaatccaagcaattaatacccacaccaaaaaaaaataggaagagtacgggaaattcctctcctaaagcttcttggagaggccccctttgtactggtcatcagaaagcaaagccttcacataacaatacttccggacgaatcaaatccaaaactcaaagaataaaacgaaaaaaaatacagaaatttcatctaaagccataagagctccaagcagaaaaatttaaggttggttctattcaaacacagttcaaactcgaccaatgcaaaaaaagaatcacgaactaaaatcccaagattttaatcctaacatgtctgaaacttttaaaaagcccagacactatgtattcaaacctcatacttacatgcacttaatcattcctattcaaaacttgagcatgcagttccaaaaattagagaaatcaaatagttcgaaaatagggaaaaattacttgaagaataagagtgtcgggttggaaaagtgcggtggtgaatggcctaaaaattttatgcccaagcaagaatcctgtccacacctgcttgaatatccaacgactcgtttgaagaaggtagttgagaatggtgtcaaaaggatcagacattcaccagtattaagaatgggaattttggttttctctctctctctctct

SEQ ID NO: 162253 - DNA, 1132 bp, Cannabis sativa
aagagaattaacttgcctcgggagcatttttgagagctgcaatatgtagcactgtgtttccttctccattttttccattcaaaatctgttttttcaattcttgactactctcccaattattcaaaatccatttcacaagccactgaaaaacatcatattttcctcttttcacagcaatatgcaaaacattatcctgataaattgtgacatcttcaatggcctgtgggcatgccaataaaacataatttataatgtcaatgcttctgctttgatcatccctttcgactgcgcaatgcaaaagagttcttccctcttttcctttgacacgaacaagttgagtgtcggcttctataaggcgatgcaatatcctagttctccaattcttcaatgcaagatgcataggagtgaatccatctgggttttgctttcttgcaaatgaaggcttcaacctcatcatctccatagtgaatgaggcattatcataagaagctgatatgtgcattggtgtgtctacaaatgatatggcatcaattcgatccaataaatatggatcctttcgaattaatatgtatatcttgtcgttatccccttcacgagcagcatcttccaactcctctaaaatacttttctcattgaaataattaattttaatatttgtaacaatataaattacacgttagtcatgattaataataatactgattatgagcatatgattgaaaatgaagtattctaaaaagggttagttacagaaaatacaaaaaatgtaaccaaacttctagtaatatccgagttggccctgagaatatatggacctaagtcgaattaaattttagggtccttagaaatatatataaaaaaaaataaaaaaaagtgttatgggattcgaattggataataatatatttttttttatttttttattttgagcccccgaaatgagtggaccctaggcatggcctagcccgcctatgcctagggccgaccctttatacccctgtatcatatgaggttattattaaattttatttatttgacaaaaaactattattttgaaaaatacaaaatttaatttatcctttagggcgcgtttggaaagccgcttgggaattggaattgaatgtaattggag

SEQ ID NO: 162254 - DNA, 1649 bp, Cannabis sativa
aaaagaacacaataaagaaaagcaatcaaggatctcaaggtttagttttcactttgcaagtcacatggattaatcctaaatgatatataaagccttgctgtaatattagaattatattaaagtatacaggaaaaccttttcagaggctggtgttttttttttctctgccaaacttgcaattctgtgcatctgaattctgtgtaattaaaatgtagctacggttcaaagacatctccaatagaggacttgtctgaaatatgccatacactggtgagttatgaacatattaattagaaaaacatgttataaattatcaattattatttttccaatcctacaaactcctaaatattgagcttggctattgttcttatatccaactcaaattatgtcattttctctctgttccagcccgagtattcctttgtcaacggagatggaactgttcctgctgaatcggcaatggtacatttcacctcataagctatctatctgatcttgtgttggagtttttgagttatactttcaagtagtctgtgatttttgaggacctttaattttagatatggcagtaaccaagaaacttagagaggactagaatttccattccctaccctaaggatcctatatcccaagcctcacaaattcacaatcttattataggatgtttatatataatccttatgatctagcttaccaaatattctcaacaattagttcatatcaactcaaccatacttttcaaataattttttttatcaaagcattatcaatctcattttacaggcagatggatttgaagcagtcgaaagggtggggatacctgccacgcatcggcaagtgttgcaggatgagtctgtcttcaaactcatccaaaaatggttggagctcgaccaaaaggtggtaaacaagcattctaaaacatccagagttgcagatgcttcttcttcaaatatataaatgttaatatgtatgtaaaagcagggccccgtatactaaggaacattcattgttttgtatattgtatcgaatgaagttattcctcagctaatactcttccaaaattgttagaataaaaaaaaaattaaagaaaatgaaatcatcaacaatgccaaaacactcttaagtggtaaatggtagtcataattgatgaaacactacatctgcatgtgtgtctaattcaattattggatgatatcaactagattgcattattcagaattccatcatgttttaacttggagtgaataaagcagaatttgtcagtttggtccacaattttatcgaaccatgatggccccaagtgaagggagtaggccaatatctttgttacagttccaaggaatcatgaaactcttaagggaagtatatatatatatatatatatatatatacatatataacaaagcactcagctcataaaattaatttatttatagcttttggcacctaattcatgattgcattttcttgcgtagttatagtagtgcccatatccacaacactaaagcttagaaagttttaccaatctttcaaacacattgtccatatcactacctacagtggtggaactaacacttaggaggaggggccgatgtacatattaattttaacaaaaaaaaaaaaaatactattttttgtcaaaaata

SEQ ID NO: 162255 - DNA, 2040 bp, Cannabis sativa
attttaaatatatttaattagtaaaaatataattattattttttaaatatagataataataattattatttaaaagactaaaatctcatttttaaacatattattgtacaaaaaaaatatattaaaattaaattaattaattcatgcaaagtaaaaaaaaaattaacaaagcatgtgttcatcttcttccattggtagtcatcttctattcatatagattcattctcgcaatttcaaataaaatatcagttccattaaaatacaaaataactaggtttcaaaatttgttcccttcccttcccaaaagaaaaaaaagaaaaatcaaatcccgatttattttgaatgtgatcgagatctgaaatttataacttcccatattaaaatgaaatttgaaaggtaaaaaaaagtatagcaaggactaaatattaaaaaaaaaatatttataaatattagttcataaatggatctaattatttaacattttgattaaaaaattactttatctaaattatatagctaataataattatttaattctaaaaatattttctttttaataataacttagttgcaacttgttataataggttataaaaaaattatgactatcttaattacattttaaatataatcattaagtacttacttatatatattttggaattaggaatttaatattaattatgtttcttctcaatctataaccatgtgtttattttttattttttttttatggtagtattcattatagttacgatatcctttcagtaattttttcaaaaacaattttgttgtttgtattataaaatatttaaaattttttggaataatttagttaatacctaatctaaactctggttatagataaatacttaagtttaattttttaattttttgacggaaataatatttaaattatatttctagaacttttataggtacttacgtgtcatttttttattggtatatttaaatgaattttaaaataaaaaatttaatgatttaatgatttagaccaatcatggactatcatgtgaccattgacttgatacttaggtatttatttataattggaagttaaactaaggtatttatgtcgtaaattattcaatcttttttaataatatttatatagatgatcgatgccataattacaatgtacacttttatgaagaaaaaaaatactttcaaattattgggatcagagattgagaaaaaaaaaaattgaaaaaatagattaactgtaacactctcataatactgataatgatgacatgttgcataaatattgagtattgttattgaatatcagtggtgtccagcatatttgataaattgcgccctataattatttagtaatattttttaaaataatttttcttaaattatataaaatttaatacttaattaacacaaaaaaaaaaaaagtattagtgatattttttaaaaattctgtataaatattagagtaaagttcatacccataagtccattcactctcgataaatggtccaatcctaaggcaagcataaagtccttgtgattggatttcctttatgaatttgactaaatcgtatcgaccgttgaaatcgtactgttagtttgatcagaaattaataaataaacatgccatgaataaatcaatacaaaattatgaaagagttatactacttaaaagtagtgagatgtgagagtgagagtttgagtagttaagctgatgattgatcactaacctctccctgtttgggctcatgaaggttccaaaacacatatgtctgaatcacatcaactcctccctctttggctttttcaatcaagtatggccacatctgcattattataagttattaccaaggttccaaataatcgcaatttattaaacggtttcactggatttgttctccaattatactttgaataattaaaaagattatgagcccttatattatatactagatgagagtaacttggcgagccacgtaaatattagttttatataagttctagtggtttttgtttaagaattcagtaactaagcaa

SEQ ID NO: 162256 - DNA, 4904 bp, Cannabis sativa
aaatatataaatttaaaaaaaaaattgcttacaaaaatataagatagataattcatatatatatacataaatataaaagccaagtttgacccttgtggaagaaagctgaaagaagagagtaaatatatactttaacttttccttttgttgaaatacatcaaaaggtgtttttgtctgggtaatgattcctaacaaagctatataacttgctttaaaaagaaaaagaaagaataaaaacacaagctttattatttttccaaagctatgatgagaattaacaatcaatcatctgagatttacaaaagaaagtttggtcaagtaaaaatatagtcatctgaaaggttcaacaggtgcagtttcttcaagactaattgcagcctcaaaacactctgcagcttctaatgatgatgatgaaccattattattattattattaccctttgatttatagaacataccgagattgtaccacgcagaatggttcattctgtcaagccgcaaagcctccatcagaaagcttcgaacaatagccaccgattcgttgtttagttgcctgagaatctcagctgtggaaatcaagctcgggacatgtgtgggatcggtattcaaagcaaccaagaaagctttcaaagcttctttgtattcgcctttagcttcataaagcacacctgttaaaaaaaacaataaaccaacaaacatgtttactcttcactttccagctattaatatgaaaaagcatttacagatcaaatcatgtggcaataattctagtcaaaagaacaaaaaaagagctaaagggtatttttaaattacctgtggcgtgccatctggtggcggagtaagaacaaagggacttggatttagaaagacaaacctcagcatcgcgccattgtgacaatcttatatagatataagttagatcatgccatatttctaattccaaacttctaggtgatcttctactaccactctgtcatcaggaaaacacaccagtcaatcaccgataaactgttacgaatcaaagattaaataattgtactacgatgaagatcataccttatgtaacttcatttcagaaccaatgcttttcttctgaacttgaagaattgcaagaatttgagtatatgtctcaacggcgtttcttatatgaccctgcgcaatgtgaagtttagcttttgttcgcaacagttctccttgatcccatttcccggtttgctccaatgcagtatctatgattacttcagcatccacaaacctcttttgagctgataatattcgagctaacaaaagccatgtttttatgttggatccaccttctagtttaagtgtgttttttgcgtaatgaagtgcatcgtttaatttcctttgctcagcgtttccgaggctaagttggtaaaggattataggatcttccattcttgtcaatttcccagcagtttccaaaacccgaagtgcttcagattgtctcgataccctttcagaatcggtaacagctgatttagcctgtaaggaaagagaagcgcccaagagataattggcagtgcttttcaactgatcacatctactgtccaaaatttcgagggctctacgagcaaaatgaactccttgttcgaaatttgggatttcctcgcatatctttgaggccataagtaaagctgggatatgattgggatcatctccgctactaattaatttcttcaataggtccaaggcaaccgagcaatcaccggctccataataacaaagagcaagaatgtaataccgttcatttcgtctaattatccccggaagcagttcttctacttgatgagccagagacctggtatcccccgaaatagatagagcaaatgaaaggtggtccaagattgactgatcccattcgattctcttgagagaaatttttctaagcagaatcataagcaaaagtatagcctcttctaaattgtttttcggtacaaatgagccatccatttggaaacggaggttaggaggagctgcttcaactccactgtaaagaagataaatagcaaactctttctgaatcctagcagcggtttcactgtcaagattccaaggatggagtaaagcctgtcggtaagacaagatcgcttcacttggacaatcagcgagcttccatagttcgggaagcagctcaacagcctgtataatagtctcctgcaatttacattcagcaccaaagttttcaggcaagccttctggtaatgaagattcaactatgtccacaacaaatttgctagattgagcagcttctgcaagaatgattgaaaatatgcattagcttgaaaaggtcacaaattaatcctcacttatgtggttaatgcactccaaattctcctatcaaatcgttatctcccatccaaagtaatgggattcaagttattgcgtaatgtaacagaatttaccaatataacatacagttttcgagttaaagaaaaggaaacacaaccaatagaacagaaatgactgaaaaagttataaaatgtgcaattacatcaaacaattccaaatatccgaaaaggtacctttaaacctcccaagagcctgcaatgatttcgatttgagaaagattgcttccaaaattaagctaacagcaggaatcgacatttgtggggtttcaatattttgggagcttctcctacgacgttccactcttctagaaagggttgatttaatattgggagccaccattgatatatctattccttcaaatacacgtaaagcagcttcaacatttcctttctgatattcatatcttcctaacactgctcttgcttcctgcaggttgaacacacagatcatcatgagaatccacgcaaacttgtatagatcttcaagtaagctaaaaatgatcttggccaaattaaaaagaaactcggaaattcaacaaagacaaaaggaaaagacttctcagatacaaaaacaaaagtttatcaggcagacttaaactatcaaccaacaacgaaaatcaaccacaatgatgttacaaacgatttactaagatgacactgaaaaataggattctaaaatctgttattgaattacataagaaaataccaagtaaatgaacaacatggtatgagtgaaaaatgttacatctttcaataaaagaaaagtggtcaaagtatggtccatgaagcaaagactacatcaactcaattcataataaacataataaatttgtgtggcttctaagctggatcagcaacaatttaatttgcaaagaaattacaaataagacagtaaaaaagctacaaacctcatagttcaagacaccattcttgcgaagagataattcagcttcttcaatattaccagtatccggttgcttagcaatctcgcgagctctggaaattatctcattaccataatcctcaatcgaaagggattcaaatgaaggcaccattttatcttcagttctcaattggtcccctgaacaaaggcacttcaaaaaatttccaaagcccttcttaaactctcctctcttaactctggtaactctactcttcttcttcatgttgtttcactaagccccaaaatcttaaccacaacaaacaaacaccaaaattaaaacagaacccttttcaacaagaagctaaagcaaaatcccactaaataattaactctaataattctcaaaaccatgatcacaattacaaattctcaaacacttcaaaaaccaaacaaaaagaaaaaacatccaaatttctctaaaaaaatcctcaaccccaaaacctaaatccaatccaaactcacaattcttccatcaaaacaaaaaacccatgtcagaaatccaaccaattccaaagccacgccttattaaataacaattggccaaaatttcaccccaaatatcaatcatttaaaacaccttaaaaaacaacaagaacaaccgacaattccaacaccaacacacacatatatatacacacataaattataaatatatatacagataatcaaaaagcactgaccttttgtttttccaaaaagaaaagcacaagttgttagcccacaaggcatcaacagaggcacccattttcacttgagttcaaactttaatggattcctttgaatgagtcaaaacattttcctttcctctcttttcttctctctatggttttgacccttttgggtaacgaaaacaaagctcggaaatttcgtaatcgaatcgtaaggaagaagatacagaatcagacacacatatataaagagaaagaatttcattgatattcgagacaagagaaaaaaacgcttattagactaaagaacacgacgaagggtattttgggaataaaataaatatattctttcgtttttgggtcccacttggaaattgatttcatttactgctgtgtgtaacacgttagctgaggctatttatttgccacgtggcacttgatttacttcgtttccctttttggccgttaaacggttattaactacactttcaagtttcactagccgacaaaaaaattactgtttgtgtttctgtctttttttttgttttaagaaaaaatataaaaaataaagaaataagattaggttgagaagttttgggtgcacgtgtgccttaatttatgcacgtgcaacattttttattattattatttaagtgattttttattttttgaaagaatttgttacttacaaagtacttgaaattatattttttctatatttttatgatttttatgagtttgtgttttttagtggaaaaataatattattttgatgttagcgtaatattatatacatttgtagtttatgctagtatttaattgagataaatagatgacatactaaatttgtagatatattagtaatttagaaagttttaccgttaaaatttaggctaattagcaatttttttctccgaactttga

SEQ ID NO: 162257 - DNA, 3113 bp, Cannabis sativa
aggtggttgattttggtcatctttgagcccaaatgggaatctgatatttgggcctttctttccacacttagcttcaaccacctccaacaacaacactaccaccaacaacatcatgcttgaccaatacatgattttggtcatctataattacaatataattgctccctctttctctctctctctcttttttttttttttttcttaacccagtttgttcttattaaataggaatggaccaagtttttgttggttaattgtgataagctccagtagaatagataacatgaaacttttgttgaggtcaccttcgtcgaaggacttattttgaggtgggtgggagtgggacttatatttcagtctcttctttaataaatcagacttttctttccatggaactttcaaaacaaacttctaaaatatctttttcaatagtcaatttgtaaagaaaaatgtttaaggacaccaatgtgtctacctcacaataatatcgctatttaactgggtttgtggttgtactgtatgatgagccttgggcagttgaaagttcaactcgatatttaataacaaaaaaagcaagatgctaatgtttgaggttgacattactttacataagatgcgtgcaattttgtctaaagagttggatatagaccctcttgtgtatgaactgaaagtagatatgtgttacatgtatatgaaagacaatatgatattgctggaggttttagtgaagatagtcaagtaagattgttcttacgaatgaaggtacaaatgagtgtgaagaacttgctgccacaatttgtgactaaggtaaaaatgcaggaaaataaaaaaattaaaaaaaaaaacaaaaaatgtcaataaacattagaaacgtcagacttggctgacgtggcatgttagtaatagtagtaatgttattattataaattagatgcaaaaaatgtattttattgtaaaactaatagaagttaatataagaccaaataaaattctaatattattttgataaaaaatcaggtcggtataattttaagttattttgaaaaatacattatttaatttgtcatttaacaaaattgatggtctagtcaataacattttcaaaacacagtctaaaatagtatttaccgaaaacaaattaagatttatttattaaataacttcatgaattggtgtagaaaagcaagtctctcacaaatagaaaagggaacaataatattttccatggctgcccattgttttactttattattactgttccttagtgctgtcttcttttcttttgactgatattcttagaaagtttagaaagaaggaaatttctctacaacacaggatgatggtcccatataccttatctttttcagatttatttagagagaggtcattcaaatttagatagtgaggaaaaccaattatgtacctaaacttataatctactctactttgactattctttgatattattgtgagtgattgtaacatgtctgaatagtataacaatcattaaattgtcttatttttatattttatgatataaaccaaaatttgattatatcattttaggagaagattttccatggctatccttgttaataatcattctataatcatcatcttcttcttcttatcgttgtttcatattagaactagctctgcaaaaccatcaaatcctcattattgtccaccctcttcttgtgataattatatcatcaacgtaaccagtcctttccgactcaacacagatccaaaatactgtggctacccagaatatgagctttcttgcgacaacaatcttactgtaatacactccaaaaatgatgtcaaattcttggtgaggtcaatcaattacggaaactacaccattagaattgcagactccaaacttgacaagaacaactattgctccttcccaaataactttctacaggtagaagatagtttcaatggtttgagttcttacagctttcattcgggagaggatgtcaaactcacaaagcaaatagtattcttgaaatgtgaaaatccaccaatagaagtgaatactaattatatagacactgcttcttactgcaatggttctaattattatgtggtggatggtgggtttagtgtttacgatatggcgatagggtgccaaacagagctaagcagttgcatatcaaatcaggtagtggtgaataagaggaatacatcttattccgacattcacaaccactttacttatggctttgagctttcatggttgaaaatacaattctataacggaaaaggttattactgctccatcgattattccaatgagatgcgatgtcgtaagtagctcttatcttgggtctagctttgtaattatattgaatcaactttgttctgatccgctaatgtcaaaattatcttcgatcactgcagataggagctttcgaagcattgatgacatacgtaataattctatcttataaaccaccatatgtatattattagtattttcaaactttttttttttttttatataaatatttttgttacatttatgttcctctgattcatttattattgccttcttgcagtcatattgggtatatttgtagatgggcttggtacgtaataagaacttttaccttttttttttttttaaaaaattcatcatctttattaattgcaactcattcatagtgattacatgattaaaatttggagtaacatcactactcctgataacacgatcagtaactaaataggatgctcgagctaagaatgagcaacactatttgcaaaatgtctaataaaattgacataaacatcttgcaagtcatttaacaacattttacaatcagaaataatactctcaaagtatgaaaccataggaatagagctatgtaatgcttgcaccacagtaagactatcagtttcaatgacaaccttcctccaatctttctgtttaacccaactcagtgcctccttaatacccaaagcttccaccattttaggttgcaacacccctgaccgaccatggtaaaagcttccaccaatgcgccagtttcatccctaatcacccttgcaaagctataagttgcagtttctgaaaaaatggcaacatctacattaatcttcaa

SEQ ID NO: 162258 - DNA, 1172 bp, Cannabis sativa
aaaaaaaaaaaaaaaaaatcacacggctatggataagaataaactgatatttttaataggataaacttatatttaaaaagaaaatggacctactttgcaaaatcagtaccaaaagttccagactcccacattctttgttcttctctccgtatatcgtccactctatgccgtttcttatagcgttggtaaaatttgtagaggtgctcaatatcatgattacgatctactggggccccgtccctttttgcaagttttctctgcactcaaagtaagttccacaatccacattaattgaatggttgaaacatcaataagattgctctgcattcactaatcactgtaaacaattcaagcttaaactttaccttgattacagacatcaaaccagtcttaaactgaagaacacctctaccatcactgtctggatccaaattatgtgccatactgtgtgcctgctcacacactaaaatttaaacatacttttgtaaataagggaacaaactaaaaatacacgcatgtctgcaggactgtctatctttacttaaataaataaataaaataattaaacactggtacaagtaaaagccattattagctaaaataatgacaatgtgtgacataacaaaagcacaaaaatgaaaaaaagttaaattcctgaccaactggttcagtggactgtagtttttattaagaaaaatgaaaaattaaaacagaaataaaaattagacagctaattaagggctttctaagtaacgtttcactttatgtgtttgcattatgtttctagaaatgaaagtgaatttcttaagccaaatttggaatattcacaattcatttcatttttccaatttagcaagcgtatcaatgaagttaaaaaagtaattctatgacggagtcacggacctacatttggttgagtgtagaaatatcccaccctttaagtgttatacatgacgatgattatattatggtattataagctagcttagtggcgaggaagagatagggaaagaaagaggtcatcaattcgaatccaaaacttttaaattacatgctattaattgattatatatcattatgctacacttaaaaaaatattatcatatatttaatagggtaaatatcattttggaccctctgttttacaaaagttaccaattggaccctgtgtt

SEQ ID NO: 162259 - DNA, 6917 bp, Cannabis sativa
  modified_base (5179)..(5185): a, c, t, g, unknown or other
  modified_base (5344)..(5355): a, c, t, g, unknown or other
  modified_base (6852)..(6858): a, c, t, g, unknown or other
gggggggggggggggggagggtgatatgccttgtcgctgatatgcctagttgttgactactgcaattccttcactcaccttgtaaaatatattagcacgacatgcacatgtaacaaaagacaagaagaattttcaaccaaatttcctatgggaaaacacgcttgaattccttcttcaaaattaaaatttagagtaaatctatagatgagatgcgtatttggccaaaattcttgagaagataaattcccctgaatcccttcttattaatctcaatggatttcctaaagtttagtatgttgggtttcacaaaaaagataaaaattcatgctggcaaggatcgaagtaagaaagatggctcaaagtcaatatggttccggcttcattcttggaccaaggaaagtgcctaaaagtctaggaaacttatggccatcactcccgaaacccgacctcgtaatggtgaaaaaccccatgaggtatatgaaaaatgaaagctccctcttccgtgaggaaaatgatccctgggctagcgttcaatgggcagttctaccaaatagataatcaattttcgggaaaaagtcttaagttcccgtggaaacctggtcttttggggacaagaaattgaagtccacgaacgacccctgaattgactaataaggtgaaaactgatgggaaaattttgtaagtattggtcgttggaaccatgtacttcaagatgtagaaaacgcttaaaaagactagcaaaacagaagtaaagctccaaaaggaaatggtaaaaagcctactgctattacaaccagcccccgcggtcagggaaaagttgattatctcctcgaagaaaaaaaaataacgaaggggagaattgtaaaaacaataaaattgcaaaaaataaaagaagcttgttgtgtattctcgatgttcaaggatgggcgctactggacaggttggaagactctaccccagacatccactccacagtctccttgtaaaggttgtggatggccctcatacctcgtatgtggtgagtctgatgagtgtagttggcttccaacaactagttttccttcttcaagcccctgatttgaagcttggcctcagcaagtttggcaagaacggtgtcattggcattatgcaggtcatagttgttagccttggtctgctctagctccgtgataaatgtattggcttctccagcagccctctttgccagcagagccacctattgtaataggcaaaaaaagagttgaatacagcaaaaggggtcagaatgaaaaagcaaaaaaaaaaacatcttttcgaaatttaacccaactgcatttgcttagtagcatgggctaaggcaaaggcgtcaacactactgcatgacgcccaagtttccatgggtagctttgaggcacttctagccacccagtccaagagcttggatcggaatggtgtagcttcactccctaccttgggggctagacgattctccaaggcctccacttcaactgttagcccaactggggttaaggcatgaaggccatctgagattttatccttccttacggctaaaagcaccagtgcctacctatgcaccaatcgtttctcaacttccaaatgcgccttcaaagccttgtttactttcttctccctatgcatagcgtgtggatcaaggggtatggcctttttgggcaacttgaaccccacagaaggtatctttggaatggcagaaggatgatataggcagagtcggccaaacctcacttataggtcgtgccgcgggaggtggccccctgtaccagcatcagcttcttgcctctatctcttcctaccaagatcgttgtcacctacggccttagaagaactagctttttccatagcaaacctaaatgtacctacacgagccagcgtgaagttaagcgagtcattgcaaaataagacccaaagtctccctttttgacaaagaccatacaaataggaccaacattctcaaaatagtaaattgcatgcaatgtacaccatctcaacccctaaatctctgcatcaaataaatatttgtaaagaacacttaccgattaatgacaaaagtataacggggtatggttacgctacactgcgtttggaaatgtgcgcgtctaagggtggggcggttagaaaggtcttgcaaggtaagttagaggatgagataaattgccacagctccgatgcaaaggatgaaaaaaatgtgaaacttaaaaatgatggttgttgtaagtatttattgagcagcaagaagaggttccttccacgaggagcaaatagttcgaatcattggtaactaaagatttgacaaataggaagttaagaagatgtgtcagctcccaacatttagcttccatcagcgcatgcttcgtgaaaagtgctcagtaaatgaaagttctactcattcggttcgacgccattatggcacctccccaggcacgcaccctgtacacaggtggattgcaaaagttagcattgaaggttccgtcagtgagaaaaatgataccttctgccaattacacttcagttggcaagcacctacatgatgtaataagaaactcgaatttatgccctgtgtttggagcaaatcatgaggaagcagtgcaagctcccagaccacattacatcccgggaacttgggggtaaatgttgtccagatttttttaagcttgacacatggaccctaatccaggaaggatcaatgctaatcagccaatcacatagctttgactgttgttcctggaagataggagccctagcttgataaaaggttcttcatgaaaaaatctccccctgcaaggcaacgatgcaggggacatccacaatacaaaacctctctagttctaggggctgaagttctacgctcctgcaaagggtaaggccttgtcgccaagcacctataaaggtcctggaggaagtctagttgtgctaaaatcctattcattatcacaagaaagctctgatcgtacgtcttagattacagacatggccaccaggcttttttaggaccggcgtcaagatttgtcacccacgatatgccatagtatagagcatgtgcacccaatcaaacctgcttgaatgatccaaggaccattgacaagggaaattcaaaaaggaagaccctggcacgacacatttatgatgtctggactgtaccatctgacacccttaaatgtcatgtgataaaacgaccacctactaaatcaacggtcaaatctcctctaaatgtgatcgatccagccaatgcatagagggaagctagcctataaatacccctacattccataagataaaaaaaactctttgaagacaaaaaaacactatatactacttaactaaaaactctacaaaaattcctattaagcttcttcttcaagaggaacgagaggaataaagggtttaatccattgtacacaaatctgtattagaattcaccggccaaagtgcctaataaaatggactcgtggactaaggatagttaacgcttgaactgcataaaaatctcatatctattatttaatttgttatttatttcttaagctctaaatatttggtttccaaaaatcttagtaagcagatatggttagcaatttgaaattctaactagattatctttaatttgtattaatattttaatgtcaaaataagatcatttcaaattttattaataaaataagtaaatatctgatcttataattaaaattattaaaacaaacaaaaataatcaaatttcaaaaataaccatataggcaagtttgtgaaaaaatcaatattttaaattcaaaggctactaatatctaaaactaatttaaattgattaaaaattaataaaaagtaatttagatttttattctaccaaaatttaaattttttttcattgaaaaacgatttctgaaacttgaaatatcacaaaattaaggcgacacaggggagtatgtaatgtgtactaccccgcgcacgcatgggagggaggatgccaagggagacgctgcattgcagcttggtgggtcgagctagcttcacgtgagcaccctcagtcaagaggttgtctgaacctcggtaatgatcgaggttctccttgtatcggcgcacgcgtggcaccctaggttagatattttgtttttaaaattcaaaaaatcataactaattcaataaaaatccaaattgaattctgtaaaagcgtaaattcattaatttttcatctactttctagaaaaaaaaatacatccagtatgaaaaaaaaatttgtcaaaaattcgtaattcacaaacattcatcaaataagcacataaagcaacatgaacacatccaaatcatcaaaatcatcatcttaaatccatatttcatgaaagtaaattattattatggctatgagaccagttgtaggatgttattttaccaagatctaggtttcctaacatgtttgttgattatattctataatctaacaccctaaacatgaattccttaaacaatgaaataaaacgcatataaagttaagaaaaccatacattggtggcagtggaataatatgtctcctttaactcagatctctaacccttgttcctttctatcatagagtaataataagatatgagcctggatctcctttatgtgttggattcttcacattcttccacactatgattgagtacttgacttgatatgagtgggcatgtactttatcactaaggactttgaaatttatgaagagaaaaagaggagaattaaaaatctgtagaaggaggctctcagagttagaaaattaggttatgaaaagatgaatgagaaagaatgagagccatcttattccttatataagatttgtcctagggttaaatttaaattatgtttaattaaacaaatataaaaattagctaaaatacacctcaattggtcggccatacaatgggcccactagttacaatttttctattttattcaaaaatttatcttttctttcactaatgtcatttctaattttaatcatttaaatgtcaaaactatttaataattaaaattaattataaagtaaaattatcatttatcttatttattaattagaccatacaatgtcttttaattaacaaataaaccctaaaatctcttttttcacaattaatcccttgcttagtgaaaaatttataaataagacgtagtctaattttagaattataannnnnnnattaaaactaattaactgagtctacaagcagtattatctcaactagtgtggagatcatgggcctatataatcaagcttccagtaagtagatctagaatttatcgagtaaactctctaacttattaattccttcctgctccactatagattcagaattgnnnnnnnnnnnntatagaacgctctatatattccaagatatagatacgctattgattatctattgttattgttgacctcgcttttagtcaatgacagtgagttaattattaagcgattaagaatataatagaaacagagaaaaaacaaaaaagtactaaagaacaaagtgtttttctctctcaaagctcttacaatgaaatctctgagtaattctcttagatctctctttgaagcaattctttcgatccctttcacagtgaagttagatcactatttataaggccttaatgcatgagggagagttttccttttgcttacaatgtataaaataggaaagaatatttattccataattatgatacacaaataaggaaattggaaaaagttgccagattcctctgactcaatgtcacgattgtagggattgtcttcgttcttgtacctaacgagatcattctgaagtagccaagtcttgatgagttgtttggaaagccaaactcgttcctactcggatagtctaccttttaccctactcgggtaattagaagttatacgtgtagatgtgatacttgaagtttgttcaggatattcatctctaactagatgtaaggaatgcaaaacatgtgtcactcgtgtattcaggcacatcatagtacaaaaaatgggataacatttcccccaaagtctgtgtaggacctttatggtcgcacgtcaacttcactcggtctggatccttatctgaacgggtggcacatgtttgaagcgtcagttgatgatccgatgtgactctgactaagggtcgcttcagtttttcagctaattaatgctgacagacatgtacattgaatcacgcctaaaaattagcacgtttaaacgtttacccttcacgtaattgagtgcacaacgtacacttttggggggaactcgaggtatttaaattttgaaatgattactttgcctcactaatttaattataaatagggataaaaaccttatcaaccacttttagcaattttagtctttgaagaatcagagcaagaaatctactttctttcaaatccttcgaagaatcatcaggaaacactgagcagcgtcatccgagcagatctaaagcttcaaacagtgagtaagttcttcatttgattcttcttatatgcttgaatatttgattttttggatttttgctacaaaaaacgtgatagttctttgaacttgctctaggaataccatagaaaatttaggtttaggaatgtgaaatcttgactatgcttaatcacgttgcttgattataactgcatcttaatttcaattcaatgatattcactttaacttacccattcggggcttagtgaaagtcaaccattaattcaaaatttcaaaattctagattgcaaacctcaatatcatgcaaaatttttattttttgatcctttgatcagacctggtcggtataaccaacctgtttctgtttgttatgttggaattaatttttaccaggaacttagatnnnnnnncaagtatgttgatttaacagcctaaacatgaacttctaaaacgatgaactaaacacata

SEQ ID NO: 162260 - DNA, 5819 bp, Cannabis sativa
ctctctctctctctctctcttaagggttaacacaaatcgattcaatccagttacaattgatcgatctaactataatcgactatcaaacattaactatccaattataatcggatcaaattgaatcttatttttaatatcttattggatcggatcaaaaaattcaatacaatctaatatccaattgaataaattaacattttcatttagttatagatgaataattagattttatgttgtacattatgctttaaatatgtattgttatacccaatttttcaaaaaaaaaataaaaaaatagttattcccttacgagggctcacaagccaagagttccttgaagacacctaagtcaacaatgaagactttaaccaatgctcgagaagaacaaacggggaaaggacttgatccacggactacatggaaccctgtttgagtgtcccatagcacactaagaatgccatgagcactgactatccccttatgtcactgctcgcacctagggttgcaaacctaagttggcctcttcatgaatttgaagtagggttttcactccaaaaccctaatccgataagaaatgcagcaagtacttgacttattgaggtacaaggatatcaagacttaaacataaagttaaaatttcacaagaatatccatcaatagtgttatgcgaccagtgactacttcaaatagtcactgctcgtgtgccatgtgaacaatggcactccaaagtggtcactgctttcccaaggagaaatagaagaggaaattttgtcaaatgtatatctccaacattaaggatcataaaagcaatgaaagaagccacccaaggttggagtgctatgcaaccaatgaccacttttgccctccaaactggtcactgctgttccaaagagaaagagagggataaagttggccaaatgtgtttctccaacatcaagacgcgtaaaataaataagaaaagccagcaagagatggtgagggaccatatgcgatcagtgaccactttggaatggtcacttctcacataatgtgtttaataagggcccactagggttttagggttcaaaacccaaaaaaatatttatcaccatcaagagacatgtcaaaacacaccacaaggtgttagaaatcaagtaactcacaagcagtgccatgtcatatggtcactgttcgcacaaaacatgaattcgcaatcattgaccaaccacaatatcactgctcacaatccttcagtaaaatgatcataactcgcccaattcttattcgaatgaagcagctcaagttgcattagaaagctattttcaagacggatctaagcttgtctgatagtcatatcacaattatgaggtttttggccccaagattgggttacaatacaaactatctcattcgacactcaaaatgaaaggtttcattagaggggagccacatgaagttgacactgaagttgtgccacttccctagtggcaactggaaaggctcctccaaatagaccatatgtgagcaatgactacttcctatggtcactgctcgcctatttcattatccttcaaaaaccaaagtctcactgacacatgttaaacttagattagaagatacgtttctaaaagatatttattttctttcggggttagatggatatttttttatagttcctttacatgtaatatatttcctttattaaaggacagaatcaaagtgtgtaataaattctctgagtcatgatgagtgaagaaaggtaaaccttagcttttctctaggtctatataaactaaaagatgagacctccgaaagagatacaactctagactcttggctcactttctttttagtcataaaaagaagcataagtctccacaatatctctttagttttatttctcatctagagagacacgacaccattataaattaccatcatcgcgtcaacagtttagtactttcattaagagcgatgggcttaaagacttgttgtcatattgtttttgaaagatctcactaactcgccacattcacaacaataccgagtacaagacataccaactgcgaaaagggtgttgaaatctcacaagacaaaatcaatcaacaccttatcaaagaaggtgttattcctccctgacccttcggggaaggatcatcacgtcattttgacaagcgtctcatgtaggcccatctcaagccaattaggagccttgagccaaaaaatacaattgggcattctttataaatttttatatatcttttgtatatatggtggtaaatatctagaatatagtattttgaaaggaaaattgagcattttatcttaataagatattaaatgcggtattttaaaaaataaattaggtattttgtttagaaaatagttatagtttttaataaataataattaaaatataaaatgtggtatttttaaaaaataaatttagaatttttgttgttaaagtgtattttgggcttggttgggaggccctgagtgtgggcacctgctgccccacctttgagctggccctggtctcatgcctgataatgagggacacgttcaggacactgacttatcaaccccatctagggtgagaggcataccatgatggtccgtgaagagtttcaagagaatgaaacactgcgtgaacaattggaggaaaccatccgattcaacaaagagttgcaagagaggcacggagcccaacaagcctctctctaaaagtgtgacgtccattatgccccaaatacaagacgctttaactcaaaaagaaataaaaaacttctcccgggtaatcaggccacatatgacaccacaaggaatcaaggacccatttcacataatgttcttcctctgtgtgcatcccaaagaagtattgaaaactttttttggagaaaataatgtgtctccaccttggagtaaaaccctcattataggtgacatgggagtttgtgccaaaaatactccccctcctcaaaactatgcaaaacatgtattggaagaggactaaacttatgtcacacgtggtggtcataacctatcttcgcgaccacctcatgttccaagggacataggggtcgatgtcgaggaaataagggataatcgtcatcgataaaggtgacagcctagtcaaaagacaagttaccattcaaggtcacaagataccaccacatatcactttgcatcagacggttgtatttagacagatgaacaatggggtctgttcttccatcatataatcccatttatggcatcttaaaattttacgatagtggagcgtcgatgatctgcttgacacacgattctggatctttgtcttttgagtcagaaatagctccactctgtttctgaaccaattttgtcaaagtggccatttatgctttcaatctcttggtatcattattcagaagctcacattcataaaatctatcgttgatgtagttccgaagatcattcccacgaggtcttgctttttctcttttggctttctcatgtttggcatcaagatgcctccggaggtcaactgtagaccaactctgctcaggttaaacttcttctatcccatcatcttgattaacgaaatcactagggaagtttctccttcccttaatagtaggccttcatacctaagcacttgccctatcgttatgctcaacttggccttgcaaagcagagtggcatccaagcccgacagtatcggtggccttctttttctacaagggctaattggttgtgctcacattgtttttaggaggtaacaggaaagtttcaggttgaggctcgcttgcttttgtcttccccttgtcctttacaagagttgaggttccaacatcagtagggtttgctcttttttccctattaataggctcctcttgagcatcttcttcggagtcctcatctataactccgagtttggcttgcaactgtaccatcattttctccatatgtcgataaaaagcctcttgttctgctagcttctgttgagtttcagttaactcactagatactcgggccacctccgggtcttgttcatggtagtatccatctctgatttcaccatcgtcctcttcctcatcttttgggtttttcttaacgaactgttctcgacgttgggttgttttagccgttcggtcgttagtttcaacacttgttcgtccctcacattgctcgattgagcatgccctggaaggagcggattagtgtcgttcatgacaacatcttagcctgtaagaagggttttcacgacaatggtcttcttggtagccaccaatgttgtagatgtgaggtagctttgattctctctacaactctcaatgaaagcaccaaaatatttactgagattactaaaaactaaattaaataaaagcttaagaaattagataggtaattaagtaatgagatggatatttttacgtggtttgggtgttaaagaatcctagtccacgagtgattgtattggcctcttaaggcttaaagtactacaaatggatcttataatttgaagaaccctaattcttgctatattgtttttctctcttggtttcttttagaagaagataaaagcttatagagaacttagaagtatttttccatccttcgttccctttacatgaagggataaagggatttttgataggcttagatccaaatctaggcatactcgtaacccgctagggtttatgtgcaaaatgggcccaatattggggtaaatagatagaatacatgactttgaggcccacgacaggatatgggctcgtggggtaaaaatgtctatacagaatggggcccacatggtccggacagatgtcacgcgaggatactgctacagtagataggaatgttagatggacgctcttggacaaatagaatatatccctttttgcagtacgcgcactaccgtgtcctgacataggggacatgatctgacttggtgggaccaaatgtcagggggcagccacgtcaccctataaaaggcttctaaatgcatcccttagactccttatccagatgcgcctcgttgattatcaggaggacttcgtttactctgtctcctgtaaggctggatgggctttcaggaattgaagaaacgtgtctctggaggcgaggctcttggagttttagaagggctcgaacctatctctgacctgaactgggccttcgtaagcaggaaggcttgggcctagaattatgcgaaccaatcataccttgaggatgccacgtgtcacttatctagaaacgtagataccaataccagataaaaataatggacaacgcatgtttgcttaattttattttattattatatattttttaagtatcatataacttttaaataaagaaaatacatacaataaaagaagatgacgtttttaattgaaaatacctcacacaattaatcaaatctacaaaatcctaattcttcatgatttcaaaagtaaaaaagaaaaatgataaaatcaagttaataagcataattagcacgttacataaatagtataattcactgtaatttaattaggataatatgttaatttaaatttacctatattatcatttgtatatatattatcttatgtgtattttcaaataaaataattttactattattttttttttattttaaacttcaaaaataaatcaaataaaataaacagataatttgataatatccgaatttatgaaattaaaacaaataaattttaaaattatcatgaaatttcataattaactaatgagtaatttacggcgtaaatacttaagtttaacttttagtatagataaatacttaagtttaatttttttacggtaataatactactactacaaaaacccccttt

SEQ ID NO: 162261 - DNA, 1060 bp, Cannabis sativa
aagccccaaagtagttatcaaagcaatagagaaaatgatgagacttcttttgggaaggtggtgacttaggggtggtgatcatttggtggcttgaaaggtgtgtcgaccttgaattgagggtggtttacgtatacgacatttggagttaagaaatagaggaatgtcaatgaaatggttgtagtgatttctactagtagcaaattcgttttggcacaaagtgattgtgagtaggcatggtaaggctgacaatttttgggactcaaagaaaggtgctcgcttatctccgaaagatccttggagagatatttcaaatttgtacaacgattgtctagagctggtttattttaaagtgggtaaaggggacaacattcgttttgggaagatgtttggattggggattcatccttgaagagtgcttttttggacctagtgttgattttcaaagctaagaatgaaagcattagggagttagtggtggatgaagggctgccaagtaggtttgtgatgagctggaatttcaaattcaagaagaaccttttggattgggaagtccttagccttatcaaattggtttagcaactggaacatgttaagttgctcaatgtggatgttgacattagaatttggaggccagattcaaaaggaaatttctttgtaaattagctttcagctggtctatgtcagatccaaatcatagtggtcttttctggacttagatactgtggaaagttctaccgctccaaaagttagtctttgggtggttagtggcactgggcaaagtcagtgttgacgataagctgagtcgagaagtctttacatttatatctccctctggttggtgtgtgttgcaagagcagtggttaagatgtggaacatctagttttagattgttgttgcgttcatagaatttggatgctcctagtgaaggagatcgagcctgattgggttttgcgtggtaatgtcccgttaatgatagtaagcaaattatatggcagtaaatatagaaccaagctgtggagaacaacaattctggcattaatttgggctgtttggttggaaa

SEQ ID NO: 162262 - DNA, 7215 bp, Cannabis sativa
  modified_base (5478)..(5478): a, c, t, g, unknown or other
catccctaaacccgaaccctagactcgaccccgttctggactcaaaccctggctccagccatggccctggccccggaccccgcttcaaccccagacccggactcgaaccccaatcccgatcccatactcagaccctgctctggcccaagactcgaacccggaccccgaacctgaacacgaacttgaacaccgaacctcactccggccccggaccacgcttaaataaattcaaaaaatgaaaaataaaaattaaatttactaaacaaactttattttctgtttcttaaaattgaaaaaataaaagtgattatataacacattttttattttcaaaaataaaattttaagaacaaaaattttacttttatttttgtgattaaaaaatttaaaaataaagtattaccaagcgtcacctttacttaaaagatctcgtattttatattatttacattaaaataactaatttatgatataattatatcatgactacgagtaagaatttaaaatcttaaaataatttagtaaaattaaatatttattaaattaattaaaaaattcatattttttaaataaaataattattataattttatagttgatcttaatataagggactcttttcaaaatgaacaagcaagtattatggaaaaaagtgctcattgacaatatcaagcatcaaatttcaagattctcaaaatacttcaaatccatatagttaatattttgatatttttcaagattaagatcctcaagtaaataattttgactattaaattattattttacttaatatttatttttatttatgttgttatttttagttttataatttagtgctatgttgtttttattttatttaaaattaatacttttattattgttattttgtattttttaaataagttatttttgtgataaattttaatttaatgactaaaatgtaagattattgtttaaaattaaataaaataagggttagaatgtaaaaaaagtaaaagataaaataaaataaaataaaataaaccaaattaatgtagattcaaaattcaatactattaatagtgtaaaatttggtgcacaacaatttgatgcataatttagtaaatcagtggaatgaaatgatgagaatatttcacaccaatttaatgaaatagtgcaccgttaaagatagttttaatgacatgcttgcgtttttggcaatctttttgtaccaatttaagttatcgttagacttgctaaatatctattgaaaatagagatttgtatataatgaactcattttgggcaaatatatataatgtattttattattcaattgtttgttgtaagaagttgtgtttcgtggcaaataaagaagggcttttttctgttatagtgaaaaaaaaattacaattttatatttgggtcagctatttaaatattaatatagtccatataaaaaaaatacacaaatacctttacatataaatttaagccgcacaaacatccttcagaaaattgaacctttcgagcgatggaaccaggtcgacaacgacggatcaatctcaacccacaaataaacacaattaattctagcaacgtgacttgagaagaaaagcaaaatcaatcaaaaaatcaactattatctaatgataaaaaaatatgcatataaactggtttgaaacacaaattaaaccctcgattacaattcaaattccataaactaatcttcctatattcaaattacacattcaaaacatatagatctgaacgcacaagaagtgaagttcccgaccaatccaaaacaggtataaccgacaaaaatttagtagctaattttatacatgttgcattaatgttattttttagaattttaatcctggatttattcaatttcaattgcgacaaatcattcaaatttacaatcatctcgcgcaatggatctagcaacgttgttttgaattttttgtttctatgtcgttacattacagttgcccttcagatttattaacgctccgataattaacgtatcaataattacgaactgataatgctacaataattttagagatatttcatatagacaatccgacacaaggctctcataaaaaaaaaaaacaattctaatatagtcagtttttcatatttaaacattggtttagttcacgttggtttacagtatttttactattatttcttcacaaaatattcttaacgtacaagtcattgttcatcaatgcaataaaactttgttaaattttttcttagcgatgtccaaatacattgttcatacatagttggacctacgttgtctatcagttgcctaacagttgtgctactaaaaatattataatataataaatcagggctcggaattgacaatatatgactcatatagaggaaactaacaattgtttttaggttgtcaaatagatatctgacatcatatatattatataaatagttaatgttgtacatgtatcttcaatgctttgttgggtttcagtttctttaaaattttcttatgattcagtttctttatagttttcttatagttggctgactatattagaatttttcaaaattttaggaaacagaatcaattccattcttataccgttcaatgggtagtttgatcaaggaatgaattatatgaattacgaagttagtggcgaatttatcttgagggattgcaaaaatgaagaacttgtgcacaagttaaagcaagtgctagaatgcaaccaaaaaaaatacttcactgcaactaaaagactaagtgaaataagattaccaactgttgataataaagtacgatctaacccattctttcacatacaactaaaattgaaagaaccttacttcacaagatatccattgtgtatgaacattgtcagcaacacaacaacaaccaacaacacctccttctttacaatgagcaactcattagttggataacaattattttaaggttgtatgtcatatctaaaatattaataaaaacataaagtattattaaaatcatatttgacatattaatgtgaagtttcaaaacttttcttattacattgactattctgttaaatcttcaaaagttgattgatagttgtaaaaaatatgttatacataacacaataatttaaaattcaaataattagacagattgcataaaagttattttatcgttgaatcaaatattatagatatcaatataattcagaaacatgtacaaaaataaaagtaataaattaaaatacaataccatacattctaaacccgtaatcaaggtgaactcttcaacactaaaacaaacgcagcgaccagcaatgtttgctcaaaattcctttgaattggagtgttgcaactctcttaagagaataccatgatcaacttgagggtataatttgaacggaggaatatttataaatttaccaaattaggttgcacagaccaatgccttaatatttcccgaaagaatggaattaagcttctaaatgacattgttactacaagtggaggtcactttcgatctatagtgatcagaaatagggtacgtggattccattcctgaaatcaaacaaaaaatatcaaaatgaaagtaaaaggttaacacaatgtaaataaactacaatacaactgttagcaaactgtttaaaagcaacaccataccaaaaccaaaaaaattgtaaacaatcgcctaaggaatactgaaaaaacattagaaaacagtactattgccttggatttttcccaaaatacgtggcagcggctgcgtgtgacacatggatttcaagaacacctcacccacaaaagttggttaagtcacgtatgggtaagaaagtgcatatcagggagtgagcccccggagaggagcataaagcatgacgtgactctccgagagctagaaatataacaacgcatctccgggagaagaagggcccgttcgaacagtcatttcacatttaatccgcatcggagaaacgtattagaacccccataaaaagatttgacagatggcataagtctcttttacagcgatgacacgataatcaataagtctagtgatggctccattatgaagaatcacatcaatcaaggaaggataaatattactttcacctaatccttaagatacctacggcatagcatgtatgtcctattttatatctgctaggaatttgtacccctaaggggctgacacttaaagacaagtgatccctttctagtgattctcccaaaaaactctataaataccccaaaaaacagaatgaaaagggatggctgaaggaattattgaatcaaagagagtaaagaagagagagagggagagatagagagagagagagattcacctagaacattctctgtataagaactcttataaataacaaagactcgtagactacagctcattaatgtctgaaccacgtaaaaaccacttgtattaatgctttctcagttctccttattatatcatttacttggttgccgaaaatatcggtcaacaagtacaaatatttattacaaaataaagtctaaattgaacagaaataaatatatcaatgaacaactatttatgtcaaaaaaaactaaaaactaacataaatataacaatattttaaatcataaaacctatcactaagaaaacaacaaaacaaataaaatatataaaaccctattactaaaatcacaagaaaaaatactaaataaaacacagataacatttcaaaattagagcaaaattgaaaagaaactgaaaccaaaccttaggaatttgatccacatgcttcttccccatcttaacttctggaatcgaactctttcttctgcaatttcttcttcaaaggaccatgatgagttttgttgatggttcaacaaaatcttcattagagtcatcatcttcaactatagcatgtttctctatccctttgttcaacaacgatttaacacctattattgcaggtttaaaacttttacaataggcttcttcggtcacaactatttacatagaattcggaaaaataaacagaaaagagaaatcgttgggtggagcttcaatggcagttagagatcgtggggagtaatttttttgagagaaaactagttttgattgtggagaaataactcaaaatgaaactgaaatgaaaaattaaaatgaaatgtgaaaataaaatagaggacatgtatataaaagataggaaaaaatagttagagtttcattgtagtataatgaaatcatcatagaaggtttattaagggtgttcgtagtgcgggttgccatacttttttcaaaccaaactgcatatgtagtttttgtaatttctaaaattgtaactgaaccacgagatcttaaaaccacaccgtaaaaatgtgttgcagtgtggtgcgctttaaacaatttagactatcatcattatcgaacattataaaaaaaattaaaaatcaatccataaagttttaacaatacaaaaaaaaaaaaaatcttattaaagttttaacatnataacatatatactaatcatcaagtcattatattgaattatctctaaataaaaataatataatatatacatatattacatatatttattcttgtataaaaaaaataatcaaaattatattgtaaaaattagtaattttgtaatatatatagtgcggtgcggttttatctaggggtggcaattcgtgttcgcaggtcgtgtttgtgtcgtgtcccatgtataacaggtatatgttcgtcccgaacctgatccgtttaataatcgagttaaaaaatgaaacccaaacatgacccgtttataaacggggtgacatgacacaacgcgtgtaacccttttataagcatattttatataaacatgccaactaataaaatgtttatgaagtattcaacacatttaaaatctatttatttcatgttaaagtactaaaataattttaaataggtcattaacggatcaatatcgtgttacccgtatcaacccgaacacgacttgtttattaaacgagtttgacgagtcaacccaaacacgacccgaacccatttaaggaaaacctaaatctgctaactctcgcgtgggtttcgagtcgtgttatcgtgtctgacgtgttttgtcggccctagtttcaaccgcaattattaaattcaaaactaaaaacagcatcgcaccgcgctgttaggaagatatgcaaattgcaatcgcgccgcaaagaatttgaaactgtattttttaagcgatatggtgcggtgcaggcggtttgtacaatgtgaacggtttgatgaacacgcctaaggtttatttgtgtacaagaggtattttagtaaattaaatgaaaaaaaatggtataaagttattctatccttgtagaggtaaaattgtaattaaaattatttcttttttatttttcatgtaaatttttcaataaagaatataaaggtgacgattggtaacacttttgttttttaatttttttaatcacaaaaataaaaaaaaaataagtttttttaaaattttatttttagaaaataaaaatgtgttctataaccacttttattttttaattttaaaaatagaaaataaaagtatgttgtattactttcatttttatttttatttttttattttatttaagttgggtccatgtccgggtctggggctggggttagggtcgtagtctgggctccaacgttcaggttggggtcggaatctaaaatattaataaaaaaaaattgtttaaaaaaattttgaaaagttttttttttgaaaaaaaaaatggtttttaattaaaaaaaataaaaagtaaaaacagttttatagaatatgttttgtaaaaacatttcacttttctagctaaaaaattataaaattagttcaaaaaaatattaccaatagttggacatatttgagagcgagtataaatgaaaagaaaatcaaatccaaatcaaaatccaaaaagaagaaagattaccttgcattactatcaaaagttctgattttttttttttatgattaatctaaggataaaagaatgtatcaatgcagaggagatatgagcccgtttaaattcttaatttgtttttatttttatttttttaataggcatagagtccgttaaaataacgttagtttttgtatgggaaatttgattttctatacttaaaaaatcttaatattttattcttaaactaatacattttaaactataaaaaatatgacacttttttcaaaattccaaaaa

SEQ ID NO: 162263 - DNA, 2827 bp, Cannabis sativa
  modified_base (2754)..(2760): a, c, t, g, unknown or other
ttgggatttgatgggtgtgttattctgaatcggatggagtggatggagatgaaggaggttggagtatacaaagttggaagtggttacagattcaatcgtttggggatgcaatgctccaatgaaggatttacaggccttgagtttgctgctggcattcctgggactgtgggtggagccgcttacatgaatgctggagcaaatggccaggtactttcttttcttttctttctttctatcccttaccattacaattttgagctgagttttcctacgatttggattgtggacattgacacattattctctggttgaattccaacagtcttagaaaaggttagcatttagcactatgctttttgtgattgtctagtatttctagaaacaaattacttgagattatgaactactacatcacacttgataaattttaatttcgaataatttttttaaatgtaacattttggttatattagactgtgacatatatacgttggtaatgttacattttgtgagtcaaaacaagttccaagtattttcattcatctgcattacacctcagtttcttctttcctctttgatccatttcaataatgacacgccttgttgtactagcggggtgcatctacacatgtagcattcattggtttactttagtggtttttaatatgtttgtttggcattttgggcaactatactacttctactgtgcactcatagcaaaggtatggcctaattttgcttcttgagttggtttgtgtttcactctggcaagtctataactagaggttgtcgtttagaacttaccttgtagaattggttttggttaatagtattgggtgacaaaggatggtgttggagcttactgttactgctagattggctacgagttatccaatttattttgttgtgttatgttggtgttggtgtaaactatcaacgcaaagattcttctccttgccttcgcgctgtctgttcttgtttttcttgaggtttagtcttgaaaggcgaaagttattggtggaatggtaaagtgcctatatatcatttattagtagcaagttgaattttcttcttcccctcaaattagttgtatttgaatattaactgtactacatacattattgttggagttaatctttgcgcctatcccactttaacgaaagataacagaggattagtttttaagggtcgaaaatggatttatacaattttaggttgatctctaccatgaatctaatgttttgaactactgcacaagggattcgaatcggcctacactatttctactcgcataagacaaagatatatatttgaaatttttaataaaattatgagttatttgtggcataaagtgtaatttttgatagtaattataattaaaacttatatttttgaaatttacaagtacttggctactaagagcatctttaatggttggtagtattttttaaatatgttaaaagtatttttactagatataatatatatatattttttactgttacttttaaaatattttaatagtattacaatatttaaaaatgttataattatgatatcatatattatatatataatttattgttattaaatttttatatatatatattacaccttaaattttttattttttttaagaaaacatatcatcaatgttattgtgtggcatgaaagtaatttttaagaataactttcttttattttcaatggtatgatatgtcttttttttttttttttatttaattatatattacaatcatggtataatatgtttttattcttaagttttttacctcaagtattttctaaaatgttactattgaagatgttttaagtgtaaaagttatggtagttttggttgtttgaagtcattaaatttttataatttatttaagaattaatttatatttattaataagaaaataatatgatttgacacttaaagttaaatatttatgaaagttttagaaataatacttaattattattatcgttaatattaaatttagtgtttatttataattaggagttgaatttaagtatttacatgtaaattattttaaaattaataaatgaagttttctttgtcattttttttaaacagatctatttgtcatattgaaatagtgtaattactcaatattaattaccaccacaggttgcttctaaacaaattcctagggattctaaaagataaatgggactttttttaataatacaattatttaatgtttatttatatatatatttttttttataatttcacaatttaaattttaaaaagataatttgaaagttctaaaattattaatttacattttttttttttgtgaaaaaaatagtatgaaaagataacagaaaaagtaatacgacagtaaatgctatgcaatatgcaaatcaatgagaaattaactttataattttacaaagcaacctaaaaatcacatggtattaattttgcagcaatatgtaaattaatcagaataaattgcaaaacatccaacatgatcagttcgtggggtacaatcctgttgttagcattgattcgggtttggttgactctttcatgcattagcctaatgcagaggcggctctaggtatagtcaggttaggcccgcgcttagagtctactcattttaggggccaaaataaaaggaaaatttacatggtatactaatttttattatttttttacaaaaatactgtcagacagtatttttttcttttctattgtgtttttttataagtttcatnnnnnnntatactgtgttaagtttttactggtgttctactagtattttacaagtgttctactgttgttttgagt

SEQ ID NO: 162264 - DNA, 1511 bp, Cannabis sativa
ttcccatcaagaacttgatttctttattccatctcaacctcataatcttggtgatcatattcatacttagataattatattatgtcattcttttctttcatttgtactttgtttttgaagattcaatagtcattttgatgttttgttttatataattattgtcgttttacaagttttttttgtcgttttacattaaataattacatgcatgaatgaagatcaatcaaatgataatgatgagtgagtgaaagtagagttcatttaaacttactattattgttacacttaaaatgttaaattagaagatttagttatttattgggtctctattaaaatggagaataaatttatatagttaacaattacatatagatataggtaaaacaattaacaatgataatcgagaagtaatacttgaaaagtcaagtaattgttgtgaaaggttactgcaacatgtctaataccaacgaaaatgttaattatttttattgatttataatatatttttttaacagattatttataatatttagtatcataactattacataaaattactatcaatagtgcttaataacaacaaatagttttcaagaataattttcttgcttcataagtgccaattacaatctttttcttaatttttgcatttaaaaacacatatccaatttttttatctattttttttcaacatccctatgaatttttataatatcaaaaaaatttaaaattttttgaaataaatttttatcaacacagctggtatcgatttctcccataaaggcatttcagctagcaggcttcttagccaacctgcttcttcactagtagaggctagtgctatcatttcagactccatggtggattgtgctaaaatagtctgtttctttgacttccaagaaacagggctaccatctatgctaaaaatatagccactattgctttggagtcatcagacaaagtgttccagtctgcatcactgtatccttcaaggacagttggaaaccattgataatgtaatccaaggttcatagtgctcttaaggtatctcattaccctctcaatagcatgtcaatgctctatactaggactactggtaaacctgcacaataatcccacgacataggcaatgtcgagtctcgtacaatcagtggcatatcgaagactgtcaatgatgctcgcatattcagattgtttcacatcgtcactagtgttcttaaatagatttacacttggatcatatggtgtgcaagcaggtttacagtcaaagtaattatatttcttgagaaccttctcaatgcaatgagattcatccaaagaaattctatttttagacctagtaatcttaatactaaggattatattagcttcttcgaggtccttcatatcaaaaataacatgtaataatggtttcacagcatggatatttgaaccaaatataaatagatcatccacatatagacatataatagtgcaaatgtcattttcagatttatagtaaatgcatttgt

SEQ ID NO: 162265 - DNA, 4657 bp, Cannabis sativa
  modified_base (4603)..(4606): a, c, t, g, unknown or other
aaaaaaaaaaaaaaaatatctatatacactgatcgtgtcaaattatttaaatggcaaaaattcttaagacctatttgacattattttttattttctatttttaaaattgtattttcaaaaataattaaaataattatttttgaagttttaaaacacaaaatatgttaagttaactactacaaaaattaaaattcgcgacagtcttaaaaacatattttttggggaccgtcgctaaaaaaattaagtaactgtttaaaaccgtcaagaaaaattagtattctcgacggtttataacagtaattacaggaataggcaacgattttaattgaaattcgtaaattttattggacccgtataggcgatggtttaaaaccgtcgggtataagagcccaataaaaaatcgttacctacttctcgctacattttccacgtgcccacctactttttttctatttccgacatgcccactattttttctcacctatttcttctccattttccacaccctaaaacgaaaatcttaactctccgaaacctcacccacgcatccgcaccattgcccttctctctcgccatcttcctccctctctcgatctccctttcttctcatctctctcgtccatcgatctctacccacccctcctcccttcggtctccctctcctctccgtcgcatacgtcgaactaccaccacctcccgtcggtgtcccgatctccgtctcatacgtcggaccaccaccgcctcccgtccgtctccctctctctccgagctcggtataaatatatttatttatttatatatttttttattatatatatttattttgttgttgtataaatttaatgtgttttaaagttagttgttattgtaataaaattaattagttattttatattaatataggtaaaattataaaactaatgcaggaaaaaaatgggagttaatacagatttttttgccattaaaatatagatttattggcgaaaaaatctatattttttctcttttttttttcattctcgacggtttgaaactgtcgcctataacagggtacaggcgacggttttaaaccgtaccctgtactataggcgacgggaagtccacattagcgacggtttttaaccgtcgcctattttgcttattttatgatggtcgtataggcgacgctagataccagcgggaatactttaaatgactatttaaaaacgtcaagaaaaactatttttgtagtagtgtttctaaaacaatagttattattattattattattattattattattattcttttaaaaatatatatttaatactttgagacctcgatataaacccgtgtcgatatttagagtttatatatcgtaagcataaagattggatcaagtttttctttaaaaaaaattgttttgaatctaatatgaaccataaactcaagatttcaacacacttaacataagttaaatctaactacatgaaaaataattttacctcttgatgtctataaagggatccttatttcttttcttatacaaattcgatcatcaattctaaagcaataatagacttgttgaaggcttatagatttaatatgacgaacaaatttttctgttacagtgtgtaatctattcatgagacactgcaacttaagatggaggaaacacaccaaactctaaacctaagccctactcgtgtgagtcatattttaaagctagaaattgatttctcaatttgtcacaaataagattttttatttattctgcaataaataataattgattaattctcattaatctcttattttactaggactaaataaatattattttacactaaaataatatatttctctctttaaatattatttaagaataatattatatttaacaaattaatatatttgtaccaaataaaattaaatagttaaatattattttaattattcaattcaaaattgatataattatttaaaataacaatgtataaaaaattactattttaccctcaagaactcgtgatgataaaataagcgatagcatagaagggacatcgattaccaggctatttttgttttgaaatttgtttctctatcttttccctttgcttgtcataaggttctttataaactagcttcgttaaagcctagagttagtggggatcaaatcgtgttttcccaactttggagaagtgcacaagactctacagtcacgagctttgaggggcaaagcactaatagtgtccgtagcttctaacttctctccagtaagttttgttcgagctggcctccctgtgaagttggaaaaggttagaaacttgttataaaaaatatatgcaagtataaaataagcgacctatatggacaacgatgaaaatctatactaattcctggtattcgaaaggcaaagaaccatttcgatttctaatcgcccatattggaaactgcgccttcaactctatttatatttgcgtttgcccacttgttagagcaaaagaaaccgttatcgttactaacatttttgatgtcgtagaaaaagctaaaatcctcgactgttggattcgcatatcccttactttatatagtacgaagaatctaaggacgattatgtagctatttggggttatttgaaagggtgcgatgtcgtagtaattgaggatagatttgaaaaaaaggtggaaggggagaattactccgcaacgaagaatagaaattgacatgaccacgacttctatcttgttgatctcagggttggtgagggaaggtggaaagctatatgggcacatgccttatgcaaccaatacaaatcagtcttaatttctcgaaataagtctaactgcctcgtcttggagatgagattcacacagaaaaaaggctcgtttaagggtgtgtcctctccatcagaagcacccacttcttcatcctcgtctgcgatatcgtctccatagataggcaatttgaagtatcaattgacttttttcacttcaccctttaataaagctttcagattaatgaaactgccccaggtcaatatggtcgattcacttccccgcaactttatttccaccagttcttctaaattcctaatcatgcgagttatgtcctccatggatattgaatcctgacgctctagaatatcttcatttgacattaatgtaggaatgaagttattgctattatggggttcttccgtggatgctcccccttgagaatggtactcctagctatctgaaagaccgttcatctgaaagatagaagatcttttcagtatgatgtgcatgcaatttaacaaaaagagtgtcctcactcctgcgatcacagtgtaattgtaaaaaaaatattcttaagtaatgtacgcaaaatttgagtaaaagtgcaattattcaaattgttctttattttttaagtgaaacttacatacatgtgcgagaattcagagtgttctaaggagaaatgtaacgtcctgatgcttagtcgcgctaccgtgattttttaattgttaaactttataaacttttatacatttatttgcaaaagtcgggtcccatatttaaacttttacaatattatcaaaatattttagcctggtcgcacaacaagtacaaaaataaaattccaaatgtcccgagaccgaacactccaggtcgcgtcgccatgacatgtacaacaccatcctcgctcagagctcactcctgttcaaccttccctttccctttacctacacatggaagtagcaactgtgagtcgacagactcagtgagaaaagcatataacaaatcatataatatcgacttgtatctaggcgctcatacacctatttacaaggcttaacaaatgagtaagaacattctttactagggtacaaccactgtaccacatacactacatactgacactgtacgagtgttggtagagtttgtttcgtaccttgagtaccactatgtaacgtccccgcttcaagcctccattaggcccttacatccacgaaatactggctcttatacacgagtatgccactctggctgcttcatggactaacgattggccctacaaaccaacacgagtgtttccagcgtgctttgttctcactcgcacactttctaggaaaactttcgaggaggtcacccatcctaaaattaccccaagtcaagcacgcttaatcgtggagatctttcgtgatgggttaccaaaaaacgagatgcaccttgttgatatgggtagtaccaatcaatctatttaagctctcttcaactgggtagtcccatatctacacagtctcagaatcatcccacttgaccttccccgggcgatgtgggattgcacaacttacctggtatttccccttacggattacgggactactgactgtcacaatcaccccccttatggggtctgacgtcctcatcgaccatacttttggctgggttaaggctctgataccatttttaacgtccttgcttcaagcctccattgggcctttacacctacagaataatgactcttatacacgagtatgccactttggctacttcatggactgatgactggccctacagactaacacgaatgattccagtgtgctttgtccttactcgcacgcttcttgggaaaactnnnnaggaggtcacccatcctaaaattagcccaggtcaagcatgcttaaccgtgg

SEQ ID NO: 162266 - DNA, 1696 bp, Cannabis sativa
tttgtgattgtggtgaaattttctaactttctgcaatgcctcgattggatgggcgtcattatttatggcacgcctgttcgaagaaataaacatgatttggggaaaagtttatcactagatatggtgactttatctaatttgtggattcttatgggtgatctaaattgtgttgttgaccagggtcagaggttcccaagtctccaaccatgatacatttgcaatgacttccttttgaacactagtggggtggatcctggtagtatcgagaacttatttacttagtcgaataaaagacaggctttacaccttataaaagaaagatttgacaaagttatcaggatccggattggattattttgtttccaaaagctggggttaatccttatcaatcaaagattctgatcatgctctcgtcttcttggattgttctttgacactaaaaaatttcataaacccttaagattcttggacacttagactcgagacccggattgtatggaggtggtccaaaaatcttggctccttgtggttaatggatctaagagtttccaactagtgtctaaacttgctaatactagaaaaaacgctacatggaacaggacacaatttggattttataaagataagatggttatgctggatacttttctccttgagattcaacaacgaccaccctctctagagaatgctcaattggaagcagacatccttcttgaactgaatgaggttttttctcagcatgactttatatgtcatcagaaatctcataagacctcgtcgcgagatggggacaggaataccaaattcttccatgcctctactatgatttgtaggaaaaaaaattattaaatctgtcacaaaagatggtgttaattagattttacggtgccagagtattgggaactattccttggacaagtttaagagcatcgatcaatcgaatcaaattccccctattgagctcactgaattaatttcccctatgatttcagcccaggagaatgaggatatgataagaattccatctagagatgagatcaagaaggtggtttggtcaatgggccaactaaaggcttctggccttggtggcatgccaggtcacttctactgtgcttattggcatattagctggcaatgatgtggttgatacaatcattgagttctttaggttgggggaattttcaaaggaccttaattgtactttcattgttattattctcaaaagggtggggctgttaaatgtgatgaattctagttgatttctttgtgcaacttttcttacaagataatcttaaaaatccttgcaaaccggattcaatcggtgctctcaaaaattatatccctatttcattatgctttcgtcctaggaaggtggattttcaaaaatggtatacttgcccatgagttgattgattcctttagaaagaaaaaaaggacaactggctttgttggtctcaagtagacatgtcaaaggcctatgacctctttgagtggaattttattgatcaaaccctccaggcattcagatttggggacaaatttcagcaactcatctccagattcatctcaacagtgtctttctctatttttctgaatggcagtctacttaaactaggggtgaaaatcggtcggttatggtcagtttttacaattttataacctaccggtcggttacggtttttattttacgaaaacc

SEQ ID NO: 162267 - DNA, 2204 bp, Cannabis sativa
catgccacaactttgacacttgtcctttaggatgagaatatcaaattcaactttggtaaattaaatttttttataagaattttttttatttattattatataaaaatgattgattttacaaaaatctaacaatatataaattctaaatacatatatagataaattactataaattcttagaaccttccatgtaaaatgtacatttcagtcatttcctaaaaaaacaaatacattttatgtatgaaaaaaaaatatatatatgtacattaaggaggtgtccccactagaaactctcctaaagaaagtataggaaagagtggtggaaaagatcttttgcttctttaattgagaaagataacacaactaaatgtttttggtagaacaagggtccaacctgaaacctctcaaccaatcaaaaaccatgaaatgcctatcctacatttccatgtcatcacactatccaaatgaatgagaaatgagtggttctgcacctccaaacttggaagaacaaccatccctacttccactgcaacacaaaaaattatcagatcaaaaaaaaaaaagaaaaattattaatccctttacaaacaaaaataaggaaaaccacataaataaaatttaaaatctttatcatatcatttcaaatactcaattttctcatcctggtgtgtgccttagaatctctcacaggaacaatcaattgatatagtactgccatggcttcaagttcaacctcagctctaactatctcttcctcatccacctttgtcgacaccaaggctccccgccaatccgccggggcatccccgcaatgtgtgtcactccccactcttccaccgcccccagtgcagactcagaagcgcccatggaagagcactgcttactgtgagaaaacaccctttattctgttttgttatgatcactaacactaacattttcaatctaagtttgttcttttgttgcttactaggccgtaagcttgctagaaatgtcattgccatggccactggagaagcccctgctgaagttgcaaccgctgagacaccagagatcatccagaccgttcaagaagctgtatgttttctctataccttgttggttataagaaaatctatttggtagtttaacaaccacatctgttttttttttttactttggctgcacagtgggacaaagttgaagacaagtatgcagtttcttcacttgctgtagctggtgttgttgcactttggggctccactgggatgatttcggtgaccattttccccctattattaaactttcactttcttgaacatatttagaattgaaaattgtgaagttgaaataagtgaaaatatgatttttgagacatgagcataattttccaacaggcaattgataggcttccattaattcctggggttcttgagttggtaggaattggctactctggggtaagtttgagtgtttatttatataatactaatttctgacgagtttataagcatttcttattccacattagtgacattcattggatcatttgtctaatcttatttgcagtggtttgcatacaagaacctggttttcaaaccagacaggtcagtatttctaattcagattcatgttattggtattcagattgttcctttttttttaacactattttgattgaaaatttcagggaagccttgttacagaaagtaaaagacacatacaaggagattattgggagcagctagaagaacctcaaccaaattgttgctgagatgagttgaaattccggcttttgaagaaatatatctcagcattgtccgtaaatatgtgaccattctctggtttttctttttttctctataagcttctgactagtggcaaattggcaatgtacttctcttggagatacatgtaactattatctttcctttccctttaaagcattaaagcaccatgtagttctgatataacatgtttttatatacttggaagggaaaaacaaatagtctaaattttagtaataagtcaataaattgaaggtggaagtacaacaagaaagttttttttattttgttctctggagtttactaagtttgatagtacatttactagagagatggaacataaaattagagtacatgaaacagcagtgaatacattgtcatagtttgtaagaaactaaatactttatctacttatagaattccatgatcataaagttgcaa

SEQ ID NO: 162268 - DNA, 1977 bp, Cannabis sativa
actcttatgaatagaacaaaaaaaaaggtcgagctgaataaaggacgacaagaatctgagcacgccacgaaattaattacttagtttgtgagccgtgtcgggcatatcctaaaaaattattgcattatacgacacgacacataatgatctagtacgacacgattaatattttaaaaagtccgaaaaatatgaaccgtgctaacacaacaagtcgacgcgcacatatttacaactcttatttatttatataattaattagcagaaatattagaactactattaattgtttctaataaatgtgactgtatgcccatagccataactgtccacatttagaataattggttaaaacttgagagatacttggagacaatgaaaaaggaagattcatattggttacttttatttttaatatatacatttttatatttctaattagcaaaggaaattcggtcagacaatgtgttcggtccatgatttatttgaaaactatatataaaaaaatgtttattcatattcaatatattaatagtatacaaaaacaaaaatagattcaagaaattaaatttcaaaaatatatatggtatatatttaatcatattaagataagagcaagaaaaaatggggttataaaaatcttgcgtacataatatatattgaatatgcatgcatgggaccatatattatatattagtttgttattaattatctgaaaaagagacatctgtacgtatatttaaaataatattacaattaatgtaattgtctctttcattatagtttcttagaggtgtgactttggaattggaatcaatttgttttttttttcttttttttttttaattatttcgtcaaatcaaagacttggactacttcttcatttagtgaaatctattttcaatcaaatcagccgttcctttaatttctatatttgcttgacttaatatgcatttgttttcttcttctttttggcaatatgatccattaattaaaacttcttaactcatccatttgaatgctctgtataattaaaattagtagagcaataatataatgtgagcaaatatatatatatatatatattcatacataatatacaataatatattgaaaaatactaattataaatatttgtttaatttagaggttatcaaaaaaaaaaaaaaataatgataatttattacattggtatagcttatatatataattagtgagggtctactagtctattgagccaattaatttataatagaactctatttatatatatggacaagtatatgcatgacttgattgagtattttagaagcaaatataacatgacttggttttagtgaaagatgatagattttttggaactcatgttatttttgtacatgtgttgaaacttacactaaaagaaggttcaaccatcctctcatgtaccaatttttaacacaaaaaattgtcttagtatttcttttttggttatttttctaagcattgaaacacgatgcatgtatttatttgactttgatctttttccttaatttaattgtagaaaccgatatattataattttcatcttttgtcttcttgtataagaataagaatagttggattactaactatggagaaaaatatgcagattaatatttatgtttttcttgattttttcttcattcatattttgtaatttttattatcaatctcacaatatatcattatagttattgaacttctgcggaaatctaataggactattaatacatgtttttggtatttgaataattataattttgtttttttttatatgatagtttatattatagttaatatgtataataatttttgtaaagctctaaataatttatgattaaaaaatcaagatttagacagtttattcttatctttatatattaaaagtgcatatttaacagaatatacttaaaaataatttttaaaagaatattctgttaaatttaacgattaggtttg

SEQ ID NO: 162269 - DNA, 2183 bp, Cannabis sativa
ataactaacccaaaacaccaaaaaatgttattttactagcttttgtcgatatatttagcgacttttatgaataactaaccaaaaacaacaaaaaatgttattttatcgacttgtgtcaatattgttctcgacacctgtcaatatgtaagcaaaatatcataaggattaagtttcggcaattagtataaatattgttctcgacatctttcaatatacaagtcaagtatcaaagtaggtattatgttttggcgacttgtattgacattttttactatgtttgtcgatatccaagtcttttttaggtattatatgctatattagattttgtcaacatggtttgcgatgtgtatcgatatcttatgatagcattgtcgatatgttgtgatttcatttactgcaatattttacttattttctcatttggtttaattagtggcatcttcaattttcatacagcatatggatcccatttttcacatgttgaggaaaagaggacatatttttccacactcataccctcagccaggtgtggttttggacacctcatgcccataaatcctgactagtatttggggggcacacatgggtgatagggccagatattgttaaacattaatactaaggtatgccaaatagtttcttacaatattagaaggacgaaggcttcatatactttgccttggacatagagtctcaaaagcattaggtggatgtggaggtagacattaaggcgcgatagatgtgggtttgcgataatgatacatcctattgcaacgagaattttgatactcttatgacaccctggaagaagatgcttccgaatctcttgcattcagctggttatttcgctcccaataattatgttctttatcacacacttgggatagtagccaactgagaacaatgcatgctcaatacatgcctatggacgtggttccctaaagtaaaaacaagtaactaataaagttcatagaaccatctaaattttcaatactaatgtattgttgaagactattttgctaaaattattgtttttaattttgtaatagtgattgttggatgtacgccattgaatacatcaaatacctcatgataaaccggtcattagagcagattaaggatgatcaaatgacggttataaaaaatagtagggtgcagacctaatttaccaaaaccttaattttggttttccttttgtaaatttttgtaattaatagacatatcgctaaacgtcaataatagtgtcactatatattgccaaagtcaatgctatatatcgtcaaagacattgcttattcataaacatttttggattataaatctaagtttttttgttatgtcaatacacattgcaaaggccccatcaggtggtgtagaaggagctccagcggctaaggaggtcaacccaggcggtgggcatgctcccgacatggataatgatgtacctctatccttgatatctagggattttgagaagaggaagagggccctccaccaacgtttggctcataggggcaccattggggatgatactctacagatcaagcttggaggctagagttctggttggcctactctcccttgtctacatctaatggcaagggaaaggcagctgttgatgacttagatgactcctcttctgaggatgatggtatttgatatttggattgtaccatcttttatattttttttcttgcattaaatatttttaacttgtattccgactttattactttctttttgcatgtgtggtttctaacctcaaaggtctagttagtggaccttaaggtcccttgagggcagaggttgcccgaacaacccattttggtcacactgtggggtcatctcttcctcctcctcctcgtcttgggcctacgccgtctgggtagcccatgatagttaaccttctattgaggaggaattggccctcgagaaaaggcacctagaggctgagtcgaagaagagagtcggtcatggggcagagagccatggaggacattcataggagtctggatagagccttacctactgtagatactaagtcttaagattttggtgacaataagctagagaggttgtctactctcgacttctaggagttggcctcagtaagatgcacatctaactttgctcacttttctgtgttattgagggctggccagccataggggctggtgtataaa

SEQ ID NO: 162270 - DNA, 803 bp, Cannabis sativa
tgtgaagcaaaagtgatactcaatatccatactaagtatactcttctttgtgtataaatttaactgtcaaatataactgtcctttaaatgtttattcaacataaaactgcagtaacatatttcttcatatataatatatacatatttgataaggtcatatttctaaaaagttctaaaagtctcatgatatgatcccacatattctatcaaaaaatttacaaaatatatgataaaaaataattatcaagaaaaaaaaataatatgtcctaattaaacaaattggtaagatttattacctttttattagttttcgatataaattcaaaattattaatttcattttttttttattttaacaataaatagatttttgttgataatcgttgtaattttttttttatggttgagaacctgaataatcatatataaaataaatttcaataaagatttatattttatggttgagaactttaaaaaccaataataatgtgagtttaatatattaatcaatttgatttcaaaatatatatatatattaatcaaatttcagaatataaaaaacaagatcatatataaaataaatttcaaaatttccatatctaagttttctttttaataaatttttgttgggcaatggcacaccatcttgtagtggtgacttactaataattaagtctcattctctctcttctttccctttcccgttcccgtccttttcctctctctgtttcagccatcgtctccgccgccgatggtccaaacgtaccccataatcagggccggtcctaggcataggcgggcta

SEQ ID NO: 162271 - DNA, 4474 bp, Cannabis sativa
  modified_base (912)..(921): a, c, t, g, unknown or other
aaaaaaaaaaaaaaggaaggaaaacgtaatggaaagcggatatgaataataaaggacagtaaaattgactattactaaataaatttctaaatgtgcgtttgcttataagtaataatccacaaaccgcgttgcgcgtgcgtgtattcctttctttcctaattttaaagaaagaaaaaaatgaatattcaacttagaaacatacgtacgaataatctaattctacattttaatataaatatatataatattcttcaacctctacacaaaatttctcacatttcatattctgatattgtgtgtgaggtagtctagagagaaaatctgtccaaatttgttaaaatacaaccttatatatattagactaagatcgattaatatataatctgaatcattattatatataatgagttcgttattagtttctgttagtcattataattattacgattattctggtgtggttggtcgtagtagatcttaccctccaacttcatcaaaccttcatctcactacttctaagtcgccatcgctcctcaaaaatggaaagatcaggtaattatttcattaattaaacattactcattaatgttctctctctttttttcaatgtttaattattatttgacaggaatatttctgtaaagaacaatattttgcctgatttacctcaacttccttcacctgataattcagatcctggttcctggtaattaattgattcataattataattagttacattaatgatgatctttgtcgatggattaatattaatatctgtgttaattaatttttaattaacaggaaagtatggcttatgggaatgattgtatcagtaattatacctttttggacaaacaaatgggggcgtttacaaaaaattcaaagtaaggagttttttttttttttttnnnnnnnnnntatattttttattattattattaaccataataataataataattaagaacaaatgtacgtacgtagaacaagtagagacagtggtggatacagctcaagaagtgacagaaatggtggaagacatggcaaagaaagtggaaaaagtagcagacgaacttggggatcgtcttcctgagggtggaaagctcaaacaaactgctttatttgttgaagattttgcccaaaaaactgttcataacgccgatctcatcgaagatctccttcaaaaggtacttacttattaatttattattactgctctaataatttttactatatcataattaacacagtattcctatttagtaatttaaagtgctcagtataatatttttataatttattaaattaaaatgtgtgagatttcatattaaaataggtatttttacattacatgttcaaatttttttttttttttttactttgtggcaaatttttttttttaaaatactgtgtttttttttaaaaaaaaatattgtgtaaattttatattttaattattctattttttattttatagttgttttaaattgttttataaaaagataattttttgtaaaaaaaaattgtgtggcagtaataatatatcacgtacgtcttgttgctccaaaacatttatctaattaataatacattacttactctcaaattattgcatttaattactcttttatcacctcccttgctacctaattaattaatgttaattaattattattatctctctcggactgggatttggagctacatcacctgccttctactaattataattaattaaagagaaatattaaaaaatactattgatatctattatgttatataattaagtatcacatcacacacataatatttattaaattactagtaatggctaaaacttttaaacatgtcgctttgcgattagctagcgatactctctaaaagttattacattaaactatataaaactcaatacttaattgaactaatagagatattgacacaaaaaaaaaatactagatactactagtacttttgagcatttatttttaatttaataagtattatagaatatgtaaagaaaaagtactacacacaattaatttggcaatacttctaattgaatgtatgattcattaattaagaaaaacattatttaaaatataatatacatagcaattatttatttattttaaatagcacgccaaataaaaaccttattattatttaggtaagtgatttggattaggtgagttataataactcaactacatcgctgtcttcttttgatcgtttctacctattattattattaactttgactattcttcccattaatttatatgactaggataattcatagtactacttgaccccacttgttattattagtaccattttcaaattatggagcgtaccttttcgaaacataataataacatgttttttttatggtatttttacaatcaataacatgttaataataataataataatttattaatgatatagtgtggggcgtacttttatttatcacaaaatctaaccctaaaattaaaaccatttgagaatattcatcaagtgttgtaaatacgtgcgtgcccgatccacttcaaaatgagttatttttcaagagtaggtttatttgtatgcctagtatttttttcgtgtcgtgtttacttgagccggcctattcttattagataggaaaatccgttttcatatctaaactcaaatacatgttactattttttgcaattttttttaataattgttgaattaattactatttttttttttgtacttttataacttaattttttttatataatttttgaacaatagtgtaatgacaatcatatatagaattgagtatagttttattcttatattttctaatagtttaaattatagtattataatgtttagtattatatttaagttttattattattattattattttttttaatgtatcatgtcatacgttttagatttgatgtgttgtgtcattcttaagtgtattaaaattcaattaaaaccgatccaatctaatcgttaattattagattagataattttttaaatttaattagtaattagattggatcggattagagaaaaacgattggattggatcatatacctacttacttgtaaattttcaaaaaattttgaataatttactatactcaaaaataaggttaaaatattttgtttcaagcgagattgtttattcttataagcgtaatagtaagtaactgttcgaactttatttttagtaatacaaattattaaaaaaaacttgaaatttataagtggtcataaataactacaataattcatgaaaaaaaatagatttaaaaaaattgttgaatatggaaatagataaagagtatatcaaaatatatctacaagcatttccaaaagttaaaattaatttgttctttcacatatgttttgaaggtggaggaagtggagaataaggttgaggactttcttgaagaccaaaccaataagaaaggggaagacaaaaccgatgagaagtaatgaaacaatgattagtgatataatgataatgtagttattagttgtacgttaattgaggagtgtttgtaattataatttattataaattatgtattaaattaatgacgaaatattataaattaaatattttatttaagggaaaattgttctttgagaacaagtaagtacatttgatattgttttttgaaaatagtttttaaaccaacttttaatagtttaatgcaagatgtaaaatttgtgtttagtttggcataaaaattaaatttatgttatatttagtttattatttataattgtgctccaataaaaaatgtaaaaaatataattattattgatcataatttaatattgtattgaaaatctataaatattattatttttttattttttattacttaaataattgtaatatagtaaataaagaagataaaattatgtaaaaaaattattaataataattagtaacattataataaataaaaaaaatgtagaatttattgtgagcagagcaatgctctaccatcctaaaatatatatttcaagtatcttttaaactttctcatggaaactaagttagctcccaaaatttattacagaaactcagcatagcctagaaaaaatacaacttttgaaagagtaattacaaataaatcttcaaagttgaaactaagctattatcaaaattataaaatataccttaatgtactaactattatcatcaataggtattttttagctaaaaatgggaagagtacttatctttttttcaatattctgttgatttacgttagtgaatggtgattttctaccgttagtcttccctctcatatgaatgtttcgagaaaaattaaaggagacgtttaagaggaaagaaagccctctgcccatctgttgggtccgcccctttattggtgggctggaccaataagggcttaggcccattttatttgaatcaattaaagaaaaaaaaaaagaagaaagg

SEQ ID NO: 162272 - DNA, 6360 bp, Cannabis sativa
aaaaaaaaaaaaaaaaaagcgagatcaatgaaaattctctctcaaagtatcttaagttagatcaaaatataattgttcaggttgtgattaaaaacacaattaaacagcatattaagttcaaacataaacatatgagacaataaagataaagatagatatataaaagtaaagttggccatccaactttgcaaaacaatctttacaaaaaatagtgcaacaaggggtaaaccattatctcggcccaaaggctatttttctaaataaaaaaaaacaagttaaaaaccaagtctacatagtaggagacttggatggatcttcatcttcctcggattaagttgcttcttcttcctttttagctttctcgcaataagctaagacttctttagggccttcccccaagaaactcaagtccatgtcaagattttccatccaagctctgtaaatggattacatggcaacagcattgcaccgttccttagcattggcctcggcaccctcaagctttgcaatggttgtattgagttcctcttggagtttctgacaagccttgtgtttgtctttggcttccttctgggctgcctcaagttcaatcttatgattccttctcacttcctcaacttccttggtcagacgcgatatctcctttggggcatcgttccattatttggcaacagcttcgcgttgctcaatggatttgcaaaggtcaacttctgattgcttaaccttctggagaacctgactcttggctacatgggataagaaggaggcctacaacgaaaaatatacatgtgaatttttatggaatcctgaaagaaatgttaaaaacaaagagaagaagaagagaaataaccgagaaattgaagttaagactcctctcgagcatctctgtcgggctagcattattaaccaaatcccagtcgccagactggaaggatttgaaatggtgccaacaggatgcagcgaattgcgagcaatattccgagccagtattccccgcttcaatgggcaaagggaaagaaaattcaagtagaatcatttcaggcaccttactcaaggacgtggtgccctagtgggtttcttgaactggctcctcgacatgtgtgatggttggagtatgaacctgaacttgatcttctaaagaatctggggttataaattgtgaggtgcgcttcttatttgcagttgcattcctggatcttttacggggttctgcattaacccctgacaaagtttccgaggaagcaatcctcttttttcccttcttgtttgaagtgcttagcaaattttcaagatacatttctacgagacaaagagatacatcaatacttattcaaaaatacataaaaggaaaatgagaagttaattccctcttaaagaaggttaccattatcatcagatgatgaagaagggggactgtagtattcactaaattccctgaatcctgtaatcatgaatcgtaaggattaattggatctaaatcccaatctgaatcagggtggcttgccctatccaagttggtcccatactgctcggaaatcccatagtacgaactagtgcaactaagttggacacaaaaccttgggtaccaactatcaaacctatgggttatgcaatctactaagaaaggattccaagtataaaagttataatgacaatcttggaaggttactagcgaggtacattctgtcataagcacagtaggtgaccatctacattgaatacctcgagatgctccttcttcagcttctcgaggggctattctctcgagatagtgtaagcgagccacataatcctggctctctttgtcggttggaattgggaccttctctcacaaagaatacttgggaaacttgtaatcacaactgtactcattcgaggtaaaaacgccaatagttttcaggttggcttcattaagaagaaactcagccgatcgcagtctgaacggaagacctagtagaatttcacgtttctcggccatctcaggagtaggaattggtcttttcgagactgttgtcaacactttcaaggatataaatatgaaataactcaaaaccatgtttttgagacaaagattacttacatattatgcgaaatgcagttgtgttgattggggaaagaccagttgtccaaaagaaatcttctttaaagtgggtcttgttcggtaatcctatgatgatcctacgatcatttgtatgggtcctgaggtaatagaaaccccctacacatcactttctcacaggatcaaacttaactgaataaaaataaacaatttctaggggagtgagacactcccatcctaaaatgaagtatagaaccttcaaacttgcaagaattctgtaagaaattggattcagcttaaagggagcaactccaaggtaattacagaattctttgaagtaatctctcaggggggaggactactccggccctaatgtgctcgaggctccaagcgccgattccagccgagccactagtactagcttcaccacactcctcatgaataagtctttctggtggatagcaactatattcaccaggggcaacagatctaatgcggcatcctcgcctttgattgatgccacaagttcttaggatgccacccacataatctcctatggctcttattcttgattcgatgagatcagcctcaaatgtgacattatggtcctggggagtcttaaatttatgaggcttggaagacataatttcaaaatcaaggtcacttggtgaaaaagcaatagtgactttcggtaaaaaaataagggtttagccaaaggaatagaagataatgacaaaggtttagaccaggtcgcatctcgcaagtaacgatgtttactcttagttatctcttgtagaaaacacctatagcgactaacaacttccacatgattggtatttattaaatggtccctaatttttgcatcatttatctcaagtttggattgaggtttaaaaattttgggtttgaatgggagggctaattccttaggacactctatttctaagaattctggacaataaacttcaaaaccagattgggaaattcttacaaaagaaaaagagcaatcctaattcctggagttaatttattaaaactagaaacttataaatatgatcaacctaagttttactctgattaaacccaaaaaattaaatcaaaattactaaaaccaaaaggagcaaataaagatacaattaattacaaagtaagaatcgtaattcaggtaaaagaaaggaccacagaaaaagggatgaatcactaactgtttgaagatgggtttttgcacaacaaaaagctttgcaactgaagtcgagatgagtggcatgataaattctgtgaactcctgaggatgaagaatatatccgaagaaatgcatagaaaatacgtcaatgacaaagtgggcatgcaaagctttgagaaatcagaaatggttttttgtagaaaaaacttgaaattttttgaaaagcataaatggtggaataatggttccttttcagttttataccttgagattgatcaccgttagattaaatgaacagagatccaacggatagaacaagagagaattggaaaagaagggtaattaatgctaatgatgtgcctcgaaatcatgaaccgccaaaattcgaaagcattcaatttttcaaattgagttaagacaaatatacccttgtaatcatttaaaaaagtacttttcactaaaaaggtactttttaaggggcaattattatactcaaaattcggctacactttagagagtgacacgtgtcaattaagtagaatatgaaacaccagatataatcacgattatatcatttaattgaagaaggaaaactcattaaatatagaattaatagtgtatattcataactcactaactgtataatcttaggcgagagaaggatacacaaactattaattcctatattgacgagacaccatccagactcggaagacgtagattcaaggacaagattcaaatgaagaagtgaattcatctgaatcaaccacggacaatatatagcgaggcatccacctcgctatggataagagaatactaacgaggcaaatcagttgttaaacacttagcgtatttttcatattataataactaagtgtatcaacttgaaaatatgcaagacatgattgttcagtctgcaaggcctcatggtcgaagagcaattcttaagtttgtttagtatgatggtgctcatgccattgctggaaggcatatgattaaccaagtcagcattggtcatctataggcaaagcgagataccagtgtccaaatcaacatcaaccgtttgtaaagataagaatgataagcagttatgtggttattaattgttatccacacgtggttaaatgaaacgtgatcaattcccacatttcatgaaacggttatgtaattcaaattaaaatgtaagtaactgccaacctatattcatataaataggggcaaattctatagaaaaaggaacgaaaaatctttgagggaaagattaaaattgtatattgtatgaaatattcagaaatatcttgaataagatagactcgtggagtatgcatatttaactgcaatatcacgtaaaatacttggtgttattattatatttattatattttagtaatatttattatatctgtgttagatttattacgaaaaaaattcattgttggttaaccaaaatctgcgttaacaaataccaagggtaaaatggtcataacccataaaccccaagaagcaccatggtcggccagcttgtatagtgccaaggagatgaacatggctgacagcataactcaccagaaaaaggtcccaaagttcagcggagtatggcctatcaggcccactatcacccaacccgttcaaagcctcatccaagaaagggatagccctccattatacgttgagtagctgactcagcaaccttctgaccagtagctgaccccattcctctgctgggcctccgtgtaccttggccggtaggccgaatcataggttgctcggctggtgcaagccctagtagagggggatgcaatgatggtccactagcatttacaccaagggaggtcttggccaccttggccctcacacatccggtaggctcatccgaaggcccacctgcaagacctctcaacctagaagacatgtctacaaaaagaaagtagcaaagtcagaatgcaatcataaatattcaatacatgaataaaagcatggtgttattaactagcaaataccattaacatacaaagaggagttatcagagatctcaactacagccttgcccttgcccctagatctaggcacaggcgtgaaggtctatcagaaacttgacctctaggtccgatatggagggaggcatcacctactggaccctggaggccaggcacctacggagagctctctctctctccactccaaattttgtgcaatacgagacaaaggtacttcttcatcatccaagtcaaggccttgcccatctccaaggcaagccacatcagcagctggcagtcttgcaactccacgagtaggaggatacaagccatacatctggaagttgtccacactggtcaaccgaataatgttcctctactcagccgaaaaagaaagaatgtgattcgctctatcccttattttcaaagtaggcatggaacatttaaagagcggcacaaattgaaatttgtggtgctcaattttgcgaaaaccttgtgcaataaaatattttttggcgtacctgccaacctttgacatggctgcgcagttagtgtcgcctagccattggtgaccaagctggctgaaataaaaatagctggttctgctctgcttcggcccaaacttcaacttaaaatagtacccaatcttgtaaggggttggtacgggccaacctagctccctatacaagacaaacatcactaagagatacttaatgctctttggcatgagctgtgttgggcacatcccaaagtaagttgcgacgtctagaaagtagtaatggagtggcaacaatgccccatgttcaatgtagcacccagaccatgccaactaacccaaaggaggcatgtgcgccctacagtttttgcaaggaatctcgtaatggacaccccttattaggccgctagtaaagatcttatcaaaggcctcgttatctagccttatatagagtttccacaggagatttttaagatctatagaatgatagaattgctaccttatattttaagatcaacaattgcacaatataatttttatcccaaattttgagttgtatgacatgcaatcaaaattgtaacatgtagcaagacagattatcataaaattatacctcgtcgatacattaagattgtatagagaagta

SEQ ID NO: 162273 - DNA, 5686 bp, Cannabis sativa
attgtatagaataatccaaaattaggtccttaatgatagattatatattgaaatttgatatgtactaagatcaaggtagttcttccaagtccaagttgaaatttctcaacccaaagttaataattttctcttattttgctagtacattcatatgcatagataaaccatggtaccaagaagaaagaaaaatatacatatggattagataaatagatatttctatttaatatatatagataaacatatttatatatatatatatatatccacttcttcaaatatgtggcgactgcagtatctatttgctttcaaaataatatgctttacaaaatatggtaaagcttctccctataaaaaagaccatctttaacaaatatgtgtagtgtttaagtatggaatgataaggtgtgaatttcattttcatgtataaagcttctcctgtttaccagagtttcacttggcagtggcgcatggcagaacccatctaaccaagtgcgagttttcccgcttatgcctagaccgccaagcctgttgcattaacaaatggatttcagatcaaaatgtcaaaaaaattgtccttaacatttcctcgaaatcaacattttcgatcatcaaagacatccaagatatagttcaattttagcagataacaaccaagtgaaatattcaataaattaaacattataggacagatacattggttattactttttttcattgttgtttatagaaagaaaaacttggaatgttacctttttaaggtgaagtgtaggggttttccaacaaagggtttctgagttctctctcaatctgcaataagacaataagaaattcagtaatataaatcagtgaatatcaaaagaatgaaggaaaattaacagactgagaggattatgtaatagtaactactcacccattctcatctccagagctattagtataggtgttagagttgttatttgtgtcactggtggttacacttgtttcagaagaagctttcctcacaatagacaatgcaagcttgttctgctgggattcagtgatacaaaccatttgagaggcatctgatgaacgtgactttctatgacgcctaaaagttctagcaaaacagtttggctgatgatgctcgggttcttgaaaaggtaaaacgccaccttcatggttgtatctcggttcatttgaagcagcagcaactaagtcaagaatcgggttatgttctaatggtccatgagaggggggtgttcttgtgctttgcacatttcccaatgttcttactacatccattctgtgacaacatttatgtggaattttcaaacagggatcatcagagaaaggcctattagtacatctttcacttatcataggcctttcagaggtgtattccgaatagtctgaatcacttccacattcagtagacgatggtgacttacgagctcttcgggaacaactaaataatctgaaatatgttttccttactttggcatgccttgacttataagaagcacaaggtacaagattaatcttgatgtctacattacaatccaaagtagaccgaagtaagttggcaatcagcttctgtgatttttctgctttggatatacaattaggatgacagaactccaactcagctaccgcattacctgaaattccatcattactcacaaagggagatgttatcaactcatattataacctctcttgtaagtaaatttagtgaaagaaagaaagtttacaatatggatataccttgactaacaactaaagaagatagtttcccttgttctagcagaaaattcttaaaagaactggactggcatagttctgaagccttcttccatatggattccaaggtttttctgtaatcttcaggtattcttaatgtgtgtggccttttctcctcacatgagcaactgacaacatgcttccagttctcccctaaaatattataagaacaaaaattggtatcaaagtttaccattggaattgtacttaaactattaagcatttgttctaaagactcttaccactttcatgaacattatctatccacagctttgaatcgttcacttctgaagaacattcagtagaagaactaagctgcaaaagagccacagtaagccatgtagtttgatttttcgacaacctcaattgtttttctgtctcggatagtattttcagtgcatgactcagtttttgcaagtccatttcagctgcaggagagaaaaacagtaagcacaacaagacactgataattctacaatcacaacacctcttgatagaacaataagcatttggaaagtaaggcaatcattgtgtaaatgaaatatcaaattacttacaattatgcctactcgaaaaccttcttctagcttcagagcaaccttcctcacagttacccgcaagaacatccataatgagatttgctagttgtgatgtaagttgcataggatcaattcttgatctcatcagctccctagctcttatcactgtttttgaagtgtctgatgacattgccaagtctagcaaatcaagcaattcatcatctgatacaatgccaatctgcaaaagaaaacataaaaagagatacctcattagagatgcattttcactacttgaaaaaccaaaagtgactataaggcttccccacttactagttcatatgctagagacattgtgatccttttacccagcagactcagttgatcaagcatcatctctgcatctctcattgaaccattcgatttagaagcaataaagtctaaagcaacttgatcaaaatcaagaccctcttcatgacaaatatttactaatctgccagaaatatcagaatcctttatcttaggaaagtggtacctctgagaccgtgaaaatgcactccggggaagcttatccagatcaggagtaatcatcacaaagattacatgttgtgaaagattatccaagctgtgtaaaacagtagcccatgtatctccatgtagtaagtgacactcatcaaaaatgaaaattttaaaccttgaagagactggagggatggctgccttcttaattaaggatctaatcctttcccgacgattgattcttacggggtctacttctttgacatctctgctccttccagaaaagaacattacacattcccggcaaataccacaaggcctattctcatccattgaaaggcaattcaatgcagcagcaaaaatccttgaagcagaagtcttgccagtacctcgcgggccatgaaaaagatacaacgatgttattctacctttaatgattgcacccaatagagaccttgctacaacattttgtcccaccaattcactaaaagattttggcctaaacttttgactcaaactcctgggagtttcagaatgtggaacaatttcattgcaagtatatttcaagcatctggtatcataaccactaatctcctctacattcttgcataacaacgggttgttttctaagtctggagattctcggaatcttggtgttcctgaccaacagcagcttataccacatccagggtcatcattatatgcagcatcatcatcttcatttgcaaacaatgaagccgtgcggcttgaaaggacatctctaagtgagagagatggacttgtaccgttaccaacattcccatatgattttttcacttgattgttactctggaattttctttctgatacaatgtgatctgtttcttcttctggtaatggaccaatgctaagctcattacacgagtcaacatcttccaagggatcaatggaaggtatgatgcttttgttatgatcaacacggtggctgcaatatcttccactatcgatgttcaatggacccgaaaactcatacaagttaaacttggatttcccaagatcataacttaaattgaaatcatccacaaattcctctctttctccatctaacttacccacattgttagttctcaaacgatggtttttaccagaaccaccaccttcttggcaagaatccaagaaccggagagaaattccggaacccgaattagtttcccaattcacattatcaaccaaagcagagaacttgctagttgaaatagtagaaggatctcttagagacctcactctcctcaacgctacaagagtctttgaaataggaatatcaaccgaatgccgccgtccatccatgagttttcaaactcaatattcagaacacaagtatcattttcatctaaacttcacacactcgaatgtgaggatccaatgaaaagcttcccctctacaaaacaacaaaaacaaagcatataagctccaaattcaaacaacccaaatgaaaaaacatgatattgaaccagttacattgtaaaatctcaagaaaaatcttcagcattgcaattttgaaaaggaaaagaacaaaaagcataaaaaaatcaacggccaaaagggtgtaacacaatgtaacacctttttctctcaatgaaaaaaaaaaataacatagaattcagaaacatactttcttctcacctttggataagagaatcaaaacccacaaaccacattcccccttttaataaaagaataaaaaaaaatcacgcatttcatggcttcacaaacacatgcaaacaacaaagatagaataatatccacaaaaccttcctgattagcttagcttagcttaaactctactaaagagagggagagagaaagtccaaagagagagatagaaacagtaaaaagagtgagtcaaagagagaatctataattcaaaacccaacatcaaaattaagcaaataaaaacaaaaaaaaaacagtgcggggaacagggacaaaaattaaaaataccaacctcacctcataccccccatactggtgcaaaatccaaatacataataatatataaccaaaaaaaaaaacttcgaagttgacgaaatatttgaaaagggtcagcgcagaaagcggagaagaaaacccaaaccctaaaacagtgtccttggtgattgaagtgagtagtagtaggaggttgttgggaaaggtaagaagaagaagaggaagaggaagaagatgggttgaaagagaagggagaagtggcaaagtagtaaatgtcataaatgcgaagggcatagtaacacgccatggcctgtgaacggagccgacgtgtacagaaaattcagaaaggcttgttttttgtgtcagaaattcttttgtcttcttctccttttctctctctgtctctttaattactactctataatctctctctctctagtacccaggtatatctctgtaaagagagagaccggttatggtctcggccagtgagcttccaagggtattttcggtatttcgtacagaggggttttcagaatttcagttagttcagttggaagggaaacatgcagacatgcttcccacgctctttgctggagcgtgataaacacttgattcccgttattctttttcaaattttactgtgagtcatcacgtgacagtctcctatttttgctatctatttttgtttatctctaaaaaaacagtcaattattttgtaaaaataattctatcatctctagccaaactctaaaacactaaatataatataatttcacattaagtatttgggtaaatattattttagaccttctattttacaaaaattaccaattaaaccctgtattttgttaaataataaaatgaaccttgtattttctaaa

SEQ ID NO: 162274 - DNA, 4962 bp, Cannabis sativa
  modified_base (4891)..(4891): a, c, t, g, unknown or other
accaacgacggcagctgctacaggcagtagccacacaccaccccactacagcctattaattacattgattaaataattgttcttttggcaatctttaaaaggacccttgttcaagattctaaaacgaatcactttcttattattcaagctcaaacacctaggagcagtacaatacaaataagaaatgcatatattcctattcttccaaagattatacaacgtggctgccaagactgcatttgtgattctttggagatcctttgccgtatttctgcatctttccaacatatcatcaatcgacatatggcattgatactctccaagccaagagttggttgcaacaaaaacctgtttagcataggaacaattaataagcagatgatcatgagtttctaactcaacctcacaaacatggcataaagtactcgagatggtcatgatctgagtttagaaatcacaagtgagcagttgggtgttagatatctgccaatacaagaacctgtgtttaggcacaataagcttgtcccaaacagcactagcatatacagccgtgtccacctccacaagcaagttataaaactttttggcgctgagtttgttccctttcaccgcaagacaaagcctagattcatccatagtgtcactaaggctcggaatcttcttaaaataccagctaacatccactttctttgggtagttccagatgtcattctctctcagataaattgagttaatccatttgacccataggcaatcctgtttactagcaagagcccaaaaaatttagccaaaagagccttattccacttttttttccttctcggaacccaattcctccaaggtttttagggagacaaactttttcccaagaagctcgatgaagctgactactattcccagttgatccccgaagaaattcccgacaactcttgtcaatagcagccgttatctatgaaggaatgatgaatatactagaagttccttattccaagcagcaccgagtgaatcaattgagcacagccaccaaaggacagatttctactagcctagcaattaaggttcttgtttaatttatccaagataactccacagtcttaaaccttccatttggttggtcgaagattaaccccaaggtatttgagaggaaagcaaccttcttcaatttggactaagtcaaggatcttggatttgacttcttcactaacccctccaaagtctttgaggtattagcagactaacctgtggcattgcaaaacttattgaaagcttcatgagtaagcctcactgagttaaagttcctttgcaaaagctaactaagtcatcagcaaaacacaagttagtcaagcgaagatgcttacataaaggatggaagccataaccttttttaccaaaataaaagctcagcagtctcttgaggtaatcaataatcaaaacaaagagtaacggggacataggatctccttgacgaagaccatttttccctttgaagctaccttggattctaccatttattagcaaatggtaagtggttcccttcagacaagtcattatccacatgataaatctagaaggaaagaaaagcatcctaagtaagtcttccacaaactcccagtcaaccgtattgtaagccttgctaaggtcaattttcataatgtacataactgagacattctttctagtgtaaccctttagaaggtcttgaaaaatcatgatgttgtgggccagcaatctatcttaatgaacgcaccttggttatcactgacaatagtggggagcacttctgaaagtctagaacagatcatctttgagatgcatttgtagactgtgttacaacaggcaatggttccataatccttagttaaaagtagggttagctactttgggaaccaaagaaataacagtctcgttcaaggttttaggcaacttgccattagcaaagaaatccaagaccactgtagagacatcattaccaattttactccataaatccttataaaaaccagacccgaaacaatccaaatttgggctcttggaagagtgaatgttgaaaagagctttcttgacaccccccttattaaaaggcttaatcaagttgacttgttgctccaaatctagacaattaccgtgctttatacatgcctcatctatcaagctagtagctgaacttttactgcccataaagttttcaaaaaatgcttgacaaagtgtttaaccacttcctcaaagtcatcaataatagtgtccccctccatgaaagtggtgatcctgttttcaagtcttcttttctcataacaacatgaaaataactagtattctcatcactaaacttgatctaattaaccttgctttattgtctaagattatgctcaaatctgtccttagccgccaaaaatacctgctgcttttccgaaatagcatgttgtaacaagttgtcattcggattcaaggcagcttcttcctggatttcccaataaatctctttagccttcctatagtcccttgcaacatcccccacttcatggttattgaagatttttaaagcatgtttaactctaaaaagtctctgcattaaactatcaagaccacaactagccacctttttattctattgttccataacagtctgatcataccctgtataagaaggccaatgattcccaaaacgaaagggttttatccctatattactatgcacatcattttgaattaaacaaaggcagtgatacgaaattaccttccatttaaagcaagcatctaagttaggaaaatcattcagctagatatcattaataaaaactctatctagcttggaatagattctatcccccacctcatgcttattagtccaagtaaagaacgaacccgagcttttaaattcctcaacccagggcgagccaagattgagcatccacaatgtcattgttctgaattggtcttccaccacatttgttatgaaaattgaacaaagcgttaaagtcaccaaaaataatccaaggttcattcagcatcccaatgctagcaagattatcccaaagacttttacgattctccattgaaactaccataaactgccgtgactataaaggcctatttttgcccacaaaatttcactttgcaatgcaccatttgagcattttcacttataatatctacttgaacaaacttagcctgccatataatcaatattctaccagaaataacaatgctagaataacagttccaattcagaaagttatctatcatcatatcatgaatttttttcatgtttaactttagtctcaaacaaagcaccaaagccaattttgttcaacctacaaacatcaggagtagctttttgtttgtctatcttattcatgccttaacattccatccaatcatgttatttgcttccattaaacaatagatctgagttaggaaacaacaccttatcagctgctgtatcttgcaaaacagcatagccattactagaattcatcacctttggatcttccttagccacattagaatcagtctacctcgaagcaatacattttggtgtaatccgattaccactagcagcattacaaactgttcccctctctatttttcccttctgaccatctttcaaaaccagatcagtagctaatgtatcagcaacagacctattttctagctctttatccttccctggaatgtcccctgagtgttgatcatttttctttgccacctttgtctcattttcaacaactggtttcttcttccaaacaaccttcttctctttattgcagtttgcaaccgtgtgtcctaaattagcacaagctgaacactttgaagggagccattcatattcaattgtttgttccaccagctgtttcttttcattgatgaaagaaatagatttgggaggagcatccaaaatctcaatttccacaaggactcgggtaaatttcaccattgatcgctcttgaatcaccttgtcaatcatgataggtttgccaattgcgctaactaaagcactaagattattcttgccccaatattgcaaaacccaacccatttaactgaatccaaactggtacagaattaatcattctaaccgagtcaagatcaattgtcaatggcctaagaacaactggctttttatcaaaatgaatcacaccaacttccagaataagatctcgagttgcctcatctaaaaaattcaccaatgtgcaaccagagtgcatcctaattctcaattgttgatttagccaaaaaaaaaaaaaaaaagaaaaaacatcttaatacttaaattcatttcatattggttcatgttattttaatgaagatcatttttaattctcaattgttaatgggacaaattattatctcaactttggaattcttgttggtttacactaatcattaagtaccatcaaatttatcattttaataaattttgctaacatttttttctcttaaaactttattacgtagtattttcatttaagttttattcaaattattattttttaaggatttttatatcaaacatattttcatcaaaataatattatttattataatatttaataattataataattacttacaaatataaaatgtgccatacacgtaattttaacctaatacatataaatatatataattgtttagagattaataaatatgaaataaaaaaatagaactttgattcattaggagattgacaggtacattttgagagattgttaccacattttgagaaatttatcatgtctcaaaaaaaacctattaccaatcaactttaaaacatcttttaccttaaaatatatacaaataattaattaaaggggaattatctcatatacttttctttttttcaaatttacggcttgaaaagtatatgggatttctaaagtggttgcagcgntagttgcaataagagtttctatacgattttttgttgcgatttaggttacagcgctagttgcaatagggatt

SEQ ID NO: 162275 - DNA, 7401 bp, Cannabis sativa
gaggtgaggcatctttcttttgctaaggaagggtagctaatctttgccagccaagaaatttttgtacctcacttcctcattcatcgttggcgtcattcatctttttttttttagatcagacatcgccttctcaacaatggtatttcctcaagtgtcccgcattccacgccctcggtaccaccgtgtcatccatgcgggccaacttgtaggtcccgagtgggatgactttagcgatccgataggggccttcgcaattggctcccaaaactcctactcctggatccctagtattgggaaggacctttcttaataccaagtctctagtcctaaagacatgcatggggactctcgaattatagtaccgggttgccctttgttgatacacccaacctcatttgggctatgtccctcctttcttccaagaggtctagattttccgccatggcctttttgttggactcattaaaattcttcacgcgaaacgaattgagcttcatctcgatgggaagcacagcctcacatccgtatatcaaggagaagggaatttcacctgtggtggagcagggcgtggttctatatgcctagagtacgttcggcagttcatctacccatcaacctttaagcttttccaatttcattttgaggtttttcttgattatcttgttcactgcctcaacttgcccgttagcctgggggtgcactaatgccgagaatcccctctcaatgaccctctccgcacagtaagaacttaacaagtatccctcaaactgggtcccattgtcagtgatgatcttgtgtggcatattaggaattttttaatgaaggacacaacttgcctagtggtgatgctgactagtgtctcagcctctacccgcttggtgtaataatctatggctactactgcatacttcgctctggcccttcctgttggcaaggccccaatcaagtcaattacccacatggcaaaagaccacgggctggtcattcttgtgagttcggctgggggactttactgtagctggcatgcctttggcatttgtcacatttctttacaaattccatcgcatccttctccaagctaggacagtagtatccttgtttaaataccttccttgacattgaatatcttcctacgtggttaccgcactctccttcatgtatatcagacaacactcgttgtgcttcactttcttttatgcagcgcaggagtggcatagattatcctctcttgtatagaactccatgaatcaagacatacctagcagctttatactagattcttcgagcctccttcttatccgcgggtagcctcccctcttggatgtactcaatgtatggcgtcatctaggagggtgtttcatcctccacttgcaacaccaagtcacacttgatagttggttgggctaagaattctactggtatagactccagagcattaatttcccgggttgatgcaagtttagcaggggcatcgacgttggcattgcttttccttgggatttgctcaatcgtgaaatgttgcagccgttctaggtagctcctaacattggccaagtatgccaccatctaaggtccttcttggtattctcccctcacttagaaaaccatcagctgcgagtcttaatccagctaccatcgcttcatactcagcctgattgttgggtccccactcgcacgcccacatggctccccactcacccttcattcgcaggtcgaacggattctctaccacttgtatgaaggttccacgactcaccaaaatgccctccggctcatctaatggcccctggactcgcacaaccccccatggggtcgcacaatagctagggagtcgctcatgggagtcgtcatctcgcatgggaggcgtcagctcgcatgtcaggctgtcacaattcgggaaccttagtattttggccataactttctcgatattcattagaattggacaattcaagataagttggaaagataagaaagagatctttaaatttaaagttcgtgaaaagatccaattctgaacatatcactacgaaaatcctccaacaattgtaacctaataagttcatcttactaactctactcatgagttgttacagggttgacctccaagttgcatagatatacccgagagttgtaagcatggatttccaagattaatgatccttaggtcgtattcgttgactaatctcgcaaattaactcttccaatttttgggactaacatcgcataagagtcgtattgtattaaataataaataataatatgtttggataaagtaatatattgtattaattattacgacaaaaaattaatgcaatgtaagttgcatcatttaatacataacaaatagtttgtattagctttacaaagcgtttggacccaaccgcaatattcgacttggatcccaagacctgtacccagacccatactaagatcgggacccaggagcgaacttggactcgaaccagaccagggacccagagtcaaacccgagcctagtgtaccaaacgagccctaagtcactaattgtctactaattctcatgtttaaactatgcggtcatcacagactttgtcgtcaaaaaatagcatgttgttactacctttcaaacaagattgtgtcagacaatgagaaaccattcgacaatgatcactttactgacttatgtgtcagacagggtatcataaagagtttcctattattttggataacaatattcattgtctcttttatataaatagtggagtcattccattatttatggatccgattttgaactctctagagagccattacgataataaaattattgtacatttttatcacgattttataagaaactaacttggccgactccttgtgatcttgacaatttttaaagtaatacagcaaaaatgagagtatgctattaccactataatagtgctggacctttaaaaatattttgtgttcgtattgctattttataattattattattcataatttcatccctttaaagattcagtgtcgttggctaaaagcaatgtcaatatttacctatattgaaatgtatacattatgctaacaaaatatataccaccattatacataacaaaataaaaaataaatatgatgtaagaataataatatatcgtataacaaaaaaaaaatatactgtacaacaaaatgtataccaacaactcacaataactcataaaacaaattaaaaaaattaacataactttaaaataaaaataatcttaataaaactaatataaatatactaatgtttaagtgatatatttctaaatcttaaatatatacatataattgaaaaaaaaaatatataaattgaatattaaaaatatgagaaccatctaaattttatgtaataaaagataatttaagtaataaagtgtgtaaaaatgttatttttctacaaatttaatatgagaatacttacatagtatatttttgagtcatttaatatcatttttaattgggttaaaaaaaaaaatcatttctaataaaaatatatcaaacatttgtttaaaatctcctattgattataatctgctcttagatgaaagcctctgggccaaatattttgggcccaacactctttgacctattttctttctaagcccaataattttaaatttgtacattatgcttttgagtatttttctcaggtcaaatgacaattaactaatgttttaagaaaagttggattaaaatttcaaaaaagaaaagttagattaataaaaaaaacaaaagattaaagaaaaaaagagaaaaacaaaacatagcatttgttaatgactttaactaaatgttaatcactactcactactagacccagaacgaggaaaaggaaatttcattgtttgctaaaatttaaatgtaataacaaaggaaactagaaactgctttcccgccatcctccaaactttgctccctcattttcagcctctgcctacacattcaataacaagtaacaataataagtaataaatgtgatcacattcatcattgataagtatgtatctaccaagaaaagttgtattttgttaaagaaattccaaaaagtattagtggcgcctaacacactcctacgtgttacctacgtgttaaaagacgatacgtctagaatgtgttactacaagtgctcaataacaatacacattttgttatcatataaaacttaatcaattagctatattaaaattgccaaaccaattaattttttcttacaagaagaaagtaataagtacatatatatataccttgatggtgaaagttacaccaacttgaatctctcctctataagtttggtcggcactaatgacactgtacttacgaggatgtagttgagcagctccattctcagctcctaatgccaataaatcctccacatagatcctgctctaataaaaatgtttgaattagaatagaaaatatgatttcccatttcaccaaaattattgagtctgcaagctatatgatgagtagtttattttacgttgcttggcctatgaaatcatcggctgagaaagtgtccttgtctagaattttgaggttgagcttgaaattgtttccagagcctggatactctgcccggaagttgaatttctcgttccatgatgggttacttccctgtcctgctcaccatttttagagtcgttgaatattgataatgactttgttagtttctttgattcacataaagtaatgaagctttagagcagcagtactgtttgcgcttatgtgaaaaataatgtgttggtagggtgttagaatttttatatgcctaatataatcacacaaatccacaattatattaattgtcaataattataattcgatggttaacacctactaattgctcaatttgaggtacatagtaccatcttaatgattatgatcctgtttggttaagcatttataagctatttttttagattgaagaaaaatcgaatgttcgggacttattcaatattatatatgtatgtgggtaaatgtgtaagatatgtttgtagaattagaacttggtccggaaagcatatatatagatcgacttggtcactgtatatgtaaaccctccttttgcaggtaaaaaatattggccaatttatttcatatataaccttatattcattcctaaccatttatacctgaagttcttttatttatttatttacttcaacaaataataatataattaataataaaaagtgcttaaaatatttcacaaaaaaatcagtttgtggagacattcctatatcatataatgagtatttggaaaagaaaatgaagctaaagttactaaactgactaacctctagctactatgctcttgcgctcttggcctttgtattgaagcacaacataaggatccatgtcacctataccaattttttagagaaacaaacattaagaaaatataactgaaatctgaaacgggcatcttttgttttggagatttatgaataaataatattgaataacatgtgtgaaaagacccataaaatagaagaaagatgaaatagaaaaaaaaaaaaaaaaaaaaacaacaaatgtaccaatgaaatcagtgtctccaagaccctttgcattcactagcaagacctccatagttccagttgccatgattctttctcgttccttctctctctatttttgaaattctatctttctctttttgaaatttgatgatattataatactcttgagtttatgttaaaaagggaaactatttagtcagaatgacttcgtttttatcgatgttgtagtgaagactggggagtgatgctgtaacagcgcgttgacaattcaaaaatgaactacaagccacactctcctatctctcacagacacccaccagttagaactattgttatttttttgtttgtttgtagagacagccagttaatacttaatccaaataaccttaatgcttgaaaaaaaaaatattaatcgtattaacataatatataatggttatatcaaatatttaaattatatttatttttaattattaaataactattaaatgattgtaattaatttataaggtatttaataacaattttatctttttttaattttttaatcataaaaataaaagtaaaatttatatttttaaaaaacaaaaatttattctataatcaattttgtttttaaatttcaaaaacagaaaataaaagtgagttttataatcttcatattctttttatttttttattttatttaagtcagatttaagttcgagtctgaggtcggagccgtagtctgtgttcaggattggggtcgaggccggagtctaagttggagttggagtccaaaatatttatcaagaaaaaaaaaacagtttcaaaaaaaattgaaagtgattttttttaaaatttttaaaatgttgattgtcaattaaaaaactaaaatgtgaaaatacttttataaaatatgttttttgaatttcacttatttaattaaaaaaacaaaagactaattaaaaaatattactaaatgcaacttaaaaattaaaaaaaaaattaaataataaataacttgtcacctaatattttatttccttataaaaactttattaaaattaattatatgtaaaattaaattactaataattattaattaataacttgtcacctaatattatatttatagtattaaaaaatatctcactaaaaaaagttaactcatcttttaaaaaaaaaagataaaaaaaaaaatcgcaactttacttgaaatctttttttcttttctttttaagaaatttcctactgcgattactgaaggtattttagccataactctctcgatattgctcggaatttgacaattcaagatgttctggaaagctaagaacgagatctaaaactttcatgttgagctccaagttcaattcttcttctaagatcgtcaaaatatgtaattaaatttcaccttgtaaaatcaagctcgtcggtttccactattttctacaaaaatatgctaaaatccctccaaaagactctaaacacgcacttgacggaacagaatgaaatctaatgaccggaaaactgcttcccaccgcattaagtgcatgcaagatccaattggcttggccactccataagaaactatcttcacctgaaattttttttgacacttcccgaaaaaatgtctgtcggatatgcatgaatagtatttaaaatagcctaacaaattaaaatcacactaattaataatttagaaaattaatttaagaatattaatacataaattgatcatatttataaaacaaatatggactcatcagggcctatataaccgagcttccaataagtagatctagaatttttcaagtaaattctctaacctattaatttctccttgcaccactatagatttggaattgcactc

SEQ ID NO: 162276 - DNA, 3727 bp, Cannabis sativa
atcacggtatgtcttatagtatttggtttattgtaccttgtacgagtttatgaagcatacatataatgtctgttttttatttactggaataatcttctgaagctttgatgagttacttatttggtctgttggtgttatttttatctgatttattgatattgtattgtttgtatttttttttatttcaggaaaatctacccttaccgactctttggtggctgctgccggtattatcgcacaagaagttgctggtgatgtccgtatgactgatacccgtgctgatgaggccgagcgtggtattactatcaagtccactggtatctctctctactaccaaatgtctgatgaatcattgagctgctacaaaggagagagaaaagggaatgagtatcttatcaatctcattgattcacctgggcacgttgacttttcctctgaggtcactgctgctcttcgaattactgatggtgctcttgttgtggttgattgtattgagggtgtttgtgttcaaactgaaactgtgctcaggcaggcccttggtgaaaggattaggcctgttttgacagtgaacaagatggacaggtgtttccttgagcttcaggtggatggtgaggaagcttaccaaactttccagagggttattgaaaatgctaatgtcattatggcaacttatgaagatcctcttctcggtgacgttcaggtctatcccgagaaaggaacagttgccttctctgctggtttgcacggttgggcttttactcttaccaactttgctaacatgtatgcttccaagtttggagttgatgagtctaagatgatggaaaggctctggggtgagaacttttttgaccctgccaccaagaaatggaccagcaagaacactggctctcctacctgcaagcgtggtttcgttcagttttgttacgagccaatcaggcaaatcattgccacttgtatgaatgaccagaaggataagctgtggcctatgttgaagaagcttaatgtcaccatgaagaatgatgagaaggagcttatgggcaaggcattgatgaagcgtgtcatgcagacatggcttcctgcaagtagtgctctattggaaatgatgatctttcacttgccatctcctgcaacagctcagaagtaccgtgttgagaacttgtacgagggtccccttgacgatcagtatgcaactgctattaggaactgtgatcctaatggtcctcttatgctttatgtatctaagatgattcccgcttctgacaagggtagattctttgctttcggtcgtgttttcgctggtaaggtgtctactggtatgaaggtcaggattatgggccccaactttgttcccggtgagaagaaagatctgtatgtcaagagtgttcagagaactgttatctggatgggaaagaggcaggaaaccgttgaggatgttccctgtggtaacacagttgccatggtcggtcttgatcaatttattaccaagaatgctactttgaccaatgagaaggaagtagatgcacacccaatccgtgctatgaagttctctgtgtcgcctgttgttcgtgttgcagtccagtgcaaggttgcatctgatcttcccaagcttgttgaaggactcaaacgtctggccaagtctgatcctatggttgtgtgtaccattgaggaatctggtgagcacattattgctggtgctggtgaacttcatcttgagatctgtttgaaggatttgcaagatgacttcatgggtggagctgaaatcatcaaatctgatccagttgtgtctttccgtgaaactgtccttgagaagtcagtccgtaccgtgatgagcaagtctccaaacaagcacaaccgtctttacatggaagcaagaccattggaggaaggacttgctgaggctattgatgatggacgtattggcccaagagatgatcctaagatccgatccaagattcttgctgaggagtttggttgggacaaggatcttgccaagaaaatctggtgtttcggtcctgagaccactggtcctaacatggttgttgatatgtgtaagggagttcagtaccttaatgaaattaaggattccgttgttgctggtttccaatgggcatctaaggaaggtgctttggctgaggaaaacatgagaggtatttgctttgaggtatgtgatgttgttcttcacgctgatgctattcacagaggtggtggacaggtcatcccaactgccaggagggttatctatgcttcccaaatcactgccaagcctagacttcttgagcctgtgtacttggtcgagatccaagctccagagggtgctctcggtggtatctacagtgttcttaaccagaagcgtggacacgtcttcgaggagatgcagaggcagggtaccccactttacaacatcaaggcataccttccagtcattgagtctttcggtttctcagctacattgagagctgctacctcaggacaggctttcccacagtgtgtgttcgaccattgggacatgatgtcttctgatccattggaggccggaactcaagcttccgtacttgttgctgatatcaggaagagaaagggtttgaaggagcaaatgaccccactttccgagttcgaagacaagctgtaagtttctactacaacttgtgcttgttgagaacatacagcttaggtttgaggaggaaagatgaggagaagggaaagaagttatcaggaatcgacattttttatgcttttctccattgccttatctattttgcttattttctagtctgttgttttttaagttttgttacaggggatatttggttgtatcctttggcattttaggggaaagaccttttattattattataactttttaaattgtttgtgcttttttgtttgaagaggacacagtatgtaatgttaaatgttggctttttgtctcacatttttattttattttcaattttttatcttaaaacattacttttctatggaattggtttttatactaggggatttcttatatttggtcttcttttttaagatagaagccaagccatatgtgtttttatatatgtcgaaatcattcataagttataatcttcaaattggattacttgatagataaagttaaaaataaaaattgttttcttgaaagtaaaattgaaaagcatattttgttagatggaaaaaacactagtaagtaggtaaagtctttattatataagtttgaaaaaaggtcacctaaaatggtgaaacttaaacacactggtgagtcagaatacttaattaacaactgtgtggcagttataatttagtaagcatattttttaagaaaaagattaacagacttttgaaaaaggtgatcttagggactaacagactaatttgtgttaatttgtgtcaaagtgaactttgtgaggatttttactggtaaagaagtgatattagtagagaagtggagcatgtgtgtttgagtgaagttgagagatgatctttcagaagtttcgaggtcctccgtttatagaagtcttttgatggtctgtttcttcagctctcaagaatggatgggagtctccattctcccactttcctcttgatttggtcttgtcgatagaggctttgttgggcttaagatttgttcaaagcccaaattattatttatggccatgtatttaaatggaagaaattatagagtacaatacattacattgtatatctattttattttatttgtttt

SEQ ID NO: 162277 - DNA, 2241 bp, Cannabis sativa
  modified_base (600)..(603): a, c, t, g, unknown or other
  modified_base (861)..(863): a, c, t, g, unknown or other
ttttcttctttaatttctttctttttctaaaccaatacaattttagggaaatgttgatcacttcataattatttgtagaagtaaattaattaaagttaattagaataagaatctagtcacagcaatcatgttgtccctttcaaatttaacttaatttgtacgtacataaataatgtcaggttcattggtttaaggaactctaagattgatcatgttgtctaatagtaaaatacaaccactttattaaaacaagatcatgaaaaggggcacaactaacatagtcatggctaggtacaatatgtgctacttgcagggatttttaattgaaataaaaagctttttctataggtttaggttaaatcctgacaattactttaaagtttaaacttaatttccacttaaaattagagattccatttttttttaatagaatatcaagtttaaatcgaacaagagtgatattttattattattttttaatatctaattaaaaataataaaaaaaatcagattctaattattatggtggccggcatttggtgtaacacttttctaattaattttctgttttaaaaaatgaaaatatttttcaaaaacatnnnntataaaactgtttttacttttttttttaatttaaaattaaaattttcaaaaaaaataaaataaatcactttcaatatttttttaaacagtttttttttttaatcaatattttggacttcgatcaaacttggacccaaattttcccatggtcttggcgctaaacccggcctctgacctgaatttgaatctgactccagacccagacccgacgtaaataaaatcaaaaaatgaatataaaaatgaactttacagaacacnnntttgttttctgtttttaaaattaaaaaacaaaagtagttacaaaacatatttttgttttttaaaaacaaaatttttaaaaataaaaattttactttcattttgtgattaaaaaattagaaagcaaaagtgttaccaaacggcacctatatgaagaaaaattttacggtaagaacattacttttatccttgttatttttatttttagcatttagagaaattatagctatttttttaagtattatgtaaattgtagttatatttcattagcttttgaaaaaattaaaatgatttatagtgtcaaaaataaattttaaatatttaattgcacccatgtaaaaagaaacaaacacatgtacaattgaatatttgaactctattttcgacatcataaattattcagaattttcttttttaaaaaaaatgcataaatatataattatgatgaaaatcgtcatataatatatataattaaattattattttttaaaatgcccaaaaatataaatatctctattatacttttgccctatatattaatccaaataatgtaagagcattctatcatttaaaatacattatcaatttttttcctatttatctatctaaaatttttacattacaccatacatcagtttgtttgaaatacatcacaaaaattccacctttttcaaattttaatatattttattcattttaaacatataatattaatatttacacatatccacatataaaaagaaaaattaaaatctcaaacaattaataaaatatgtttagagtaatgaatagtgctacacccatatttcgagcgctaaatttaagcaggacacatgtcatataagtctaaaagaatgaagagaataataaatgcaaggaatgaataaatgtctcgcgtcaagataaattacggttaaaagatgtgatgacctcgcgtggcactatcaatacaatagttcacgagtataataggaatgcaagttaaatccttgaaactcgattgagatgaacgaggcatgtgaatagcaggaaagaattagttaagtagaaatagtagataacgatcgagttctttaagagcagtaactcattgaccatcatacttgtaagtatgttgagactaaggaaaataagtagagtacaacttatctcagaatttgtaaagagtagttcatgagttgttgtaaaaggcgatagcgatgacaaatatcttaactattgtctcgtagaatactaatagctattcttgaacaccgttgagcaatgcgagccataattagagtatgttatctcgataacgacatataagtatattttaattatggaaataattttttatttatggaaataattttctatttaaggaaataattttctatt

SEQ ID NO: 162278 - DNA, 1725 bp, Cannabis sativa
aaaaaaaaaaaggaaaagtagttgtttgttttggttgatatatatttgaaatgctaatattattaaaaaaaattatcactcactcatgtaaaacaaaagttcaaatcacaactcacacttcataataaatttaaataataagagttgattaattaggtgcaatgttatgcatgcaacatcaacttcaattccagaaaaggaaatctttatttgatgatatataattattgattataatacaagatttcaattttcaaagtctagcaacaaacacaatattaatattgtatacagtgtaccattagccattattttttacacaatatcatcttaatatatacatgtatacgtgatacaaaaataaatatttttataataatatatacaattagtgataataattgaatttaacagacgatctggcgaattgacattgtaaaaagtctaaatttccgggaaaggaaaggcttacaagatgtaaactaagaaataacaagtcaattttgcttttgctttataaatttttttgtgtatatataaaaaaaataaagtcacattttggttaactaaagagggttttaattactttttagtattatttttttttacatgttgttacttatttaatgaaaaatatattttacttaaaaaataaaaaataatcaaaagttaaaggctacattatttattattgtcattgattaccaattattaaaaagactattggtaaagattcattttgccatattaatcaattactccacattctacagtaagtcgcataaaataattatcaattacaactgatactatttcaacttttaaattcaattatatgtataaggaaatatttttttttttaattgtgagccaataagtgaaacatataataaattaccaaaaactaagagactctttagtattttcttcttcatcatgcatggaaattgggaaatgatcatacaacatggtggtcatgattaagaaaagataagctgatcatcatgttttaatttgttctttctttttcttttttcctcaaatgttattcaaaaagatcgttatcaagattggtattatcgatcaaccaaaacatatgattatgatcatatattttagtggctaaaaaatgtacattgacattgattaattgaatttctgtagggtaaaaaaaaatcatctaattaactgtatatgattgttaaaagttaaatcatctaactgaatatggtgaaacctaacactttaatttctttatatatattattgttgataagcaagtaatttgttttttatgcattttctttgatcagacattattattatgtatatcagtatatgtttttgtatacataaactatatatcctttttatttattattattatatatacgtgggaagactcataaccatgtaaatagagagagtatgatacataactactaaagatatatattagatatagaagtggtcgagaatattttcatacaaagaaagaataaaatatacacatacattcacgcaataaataaaaaggtaaataccattttagaccctgtgttttacaaaagttatagattggatcctgtgttttgttaaatgacaaaatggaccctgtattttttaaaattgtaaaaataggacccagccctgagcttaatttttgataactttttttttttaatacaactaacttgaagacaatgcttaatacgaacagataca

SEQ ID NO: 162279 - DNA, 1764 bp, Cannabis sativa
ggtattgttggatccgacccggtacatttcggactcggatcctctaaccaccaaaaaaaaaaaaattacatgtggtatcatttttttatttatttagattttatatttaaataaaaaaaaaatagcttttgtcctttatctaatagttattttcatttttttttaatgggaaaaagaaattacgtgtacaaatctcttcctcactccttcagtagcttagataatatcaatgactatgtgctagctataaggatgttatacctccacattctactaagaatgataccgtcacaataagctagcctcccaaaatgtcaaacgtaatctcatttatgatggactatggtgggattcaaactcttaacctaagccagtaaagacatccctaccactacaccatacaacacgtggtaaaagataatcattttagtttaaatttgatgtttgtaaaactattcatgaattgtgtcgctcatctcttagcttcacgtgactatgttgattgtatctcttagcttcgagtggctatgttgatagtcattttaattcaaatttgatgtttgttaaaatataaaaagtctctaatgctatgtttaaagtagaaaaagtgattgaacataaattataagaaaacaatgaaaaaccaaacctaatattttaaaaattagtgtcatgagatgataagtatcagctctaaatttgatcaaatagtgtcaatggtagaatgttgttttagagacagattgtctagttacagtttcgttcgtcaatagaattgtttatattttactaaatttaatccccttttttttctaaatggaaatttgaataggaagatattcctactaatttaatgtttattttgttagacaattactattctaaatgaagtttactattcagcccaatttgcaatataattctaaatgatcaaatctaatttgtaaaaaattgggtggtgtaattacatggaatataattattttttatatatatttttattaaattatttaataagaattacatccaaacaatatttgtattttaaaaaacaaagtaattactaattacttccacataagcttatattaagtgttaaatattaaattaaatggagaagagggattcaaatattgatgagtctacaacttctgaattaaacactctttcaaaggacaaaaaaatataaagacaacttgttcatcttacattagaatgaaaccaagaaaatggcttttccaaaacataagaacacagaaattactaaattagagaggtttacatatggatggattttcttctcttctcataagttttccatacaacaataattgttattaggaaagcttattacaaatagtgttttaactttaatttttcgatacacaagtcgctttgtattcatcggtatggaaaaagaaaaaaaccccgtttctcaaaccggtcagccataaatcgaccgccattctctgaagtgatgaccaacctaaaaatcccatatttgtttatttacttttttttttcttttcctttcaaaatcactagaggaaaaaaaggaatgaaagaagaatgaaatttatcccataagaaaatggggttgggagaaaagcaatacatacaaactgattgagcctgagcgagcttcaggctttgtgattcttggcgagctcatcgacgtctagttcaaccatcaatacgggcatatcttttcgcatcccatatggactggagaaaaggaatgcagaactttcatgttaggcacaa

SEQ ID NO: 162280 - DNA, 1881 bp, Cannabis sativa
gccatccaccacaaaaaaacagtccacctgaaccaccagacaaattaacaccccacaatttcttcccaacctgtattgttacagctcctggctttccttgtagaaaattatttgagatatacagcggaatacgctgcagtaatttcaaatacaacaagataaacagaagaattaaagtgagaaaagagagaccatgccaatatttgtataattaagcatatgtatgataatgtttgcagtgctttttaaactgaacgtcttgtcatgattacctttaattttccagcagactgccctaatataatttcgaaattgggattagattgtttaacggttgctccttcagaaaatttgccaccccttgaagatgaaaacgcgccttgagttacctggtcgcttgtgtgatctttagatttggcgccaagcttcacatttccttcaatatatcatacaaacaaagaataatattagaatagtaaaatgaattcttttcttctgatgaactttggtgtccatcccctgtttgttgttgcgactaaccttcggattgttggttgttttgatcacacagtcttgctctgttgatggaaactttgaacatcatttcatttttattagtcagttcaaatgtacaaacatcgctcagtttcaagcaattttccacggcaaattcccgccaacatcttatcgagattacagctcttggtgagccatttctagcttttatctgaagtttcccaagccaagttctcccattatgaggaacatatagagtaatatcaagatcagatttttcaccgacattttctctccaaaattctgctggtagggcctgaaaccattaaaaaaaaagtagtgaaaaagaagtacaaattgagggaaagaaaagaaaagtggttaagaaccagttcaaaggccaaattttaccaactcatatcgatcatgcagatgcatcttctttaagacaatcttaaaatatgggtattgggatgttaagtttgtcatcctaaataaagcttcatctttttcttctacagtcatcgatctaaaatgttcttctactctactaccaccctttttggcaagagccttaagcattcctgtatacataaggaaacgataataatgaacaagaaaacataatgttaattaagcactaacatgtaattatacataaaacaaaacaaacctgttttgttgacagactcaacacactctgaatctcccatgtttacttgatccttaggtggtgctgctgctgcgtactcgtcatcatcattgtcactactaacaaaaagctcttttttccttctcttgggagaagaaaatggtggtgcaagtttctcctttctttttctgttaaggttttcatgagagtcaaactcttcatcttcttcttgagctacaataatattggtgggatttaaggtaccatcagaatgtttggaagtagtaataactacagcaggatagcatatctctgaaccatttacatcgattatgaccacatgaaatctagattgaccttcatatctaaaaaacaaggaatatccacgttctatggagtaatgccttgcaaagcttggccaaccttcacccagccaaatatggccatcacatttggtcaatttcattttccatgctccaccaccagggactttcaccactattggctttgatgtatcaatattactaccatattttaccataaactctttgggaattttctgtagtgcaaaatgagaaatgttagctttaatttagtaagaaaaaaaaagctaaaaagtaaaaacaacaagggcaatgagagaacttacaagtttattgtcaaaaagagaatcttgtaagatcatcctatgaaaatgaggagtatcaggacag

SEQ ID NO: 162281 - DNA, 7179 bp, Cannabis sativa
ttgtgatccaactattccttttgcaaaaatcttcaatagagactatcttgttcctttttttttttccgctcttgtttttgaaaaaaaaaagaaaagaaaagaaagaagaatctcttcagaattttctttaaagatacattggtgttgattatgtttctttatatttttgtcttgtttaacatttgttttcgcaatcacgatcatcatagtggatgtgtgcaatactttatatcttttgccctctgtatttcatagctactttggtgactacaaaaaattgtaggttgatgcatattccaagctattcataataaaggatataactgagctaataaacttaattctcccatcttggaaaggggtgcacttgtaaaatctgaatatactcagctcaaaaatatattaattttagccaactttcttaaagggattgtgtctaatggttctccttgaggatataccattttatcactatagtttactaatgaatttacattgttatagtttcaatactattatcagccgaagaaaaacaagattaactaaaaaaaaaaaaatcaagttacacacacaacaaattagagttcattgttagtcaaaattaatttaaaataagttatttgttaaagtaatttatgcctttattaaatgtttaaaattatttcattattttcatttttcaagtagtgtgttttttcacaattattgaaaataaatatttcaataagtaaaataatatctttcccaaaagtataatatgctattcaaacaatttttttttgaaagactttaagagtgtaagattaaaaaaataatttcatataaataaaggtgttactcttattaaattgactaaccaaaagttgagttagtaaatatgtttacttatcataaaacaaaggtgttatatatttttaaaacgatacatatgtattaatgtgtattcattttccattacaatgacaatgtaataagtattaattaggatatcccaagttgtctttaagtaaattctgcaataaattgattgaatgcccaaaaaaacactctgaatttgagactgaaaaccaattaaagactgtttttgttgcaggtattcaagaatgtgctggacaaatatttgagagttaattttgtttagactttagtagcagggatcagatgaggtgtctgttgaggcacaccactttaagcaaattgatccctccagaatcttaaggtagaaaatcgatgcatattcactgtagaaccttttcttctcttgcaagatattctattattattattattcttgcatgtgatatatattcaccagtttgtttattttttatttttttggtagaattaaaatcatgggtaactttgactagagctgtaatgctgtatgagtcagatgtccacatgatatctaacttatagatgaaaaaatctctgttcagttatgagatcaattaatcagaaatttcttgcagtttggacagtgcatatatataacttcagtttatctgtcatggaaaaaaaaatgatactttatcactagctttcttcagttgtttggttttttgtttaatttgaaatcatttgaggtttaggaccacaaacagaataggtttggtagaataattgaggaaatgatgtataatgtaagtataggatagtacaatatatatgtgccttataaaatctggaatgaaagggacattaaccatttgtggtttaagaccataaacatgatgtttctctctttcatttcttgttagttgattgacttaatctaattaaacttattggaattagattagaaaaaagcaggaaaaacatcatttaagtttcggattaggaattggtgatgcataaaaacatttaatttgaagggaaaaaaggagagaaaagcagagaaaaggaggagttgggtaataattaggactggaaggaaagaaaagaggcaaaaagaagttttgtggagaggcaagattctcttgtggaagatgacatatgcgagtaagttgtgaaaagtaaggaggagggaatagaagggaagcttttagtttgtctggttgtgcagccaaagtttttatatttattaatgtaaaaaaaaaaaagaaagaaaagaaaaagtgtctctttttactataggcaaatggcatatattgtaccttaaccctgcaactaacgtatttactttctaaaagcttggatataccataaccacccaagttcctcctcttcctttcgttaatccctaggcctttttctatttaagtggatatactgtgtgggggaaaagaactttggtcaccccacttcaaaattattgacattattttgggctacctgatttagaaaagaagaaaaatgaaaccctttttataatatagttaaaagccttaacttcattaatgtgctatgcgatgcatcaataatttttctctttgtataatggcttttatttaatttctttataatcaggtaatctgaaccagagaagacagtttaatatcaggttcttggccattcaagattatgttaatgaatatatatatatgcaattatctattggcttaaaaggtattaaatttgtaacaaaacgctatctgtttatagatatgtatgaggagaatatgcacagaaatttataaagggtgtaatcaagtgcatagaagactcagaattttgtgttttttttttcatttttttttttttttcaaagtttcaattgagcatcttttctataaccgttgacatttaccatctttaatttttcttcttttcttttctttttctttattgttctttaacttcacttactgtaataactatattttctagaatttatttatttttcttggaccaccaccacactgagcacaaaaacacacacaccatcaatcagtttgcctttctactcatgcttacaacaaattttacaacttctctaccccatctttagaaaaaggctctaatcaagttcctttgaaattcatgcaatttctaaaagaaagtaaaagtgaagagaaaaagaatttcttgggaaaacctcattcttgaattagtagggaaaaaaaacagaggaaaattataaagaaagggagtttctcaaatttccaatccttattgctcaatagttaatgctcccgtggttatgatatgagctggaaatgatttcatctttcaatattcttcattaaataacaaataaagtcataatgataatgacctctatcaagacaccccctttgagttttcataattctttatacttggaatttgatttcatcttatcagtgtacaaaatatatattacattacgaatttacgactagtccatgtgataagtgtgattgggtttgaagatttctctattaatgtacttatatatatattaactaaatgtgacacagttttcttggtaaaaaacaatgacttgacaagttttgccatttttttttcaatgaagttgacaagttttgtgattgaaatgtacaacttgcttaacatgatttaatcaattattattaaaagaaactatcttatatactactttttaagtttttttttttaatttacagttggggttattctggtaattttatgtgtattgttatataaattttaattgtgatttaggttgcttcattaatgttaattgctataagaatttttatgtgaaattctttaaaaatactaaaaaatttgttttaaagtgttaaaaaaaaatctattattattattattattattattatggtatattgtagatatacacacatttcacatattttttttaaaaaaattatgaataatttatagcataaaatataaagtttaaaataagtacttgcaccattaaaaaaatgaatactacttgaaaatgtatacaaaattatttgtgaaactgactttttgatatagtaaatttttttttttttttaaaatgggcaaaatatgtctaatatataactatgtattatatctcataaaaaacaaaaaaaaaaaactataatgtattgtcatatatatacaaaaattgaattataatttcttaatatgtattgtcatatatcatgttctttttcactatagctatcaaattgtaatcccataataataaggtttgataattaaattaatgttatgagtttgatttattttgtttttttctaaaaaaaaaaagagagaaaacacgatgttcctactcattctttttttattcatttttttttttattttttgcattatttatacatgatctaaacatatatatatatatatattatatgaacacatatgtaaataaatatatatatatattttaaagggtatacacatggttgtttaaatttcctattatgaaacaataacttttgaatttccttttgcttattcatttttttcctttaaaatattgtataaataaatattggtatatatgcactataaaattttttatttttagtcacaacaaaatttgtaattagagataaaaatgttgtggctactaattatagattattattattgtattgtgactaaaagtattagctataaaaattacaatttattgtgactaaatgtatttttagtcataatatttattatgactaaaactaaattagtgataatttataattaaatattatgttttagtcaaagtaactttttttttagctaaaagtctcatttaattacaaaagatttatattgtgactaaaaaattattactaaagataacaattttttgtagtgatggttgtttaaaattcctaccagaaacaatttaacttttgaattttcttttgcttattcatttttttcctctaaagtattgtattaataaatctcatgattcatcccacatcctacatcgcatgtatatatttatatatatatatatatatatgatgtttatctttttctataggaagaatataattaagtttttcaatgatagtacatttacatatcaaatatcaatcaattttttactatagtcaccattcatgcataaattaaaacataaaatatgtgtatttgcttcctagagaaagaaacagaagccataagagttattaataattataattaaaaaagaaaaggaaagaaataaagaaggtgggtcgacgtgtgtgtctaaaagtctaattgggatgataagggtggagaaacttccaccgagaaagaccaaagttagaaagtagtcaaaatgtggatgttaattaatgtcaaatttagacaacttaaaattaaaatgtgtatatattatatataaatatatatattatggtttggtttagtcataatataattccaaagaaattaggcttattactactaatcaaaggtgaagctatcgcactatactattaattagttagtttttaaaaaataatataaatacaaaacaaatactatctgcagtgtgtcaacatcttagctagggttcaatccccatagtacaaggtatggccccttctactcatgacaaaatatttacagcaataacaatttcttttaattgaaccgtttatatatgtatatatgtatatatatatatatcatattgtacaagttgggactcgaacctattattatacatcctatcctgcaatatatattaattaatcagatgagaaaataagaacatagatgtgtatgtaacatataaatttatatgtgtatattagcaaaatgaaaaaagaaaagtcattaaaagtatatatagggacacttttgttttgggtatagtggtcctatagctagtataggaaatttccatttgctactttacttgcaaaaggagaggtcgcatgagtaagttttttttctgtaacaaaatgacaattttttaatagcatttctctatgtttttactatacaaattgtaatgctaacaaaaagaaaaaagatctcgagctttagcttttaggataaaatttcaaaagataacaaaagctttttaattgctttgatacaatgttagaatttaggatgaaacagaattttatataagagtaaaattaatactctataaattttatatagatatttaatttcaacactgaaattatttttaatagttttatatgtaataccgcgcatagtttaaaatttatgtacatgctgattagtatagcataccacgtacgtagtttcgttttaaacatgtgctctgagataaaaatatacattgtacatgaaaacatatatatagatacagatacatgtagtctaccatatacatatatatatttatagataaattggggtaagcttatttatttgaagatgacaaacacatataatacatccattgaaaatacgacaagttgtagggtactttataacactcaagcttaagacatcaattattaatttcagaacgaaaaaacgtaccatatatatgttgttcttttctttcatttttaaattagttatgatattaatataaaattaaagagaattacttcatatactatattttttatttatttttttattttataacttaagttgttttggtgattgctatgttattatgtgaattgctatgtaaattttaaattactcttaattgttaaatatgttgctatgtaaatttttgtaaaaattaaaaattacaaaaataaatcataaaaacctcgtcatctttatttttaattatcaaaattactttacctttattaaattttaatatatatatattatttgttttaaatatatacaacattaatacatatattctcatttaaaaaaaaatattaaaatttaaaacaattaataaaatatatttagaacaataaataatgagaaatttacatgttatactaacttttgccatgcatttttttacaaaaaatactgttaggcggtattttttacttttttactgtgtatttttataagtttcatactgcagtatactatgtttattttttggtttttttttgtttgttttagtattgttttacaattgttttccataatttatttttttaacgttgatttgactgttcttgttccatcttgctggaattaatgattgttttcagggtgttctcgtggtggttatatttgtagtgtggaagatggaggctataaaatacatttcttcttccttctctatggttattttgtggttattttttattttggttctcctaaaaatacatttgacgagct

SEQ ID NO: 162282 - DNA, 4311 bp, Cannabis sativa
  modified_base (3436)..(3454): a, c, t, g, unknown or other
aaaaaaaaaaaaagagaaaaggagattgtcctagaattgtacctaaaccaagatactcttaaccaaaacatcaaaaaccgaaacttttcttaaacacaaacactcacaccgacctaggccaaaggagaaaaaacctcagtagagccctagatctataggtattccccctaaggttcaagcgaacccctttcatacacatcaaacctcatattcaaacctcaaccctacacaagcaaaatagtgtatttctacaaactaaaaaccacatttcataatcaaagaagaaaatagtggtataaataaaaagaatacttacttacagatggtttacagaagaattgttgattgcttgcggttgttcaaggtcccacgggccgctcaatggtctagttattttcctggacagaactcatcatctgtgcgagcttcaatcattggaaaatctaccaacaaggttagaaaataaaatgaggtttcaagttcagaggagtttgttagggtgagtgttcttctggttcgaagtttttcctgaggaagctctgtgggttaaaacttgcacattaaagtgacaaagaaaaaaatgaacttctttgccaagtttttcatttatatggatggcaacgacttagtaagttttgaaatatacggtccaaattatctcgatcaaaagctgccttatccaataactggggactcaaagagtttgcatttaatgcacctggtgagaaaaaatggggtcttcattacttatcatttcatgtagcaagtccaatgcagcacaaaccggctctcttttcatgtcttgtcgccattcactgtctataaaagacgtgcctaagcctggcacataatccccataacttcacaaaatggatgccacatttgaacaacacgatagttgtatcacatgatatatcaactctttagttgtccaaagtagtacaaaaagttgcttccaaatttcaagatatgattggcatatcagaataatagatcaagcatctagaaggaagctggaagcttcccatcattcaagagtcccaagagcttgggggtaaatattatatgcattcccagatggctaatacgtggcagtcacaaaggagtgccactctggatgatccaagattagtatatgctgactgcttggagatggtgaaggttaatatattctagaagccaattaaaggtccccaatgttagcgagtacgaatagtgctcaaggactcttattatccatctgtaattgggaaggatcagagttctctgaagctttaagtattccagaaaaggtagtaggtcagtgtgattcgggaaggctttggctcgttaataccagagcttattcgatagtaccctattcgaaacccagagcgacatttacttaccctctaacatcaaattagatcatgttccctgtgtcagaccatggcaatgcgcatatgtgccactgaagcctccttttagtcgaatggcttgtctaggcaataactttttaaggtaaaaactttgaatgatgtgtgtccctatccataagagatccttcagtgtagtcgtacacaacacaatggggaagtttcctatcaaccaatggtcagattgtcatgaacctgcccttacagcgtgttgagcatgaaaccctaggtcggtaaagggaacacccttatatccacatgtaagcatataaatatcctcattatttatgtacaaggggtgaataaattgatactagccaaatctattctaaaattccttctagctttcttcttcatcgagagaaacgaaaggagtacagagctatggtttatactacagacagttgaattattcaaacacttgcgtaaaaggccaatacaactgactcgtggactagtgattgttaacgctccaaccatgtaaaaattatttatcttttatttactattttactcctttcttaattaagctctaatttattagcttccaaaaatctcaagttataataatgtttttgtaaaactctataataattagcattttgccatcagatgttaaatattgtctttactgaaatttctagcttattcccaagactaaatggtgattattacttgaactaaataaggaaagagagagttttgcttttttctaacttagagataattccaagtttttcttatttagttcaagtaataattagcatttagtcttaggaataagctacaaattccactaaagacaacaattaataacttatgggataatgataattttttccattcttcctcttgaattaaacttataacctaggggtaaatggtctaaaactatattcctaaatgatccctacattctaaatatctaacgttcttgtcttgataattctaagatacttaaccactatctactctaatgggcaaaccgacgtatgacactatcacagagagcacaaaacacaaaaaacgtaaaattttacatacaacatatataatacatttagaatttaaatatatctccataattaagatattatttttatatggcctatttttgacaataaatcctaaaccctactaaggagcacataatcataaattaataattaaatcatttattatcttctaattctcatgatttaactatctagtcattacatgcatccacttccattcaaaagaggctaatttgaataaaaatatagaataataactttaaaagtttactaggtaggccgagctcctactaaaccactataatttttgtgtctatttacatactcgcacatatattttaaaaaatattctggggctttgttcaattttaactaaggaaagtaacaatattacataaatacttctacctagctaaataaataaatatacaacttaaataaaaaaaattacacaaataccacttaaacacaccttcaacccaggatccatgcttcctaggtaaccatcgcgcagccacgcagcaacccaatgtaattgaagcaaaaaattcaaccagaaagagaaccaccattaattcaggcgacttcccatgagaagtcgaccagaataattcaaaacagggacttttttgaattttataaacaaaaaagtgtagaaaaactactacgaaactaaaattcaaccgaaaatctattttaatttgcataaaactaattttctgacttcaattttcagatccataaaatgcagatctcaaaaagttgaactagatttcccaaacaatccaacataagtataatccaaaaacacttacatcaatattataataaaatgtttatcctggtgtattttctttaattttcaattgtaatagtgaatttgttcatattaaatcatgaagagacatgtagatagagttacatatgtggaaacactattttgatttttgatgtatcataacagttccattacagtttcatgaatattttgctaacagttatttnnnnnnnnnnnnnnnnnnntctgatgcaaccttcagccaaccagccaccttcgtctgatgcaaccttcagccaattaccacccagctactatcgtctgattatgtaagtaatagtatcagaggtattaatttttataataaaaatatataaaaggtataaatattgtccacaccttatagaaatattttttgtatataaataaagtatcaatttatatttctatgcaataattccaatattcttttagcatttgctaacctaagtactcaaatatttaagttgggtattcaaattataacatttaaatattcacatattattagatttattttatgtcgtaaaattattagatttaggaattttttgtgttgtacaatacatgttatacatttttttttgtaacatattattagactttgatttttttttggtattgtaacattcttattctaattttttttatgttgatatacttgtccatttatttaaatctacttctatgaaaatattaatgtgtattacaatataattgaataaatatatatatatataaattaaattcaataaatttagatctataaatataatttttttcaaaataaaaaaaaaaaatataagacttaatgtttttggttattatggaaataacccaaggcgaaaatccactttgccttcaattattaaaatatttttctctttaactggaacatcttcggtttcgagtttctttagaaagacaagacattccagtaagaaacccaaagataaaagtttataagaatatttttattttaggaaatatatttctatttaaggaaataaatttctatttaaggaaataaaattaatatttgattttctgataaatgaatatt

SEQ ID NO: 162283 - DNA, 4345 bp, Cannabis sativa
  modified_base (397)..(406): a, c, t, g, unknown or other
  modified_base (1041)..(1044): a, c, t, g, unknown or other
  modified_base (2195)..(2207): a, c, t, g, unknown or other
tactacaactgctgatatataaatgttatataaatatatatattgtacttttctttcaccaatttgtttggtctagatgaatctgatattatatgtctgcctggtgctgatatttttgtatactttattatatgtaaatgcacatatatgtatatttctatttcaagtcaatcctaacatctagagcatattgttctatatatatttgagtattgttttttgttttggtcttgtttcattgtcatttttggtttggataattggtcatttgaaccaaaaactcagccgagagagagagagaggggtacctttaaacaagagatgtaacgtttgctctcagctgtgactgcccatcttcttaaggcatcacaatactcttttattattattattattnnnnnnnnnnttattattattgttattattagaggagtgctactgtcaacctcctgttacaatctcttagtgaacctttatgcccaaaaaattattttcaattttttctacggggtgttcgttatgcttacaacattattcctgtaaatttttgaaaattttcgaatagtttacagtgctgaaaatacacttgaagttgtttgaacgcgcgtggtaaactagaatatcaggaactctattttcggtacagtaaactattcagaacttttcaaaaatttacaggaatgatattgtaactataacaaataccgctatgaaaaaaaatatcttggcatgtgttttcaaacgtgaatgttgactaaaaagttgtaataggaggttataattagcgattataatagaattgagagtagttcatcatctatcataaacgtagggactactaattcatgtacgactatattagatgtacgaaaaacatatgttaaagaataaatactataaaaaatagttacttttaatgataaatcttttagtcacaacataaaatttttgtcactaaatgtaatttttaatcacaacaaaatgttacttgtgactaaaacataacatttaggtaaaaattgtcactaatttagttttagnnnnaacaaatattgtgactaaaaattactactatacaatttcttagctcataaaaactcaaatacatgaataaaaatgaaaacaacacaattatttatccactattaacgttaggatcactgtttttttctctttccaaaatttggaacaaattaattcattgtttgcttatcattttgtctagtattataacagcttaccaaggatcgttgacaaggcaatttcaggatgttatttttgcaaatttcaaatttttgttgttaatgagccttattcagacccatcttaaggggccattagcagtgagaaatactcttttcatgggctagctcttgtataaattaagaaatacctcttttttgtatccattaataaaaaaatacccttatattttattttattaaagtctatccatttttatgagtaggttgtctaatatatccttaccctatacttaagtatagcacataatttacattaatctaaggagtataatagtgatatcatctacaaaaatgtgtatatcttaaagaatatgaaaatgaaggaaaaaaattaaaacaaataaaataaagtggacatacaatgtaattttgaaaacatttccaaagataatgggcccagaaggtttatggattttcaaggaaaataaaaagaggaaattagactctatatcctttttaaattgttctcttttatttttaccctcttttttaaaatctattatttttacctcttttttaaaatctattatttttacctctttttttaaacattataccaattttacccctgtcactccaacatattctccatatgactcttatgtcagggtattttgggtacaatacataaaaaaagaggtatatttcaattaaataaaaattagaggtaaatttagttaattgattaataaaagaggtattttttaacttactcctccaatccaggataacaagtgttaacaagagggccagtcagatattattgaaactttgggcttttctttttatcaaacaattataaaggaaattatatggtatacccattttactttacttgttttaatttttacctccatttttatatcctttaagatacccacttttatagatgatgtctccattagaccctttaggttaatgtaaattatnnnnnnnnnnnnngtagagagtgagggtatattagacaatctactcaaaaaagtaggtatactttaataaaatataatatgagagtatttttgattactaaatacaaaaaagtgatatttttcaacttatcccacaagacaatttaatctattctataaaagtgatatgtttgaaacttaattttaaatattaaggccttgttggaccttgaatttaagaggataaataaaaagaaatccaaaggatttaattttctcaattcaaattaaaacttgagtatattatatatttatgaaatttaagccaattaaaaaatatatatgaaaaaatttcaaaaaaattatatataaaaacgtagcaaagaaaataaaatgacactagcctatgtctcatatcaaattttgtttttatgaagtatgtttaataaagatttatttaatactattttttttatcaaacacgattttaactctttgattagcaaaagtttatacaataatgaaaaaacaccgtagtgtacttaagttagtagggcgtgatagttgactcagtcaatttttgtcaaaaagaaagtacccatccttttactttttctcaattaaattatattttttttttctttctaattttgattatgactctattaaattatatttttgtctgatttccatttatttattacattcccttctctgttttatatttttttatacatattattcttcaatttttaggtgaaaaattagattgctctttgtataatctaccacaatatatttcaaaatactggagaacagagtagaggtattaacaacgactttatgtagagttattgtttttaatatatgtcattattttattttatgcctattaaatattttttttttaattatttgttagaaacactatcattcctttttttttcaaaaaaaaaaaaaaaaaattattattcacttctctcttcttctcctccatctttttttctaaaagtttttaaaagttacttattaaagaacctaaactataaccaaaactaagaactttgatatttttttgaaaagaaaaatagaggttgagactcaaaaattctctaatggcaaaactaactaacaatgcaatttttttttggtacatatctctcctctcaaatcatatcgtaccaaaaaataatttattttttggtggatacgagtatttttgagaaataattataaaaaaaaataaataaggaaataaaattaaatatggacgtaaaatgaaacaatgatacctatttaaaaaaatgactctatataaagtcattttcaataccactgaagcattatcctatactatattgatgtggaagttagtttttagttttcaaattaaaagggaacttacaaagaaactgtaaaatgggagaaagtttattaaaatactgtgacacgaaatgtgttacatttttactacaccaacatcataaaaatattgtgtttaaagttttaaaattacaaaatattgtgttcagtaaaataaaaaaacaactcaaaaataactaaaaaacaaccctagaacaacttaacaaaaaactataaaacaacaaaaatataattataaagcaatagaaaaataacaaaatgagcaaaataatatcaactcttcaatatgtttttgtattataattgttctcacttagttttgataacttgatttatctttttgtactattacaatattgtttattttttcatagaatttatttttacaactttattctttcatttttttctcttttcttttataagttagtgacagttaaagaacaactataaattgaaaaataactaaaaaataacaaaacaaatgcacatatatacaacaaaaatattgtctataataaactgaaaatataacaataaaaaatacacataaactaaaaaacaactgttaaaaaaataaaaataacagaaaaataactataaaagacctaaataacaatataaaaataactataaaatagcaaaaagataactataaatcaacagaaaaataataagacattaaccttgttaaaatgtgcaaattattcataaattaactctgaataaactacaaaacattcaaaaaaatatactacttttattaatcatataaaagatagaaaaata

SEQ ID NO: 162284 - DNA, 1490 bp, Cannabis sativa
  modified_base (132)..(132): a, c, t, g, unknown or other
aaataaaataaaaatatactttacaaaacacacaattttgttttctgattttaaaattgaaaaataaaaatggtcacgcttttttgttttttaaaaacaaaaatttattttattttatgattaaaaaattanaaaataaaaatattaccaaacgacacatatattaataatgttatatatatatatatatatatattaaaacgatataaatgtcatcttcatgtaatgtagtggatcactttgtctggtttacctgattttttttttttaaaaagaaaacataatagttaaagataattaatatataatatactaataaacacctggaccatgagatctagatttgaaggattcgactaactattgtccaaaatagttacaccaagagagtgaaaacttctgccataaaaacgaaccccaaatataccgtcacttaattttttatattacatgttaagagtatttttaatggaaatgtacgtaaattaatgatttattattaaaatataatttattttgtaaaatatttgttataagatatagtatgtcaaaattgattcaaattaaaatttatatcataataataaatgtattacttttatatttacttttgtagtatttttaatattttattattaaatttaattattgcattcaattataaactttttacatctattttttattattttacatatatgataaaattaataataaaattatcaatttttatatttttgatagaaacattaattaaatattaaattttatattaatttttataactgtttattggagcacaatattaaaaattaatataaataaattacaaaattattttttataccaaatataatataaaatgagtatcattttaatttctcacatgttttcattgattaggtaaatttatatatgcataaatacataataataataataataataaaactatagctagccaacatcacttaatttgtaattacattttataacatgtggcttttataacagctggcctggacataaaatagataaatatataattaataaaaaaaactacattttcatcctccaaaaaaaagctgaagaagaaaaagaagaaattaaaaatatgcaataatggtgggctgtgcaaatcttgaggttcacgaatgagatcttaatataacattataaaattgagattctattcaacttatataaatatatgagtctcttaattacattattgtatatacgtttattttaggaaggattttgcattttatataaatttatatatatatttataagtgcatgatgacagactaacaaccaacaaactgatcatgctatatacatatatataacatgtaaacataaaatgaaaaggacgccttacaggaaccatgtagctcttttttttgaaaaatgcgtttataaataaaataaacttggagttagacctcatggtcattacaaaagatattaacaggtatagtagatat

SEQ ID NO: 162285 - DNA, 2812 bp, Cannabis sativa
aaaaaaattcttacatgaaatagtaaatttttaagctgccatatagattttactacaactgtttgtacgtttcaatgataacatttcatatatttctttaagcgtttatttagtaatttattttaaatttaaaggttgttaaaacatgaaaaattgctagttatttactacgattatgaaattgctcaacacattgctttctacaaaagaataaagcccatagaactagttgccacttggcaaataccatcactacaggtcatgttacaaaagctttgttatactttgttattttctgttttagtctgtcaatttatataaatactaatgtacatcattcataaaaaattattaaaaatgttatgactgatgagtacattttttttttatattagatcaaaactgcatggattttattgggaaggatatattaaaaaataaaaaaaaaattgacaaaataataataaaaaaacatgaagcataaaaagattctcttatttcttgtcggataataaattacattatgaaatggaaaacaacacttgtatttatttgtccacatatataagaagcaaacaacaaaatataaatatcatataacaaacaattaaacacgtgcattatgaaagttgaacattttgaaaaaagcaatattaaatttgagttttctttttatttttgaaagggtgttaaatttttggtttgaaattataatacttgatactactcaagttcccatagcttgaaagatccagctacaaaatcatagtatccacctctaagtgttatctttttctcttcaactcccctttgaacaaatgggtaagaatgtagattctttagagatacatttactgcttcctgcatatccaattaattatttaatagtaatatattagggtactattaattactaagaatatttatgtatcattactatatataagctaattaattagatataattattacctcagcacatatttcacattgttcttcaaatgacaaattcttgtgttcaactatgactttatccttggcagcttgagctatgctaacccaatcatcaatgaagttgctataatttaataatcaaaccaattagttaaatcactatgataagtatagacatgactataaatatataataataaaccattaacagtaaaaataattataaaagtttcattcttacaagggagctgaaccatcttcaggatgagacataagcctctttacaccaccacaatgactatgcccaatcactaaaatattctctaccttaagctcttctactgcatattcaataattgatccaactccagagcctttcaactaggaaattataataataataacaaagattaattaaaaatataataaattaataattaacccattaagattagataatttaaaatttgactaactaataataattaattattaaataaattactttgttaaaacttggaattaagttgtcaatattgcgggccatgaaagcttctcctggttgaaaatttaaaatatgggaaggactaactcgagaatccgagcatgcaaacaccaaaaactgttcatttgatcaaaaatttataagatcaaccaaatatagatcacaaatattaacacaaaaaaaataattaattaggggtatatgtacatacctttggatgttgagtttctttaagttcattaaacatgcatggatacttgctgtaaattcatcccataaaataaagtaattaggcacatatttttattttaatatattattattattgaaacgtttaatgatcttaatattaattatacatatataatcaatttaatatgttgtatatatttattaattaatccttactgaaatttattagagagaaagtgcttaaatccatggacaattttctgaacgggatcaaagcaatcattgagatcttggccaggacacacttttccaaaggtttcatcttcttcactttcactttcgctttcactttcccttttggccttctcactattcaattaattataaatttataattatacaataattgttatattactatataatgtattgttcaaaagaaaacaaaacctacaaatgactatatatatcataggaaaagttttaagtagaggtaatgtgtgggagtatcttctattaatagagaagttataactcaattttttatgtgacaatatttataaattatagtatcaatcttgtacattggagacatacgaaataatttgtaggttcaaaaatagaatttaaacagtaaattgtgcaataaaatatatctttagggatgttaaaaatagaaaacagtatccccataataagagcaagtgatccatctaattaagaagttacctatatatttacatatataacatatagctagtatatatagataagaattaattattacctggtgatcactagattctttttcacgctgcattcatagttggccaattcagaaaactgttcttctgccattatatttgtttctcacgtacaatttatatatatataattgttatctgcaaattcaagcgattattgttgttattattattattattaatatagattactgggtaaagatgagtttatatatacgcatgaaaagaatttatttagaactaattataaaatgtaacaacatatatatataataaacacatgcaaatgtatataatgaaccgcatatataaatatatattgtacgtatatatataataaggtgtctattatcgtcccatgatacaaaccaaaaaaaaaaaaatagaaagaaaactt

SEQ ID NO: 162286 - DNA, 821 bp, Cannabis sativa
ttaaaaatgtcaactccatgcacacactataccaaaatctacaacaaagtacactttcatttcattgattaattaattagtctcttcctaattaattttcttttccttgttttttttttcaacaaaaagaaaaaacatttatatatgaatagacacacatgagattcatgattattgttcattaatatttgttttatagttaaaatcagcaaccaattacctaccaaacatatctcatcattaatttgggcttcactacgtattaaatcctttctaataattagtaggaattaacaacacaactcaacactccaaaataacgaattaataataattaatcaatttcaattttcttaatttttaatataataattaaattgggtgtaagctcaacttctgaccccaactcttcatcttaattttccttgtgtgttactctaaatgtataagacaatttaattttgttatataataacaataataattattagagttggtgattgatcttcaacggtcatatagattcagcacatgtaatcttaggtaatccactcttgttcaaccaaatgttttggtcttctcttaaccccaaaataataatacaaaaatgtatattcttgattaacctatatattatatgtaaattaaaacaaatatgtcttaggagaaaagccaattaaacttattttatgctaaaatattcaaccccaaatactacataattaagtacatgtcatgagtacttagtataaaatgttttttttatgctatagttatttgggtacatatacatatatttaggaaatttatatagtacacat

SEQ ID NO: 162287 - DNA, 1336 bp, Cannabis sativa
atttgttaagtagatttcataacaatttttcttcttgagatgcggcaggttatgcgagacccaaatggagtaagcaggggatcagggtttgttgcattctctacacctgaagaagcatctcgagcagtaagttaataattccggtgtaaaaaaaaaaatggacacgtactatcataataacgtttcattcctgccaagataacaaaattatataataccaatttctaccttgttgctagctcttggagatgaatggaaagatgattgttagcaaacctctctatgttgcgcttgcacaacgaaaggaagataggagagctaggttgcaggtattttcagtttttcccttcctctctctttcctgttttgatattttattattatttaaacattgctggttttgtggaaactgacgggtgggttattgtttattgtacaggctcaattttctcagatgcgacctgttgctattgcaccttcagttgctcctcgtatgcctatgtaccctcctggcggcccaggtattggacaacaaatattctacggtcaaggcccacctgctatcattccttctcaggtgacatttcagtggactttcttcttttttgtttttttcattgctgctattagtttggttggtattcttacattggtttcttttctttaaatatagcctggatttgggtatcaacagcaacttgttcctggtatgaggcctggtggggcaacaatgccaaatttctttatgccaatggttcagcaaggacagcaagggcagcgccctggtggcagacgtggtggagctgtccagcaaaaccagcaacctgtttcattaatgcaacaacaggtttgttgtgctgtcttgcttttcatttctacctgtatgaaatgtttccatattttcatcttgaagatttacttttaataacagatgcttccaagagggcgggtttatcgttaccctccaggccgtggcctgcctgatgtcccaatgcctggccccggtgttgctggaggaatgttttctgttccatttgacatgggtagtggtgtgccaatgcgtgatagtacagctctttctcagccaattccaattggggcattggctactgcccttgcaaatgcttcaccagagcagcaaagaactgtaagccattgcttgcttttgcatgttgaataatttttgttacttttttgatgcacctcaattcccttttcctctgtatcattctagtgagatttaactaaatttttctcggtcgaaatctgtagatgctgggcgagaatctttacccactagtggaacagttggaaccagataatgctgctaaggtca

SEQ ID NO: 162288 - DNA, 4466 bp, Cannabis sativa
agatgacaaaccctcccattgattatgatgtgtttcatcattgagatacactggtgtagctgaccaaacaaagaacccaccaggcctaagaatcctattgagctccaacagtggttttccaccttgtaattttcaaccaaaaacatcaaactaattagacataaaaagataaaagagttaaatgaatagaatgggcttatagtaattaacaaacacagtaccatccatatcccaatgaaccctgcatcgtgcacaatggatcaaatcataagcattgtctggaaaagtcagtttttgagttccaatgactgaaataatagcaggaatgccacgttctagagcaaattgtatctgagcttcatgttcatccttgggagcaaatgacatggtgaggacatttttttcaagcaagtatcccccaaagctggcaacaccacacccaacatctaaaataacccttatgttctttccccatttaataagtggcgaagtctgaagtcaaatcagtacaatcacaaaatggatttatatataatatattataatttttgtctattgtaaatacatgatgttacttacctcttctatgaacttaacatagttatctactccatccttgaattgggtaccaccaccagggaaaacaaaataatctcctgatttacgaacccaattttgctccttcttgtactcaacaagctttgcatgtggaacattatcataccaaatctaaaagtaaaacacataataatgtgaccaaaaccaattccatattcatatgtatgtacccttttgttttaaatatccaataaacaaacaaagtcttattaacaaaatactaatctcaccatgtcgatgctcttaggccagcgaaccgaaatccggtaatgtctaggaagaggcaccaaacaccggggactgaatttgggacaatggcgctcgcggcgctccatgtgcctccggttcttcaaggcctttatagccacgaaattgtccaaacatggtatgtaatcaacggcaactggaccatcacagagcttccattggagattggactgtacggacaaagaagaagaagaagaagaagaggtcgagactgaagggattataattggagtagtattattatcagagtaaaggaagaaagggttgtctgtggtgctggtgtagagtaggactagaataatggtgctgaagagaataaaaatggatgagaattttctgtctttcaatactttttggacttggcttcccattttttcttttttttgttagcttgaatcagaaattggtataggtgagaatgaaacggagagttgaatgaagattatttgtttaccatgttttgtgaagaaaaatatatttaatttttttctataattaggctcatttttatttcgacgtgtaagctctctaaattccaaacgaaaatgagtctgaggatagatgaggataatagttatcctaaggattcgcgttcgaaatgccgttatctgtgcaaaagtaattaataaacaagtacatcgttattttctgcttaagtaaatctaatgaaacgcaacgttgtttgttgtactaaattttgtgttttgtttatgattattttttacaacttttatatgaataaaaataataataataatttagtactatggcctttttcgaaaaaaaatttgtggtagtgaatgaggtttaagtaaaatggacgtttgtatcccaatcccaaaggcgaagctttcatcaataaatttaaaattttctgatctttcttctaataattatataaggtgtcgtagcaagtgaccattaatagtggtatgaatgaactatatatataccctgactcttgttgaaataaatagataataattattgattagttgttgtagccttgtagttgtaggtactttttttcaatccaaactatgctataatatttgtgttgtgctctgggaaagatacaaagacttctttctaaaaataaaagaatttgttaccaaaaattgaaaaatagacacacccactaaatttaaatcagactaattttaattgaatgaattaaaatgatatctgtttacaataaatgataaaatatcgatttatactttttgtgtgaataatatgctcactttttaactaaaaaacaacatttaaatttattttttagttttctttcattattttttagttcctgagttaaagtgagtaatttgtgcattattatttgtgatgtcagctctatctggaattaagaaaagggtgtgaaatttataataaacttttctcgaaaaattagtcagaagattgaagtttaacaaactttctttcattcaagaaacacagataatgagataaactttttttattaaagtttaaagccaaatatactcagaaaaaaaaaaagtttaaagccaaatatttgtgttttggaaaaatacaaatgggaccaccattacaacttaaactcacgtgaagtatatttctcttcatctcttcatcttctccacattcactctcagttacaggacttccattaatggagagaaagctagtacaggtctccgaccaagaggtccgcatagacttcgcactcaactgcaaatgccgcgctaacgtccgccttacctccctatgcgccacctctccagttgcattcaaaatccagacctcttccccacaaaaattcatggttaatcccccaacaggactcatccctcccttatcctacgccactttccaagtcattctcaagcctcaaacccaactccctcactcttatcctcgctctccttccgaccgcttcctcatcaagaccgctctcttccccgcctctgcatctccgtcaccgccgccaaatcccgactccgtcaactcctggttctcttccaggccaaatttatccactcaagaccataagcttaaggtcgcgtttgttggccccgttctcctccgccgcgccgtctccctcggagactgcgacgccgccaggaacttgatcaagcggcagaaatctgtgttggccggattctcggccaaggagtctgagtcgatcctacgagtcgcgaccgagttggctgatccggaaggaatggtgaacttgcttctcgattccgggttgaagattggagcgacggaggttttggaagaagaggaggcgaactctcgtggagtggattccaagtgggcgagtaaaggctgggatgagttacacgtggcggcgtcgtttgatcgtgcggaggaggttttggacttggtgagagggaggggatctggttcgttgaattgcgtagataaggagggaaggactcctctgcatgtggctgtagctaagggacatatcaagtgtacgcgggtgttggtggaatccggtgcggataaggacgctaggagccgtgatggccgcacggctttatatagagcagcggctaatggtgaccgttcgatggtaggcatgctgatccaaatgggtgcggaccccactattcgaaatgatcgtggacgttcggcccttgatgttgctcgagataagagacacgtaagtagatactaccgacaaagacagttatagttagttattcgagaactgttgaaaaagatgaaacttgaaagccactaccttctcctctttttaacactttctaagtttataacttaagaaagagtaatgatatccacctaaaatataacattacaaaaagttgtgttaatcaatcagttttttttgaaaaaaaactaataataatcaatcaattttatatcaaaaataaggtttactgttttaaaaatcaccatcactttagttgacttataaaggcttctcacttgaaaaacaatgcagagtgaagtggtggaagttttggagaggggagaggaagtgttaatggctgcaaggcggggcgacacagagtgccttgaattgctattgaaaaccggcgcaatcataaactatcgtgatttgtatggtctgacagctcttcacgttgctgccatgaaaggccatgaggatgtgcttgcaatgcttgttgaatttggtggggacttggattcccgggatgatgaagggcattctccgctgcattcggcagttgtaggcggaagtttagaggcagttgttatgttggtacgtaaaggagctcatgtggatgttgagaacaatagcaaggtcacgcctctgtatatggcaacaactatggggcaacgggaaattgcagagtttctcattagcaaaggagcttcctccgagctttctcttactactttaaatctatggtatggaaaatttaatggccttcttccctcgtaatttccactagtaaaataatgatctttaaaatatataggaatttggtagttgttgctgaattattacagaaagaactatgacaaattgaaagatattaccaaaaataagaaagaggaaaataaagaaattatgaagatatattaattatagtaatttgaagtaa

SEQ ID NO: 162289 - DNA, 4720 bp, Cannabis sativa
  modified_base (4494)..(4494): a, c, t, g, unknown or other
acctagtaatattatatatttatactacgtgatttttgtacgtaacaatcacctagtaatattatatatttatatagcttacatgagatttattgtcacatagtacgtacgtagaagaagtatatatatatatatatgtatgtaaattaaaaactacagcacatatatatagctctctaaaattaattttgtgtacatttttttcctggtcttgtttttatcaatgatatctcatcatgtccttgaactagatatttatatgcgactttattggtactacaatacatatgtatatatatatatatatgtacgtgtgtgtatacttgatacttagatgcaagaagctaattaattaataattgtgtttgattttatgatacgtggaatatcgtgtgtactatctaatgacaagttaataatttgcattagaagtagtacgtacgtagcccctgacttgtccatttcactcatctctgcgctctcttcaatcacaattattattacaaaagctatagctaggacggtgatcagatcacagcgagaatcgaattcaactatttatatccgttttctaatatggattttggggggacaggaatgcgacttgacttactagatgaataggtccaagtttatagaaacatatacaagagatgaagataaatattaaattgatgaaaaagaatatatattaatgttttcgaaaatataattatttaaactgttaggctcttctaatatatatatatatatatagctctaaaagggtacactttgttgggggatgatgatcttgatattatatgtatatatactcgtgtgcagttaccaatgagttttttattaagaaatttgttttaggtaggtagggtccacaataagagccaacaagggaagtgttgcttttttttgttgatcccttttcctaaaattgggaaacgtggaacttttcactctgatccctaatgcgcaacacacactatactattattaatcaaaaggctctgctcagtgtggaggtggccaccaagtgggggccgggagagaaagctagaataaaagatcaaaagctgggttgaatttcatggcagaattatttattatatgtacttgtcttctttttctttttcttttcttttttgtaaatgcattatgacaaatatcaatgatcacacacacatagagtttatatttataattatacctatttgtgacaaattaaagtaagttctgtagaccatatataattaaatcattgattgtagttttaggaaacaaagacctcttaagctctgttaagtggtactatattattaacttaaaaatacaaaaattatgtcaaacttttcttccccatacacgagttgttctcacctatatataaaaagataatagtaattatgataataaagttttatatctgcttttaattgtttaattattttgcttgacaaaacttgtttgccttctttttattttatctactaataatataaattgtagtagtgtagtctttaatagtgtttctataaatttggaatcatgagttggcatatatgattatttatatatggcaatcaaatttaattctcgttgagatatgcttagatcattaattaatttagaagaataataacaatcattttacaatttaaaaaaaaaaaattagagaaaaaagaagaaataatggatcataactattgagatacagttaattaatgatatatatagatctctttgaatcactatatccttttgccaaatactattttcctcatgatttgggagtaaattttcttgaggaagatgttatatatattatatatatagcatggggaccattatgtcttctataggccgacactttaagcgggtttattttagtttctccaatatttaattactctgaaatctgaatcatgattcaactatacatacatatacacacatgtcaacataaattgttctgtttttatcttggtcttcttttcttgaatatagaactagttcttattttccttggaatccaatcaatcatttctggagtaggtaagttcgttgacaagtcaccttttttagggtttagcactgattgatgaaatatatgtacttggaaattaaattcgcattcatctcattaaataaatctacgtacgtacgtttttattatcagtcctgtaaattatgacacacataaaaatattatatatatatttatataataatgatggtccatggtctatatattataataagctctagcttgatagcgtcaacagtacatatgtacatgcacatgcagaagaagctatattaatcgacgcagttcatcaatattgacagtagtactacatttttgggctacgttatagttagtatatatatataagtttgaaatcataagatttttgtcaaaagaaattcgaagtatctaaaaacaaaaccccctaactagtacttatgcctttggttaaaaaaaaatatgatttacacaccttatgcatgattattaataatacatatgagatatataaaggttaatgcatatataaaaaccaagtttagaacttctttaattttttttatcatttttaaaatatatatatatatatatgaagctaaaactttttctaggtattttgttatgaaattctaataattaattttaaagtgtacgatgaaattagtttgtttaaacgaaaacaaatcgaacaaatacatatatatatatatatatataagggtaatgtatgtagaatcaaattaatgtattatgttggttcattttatatatgaaaataaagctataatgtcatcacgggtcttcgggaaacatcaaaatgaaaccctagtgctagaatgattgttttgtgcatgcgcaagtgtagaacagcaggaaattaattatatatactcgtatatatatttgtacgtacgtacgtatgggagttgtaaacaaaaaggatcgatgatgagctaattctcttgtcccacactcttatcctctttgcaggctgatgcaatttcaagtcagcacattatatattattcaatttgggtatcagctatatattttatgtatgagcatattgctaccggagataaaaagttataacaccacaaattcacacattatattgtaatatcatgttgtaagttgatatcaaattacacgaattctaattctcaatatatggagcccaattagattgataatttataagtcactaattttttttttatttttagtcacaataacattaataacatttatgattaaacgtactgaaaatattctgactaattatataccatcatttctaaatatatagtcagtaaataaaagtattaattagtgactaaaccctaaaaggtctgtaaataaaagtattaattagtcaaaaaaattacaatttgtattgtgactaaatgtatttttagtcacaatacctgttgtgatttaaattaaattaatcacaatttatatctaaatattatgctttagtcacaaataattttttattgtgattaaaagttatatttagtcaaaaaaatttatattattactaaaaagttataattaaaagtatatctttttttagtagtaagctcttcgaaatataattattatttgatcatgctcttccaattatattaatttccaatttcttacattttgttttatttattattcaattttttttttatgtaagctagaaattttattgcgagccttttctaaaatctaatgaccaattcatattctattagtaagactcattttctcatgtaaattatgagaaaatctataactataataagcacacttttcaatttcttacgttttaaatttctatgaactattctataaaaaaaaaatagataaataaaataaaataaaataaaattctatatatgaactatatgtaattatgtattatagttaactaccaaatcttgtcgctcttgtccaaaattcggtagcacggtaatagtttgggggcacaactcgacaatttaatataattatataattatgtagtaatgatatttggagagtgtgaaataattacatgtaaaattctcaacacatcagggtgttcataaaatagctaattcaattcaatccgcaatccaatctaatctaatttgtaaagtgcagatatccacttatgcagattggattagattgaaaaatttaaaatccgcacttgtgcaaattgaatgttgattgacatgtaaaagtgaacaatccaattcagtccacacatttttataagaaaatttaaaaaattatatatataaataatattttaatgtaaaaaaaatagtaatttaaaaatttaatgcatataatacaattatatttcaaaacttaatagatcaaatatatattttattcttatatataatttttgttctaaatataatttaaaataaaagttaacattgcttcctttgaatttgttatttgttattttattaattttaatntgttgttggagacataaaataattataatttgttttattttgttgctagttatatgaaagaaaaaattcataaatattaaacaatttaatattgaaaagtaaccaatccaacataatcgatcaaatccgcacttttgcggattgaattggattggatttgagctattgtgcggattggattggatccaaaatatgaaatccatacttaggtggtgtttggttggag

SEQ ID NO: 162290 - DNA, 1470 bp, Cannabis sativa
ataattccctcggtacaacacttcaaatttacacaaaatcaagcacatcaaacaaatgagaaaagaagaatcattgagaaggtcccatatgcaagttgtgttggaagcctcatgtatacaatggtctgcacaaggcctaaccttgctactcaatgagcattgttagcagattcctagctgattcaggacatgagcactaatcatctttgaaatggattatgaggcatgtaaaaggcacattaaacactggaattgagttcaactcaaagacaagttcaagagacgaagtgacagtagattcaaactatgcaatcataaataccagaaggtcacttataggctatgtattcatattttttggtggctgcataagctgaaaatccaacctacagaaggtggtagccctgtcatctactgaagcagagtacatggttgcaacataagccataaaagaagctttgtagctaaaaggtttggcaaaataatttggtcttaatatagatgaaatcacaatgtactatgacaaccacaaccagagtgccttacatctcatgaagaactctatatttcatgagaggtctaaacatataaacattaaattgcatttcataagggacatcatagcaaagaaatgagtgtttgtaaagaaggtgcacactcatgaaaatctagcaaatatgttcaccaagagtgtcaccatagagaagttcaaacactgtctagagctactcaacattaccaactaacaggtttgataatcaaggtggatttgttgtaataagtggttagaaaaccaattagttggtccacactctcctaggtacattaactgaatctgttaagtttgttacctaaactcaaaggttacttaaatctgttatgtctagagactcatctactcgagtcactaaggatataaatagacaaattcagctcccttacctttgtaattactgggctgagagaaaacaaaaatagaggagaggagggttcttaaggaaagcttgtatatctaatcaagctatacccattggtgaggatttgtgaggagtgtcaacttcattgccttgtgttcattgtcggcaagctctctctcccccactcttttgtatagattgattcattttaataaagaatgtttttttttgaaaccaaagattcattttaataaagataagtttttctttcatttaagttgtattgaattctttttattgttgaagcactagtttctggtttggttcgagtttttgatttagttaatagctcttgaattatggtgaattatgatgtgtaattcacaacatgcattttatacttaatgcaattaataaagtttacttgtttttcaatatttccgctgaatttttattggggattttttctattttaacctaaaattactaaaaataaacttttatactactacaataaaaaataaacatttataagatttaatgtttactaaaa

SEQ ID NO: 162291 - DNA, 1401 bp, Cannabis sativa
aggcttgaagcgggaacgttacaccttgcaatgcaacgacgataaagataacaatgtttgatatttttgctgaatctgattgagcatcatgatgattccaaaaatcatgacaagtgttttgtgtgtcaatcaatatggtcaaattcattagcctattcttgctcctctccaaattgtaagaattttcttcattactcttgtgcaaattttccatcgaaaattgatcaacatccttctcattcacaccaccctctcatacttcaattcagtaagcctcgatcttgcaatgtatgttgtaagaaagattgtaggcttattttcaagtgtgacaacaataggtgcaattttaatttgtgcacagagtgtgttgttcttgatacaacgataaggtgtcaaagtcatgatcatttcttattgtttgtggagaaagcgttgttttatgaaggtgtttgtcatgcttgtcaaaaatcgtatacacaatggagtggtgatcatcttattcctaatgaagtcaatcaaactcaatccttcttatttcgttgcatggaatgtgattttaatctccattttatatgtggtcctttgccatttattattaaatacgattatcatatacatcctttgacacttgttgattatttaagcgaagaagatcaacattattattatgatgaattatactgtgatgtatgcgaacagccaaggcatccatcatttcgcgtttactcctgtaaagattgcaaatacactgcacatacttgtcctctatttgatcatcaattgcgatcaattgaaaatatttatcaaatcagtcatttcccttcttttaactcacaagatttggagaactattggaggaagcttcgattttatagacccgaaaaaggattgaaagttgatgaagagtacttaagacaaaagattgtagatgttaatggttacaaggtaccaattacacttgcccacatcttaaacactctgttccaccaatacggagaatctcttctatttggtaaataggtctcaaaacaaagacctggagtgaagagtgtattggctacaacattgtgtgtggtttggtttgtgatcaaatgtgcaggactaagatagaggacgtgaccacaaatcttgttgagaattggtttctctaccttaatgccattacaggatcaacattctcaaataggatgtgtcctagtactttcatctacaaacttgttaagagatttttctggttagaagcaattcgatataaaaaagagattaaggagaaactagagttgaggattgtaggaattttgagataggattttactatcttgccccctacaccaacaaacaaaaccaatcaagtataaggtcaatttcgacctttccctgttcaatgacttttcaaagtca

SEQ ID NO: 162292 - DNA, 916 bp, Cannabis sativa
gggcataaaacccaacatatggaataccaattaattgaaagaggtgcacaagatttattgcacgttgcactgataggactgtaggatcgtttcggaatactccctaattaggagacatgtacaagatttactgcacgttgcattgatagatcttgatccagaacgatctagtaaatttgattgcatagtgtcttagtgaactacagttatttgagggattcaccatgtaacaagtttgaattacctaatatgactataggatgctttcataataccccctaaagtaggagaggcgtacatgattgtttcatattgtgccctaataggtcttgatccataacgatcgagtaagtttgaccgcatgtgtcgttgtgaactacagttatttgagcgatccaacatacaacaagtttcagttacctaatcggaccattggatcgttttgaaatatgatcaaattaggaggggtgcaccgataggtcttgatccagaacgatcgagtaagtttgaccccatagtgtctcaacaaactactattgtttgagcaatctactatgtagcaagtttgagttacctaattataccgtcagatcgtcccagaataccctctaattacaagaggtgtacaagatttattttacattgtgccaataggtcttgatccataacaatcaagtaagtttgaccgcataatatcttagcaaactatagtcatttgagcgctccattcttcgatttatacatataaaaatattattttacaaataaaaaatattaatgtacattttaataaaaaaaaaaattaaaagtatcattaacaaaaacaactatatattcaaaaaaaatatatatatatataaatctggtatgtaaagttttaaataaatcatgttacatttttctttgacctgtaata

SEQ ID NO: 162293 - DNA, 3989 bp, Cannabis sativa
  modified_base (839)..(871): a, c, t, g, unknown or other
atcttttaggagcataatatgatttttgcgacagaaatgttgagtctccattttcgatctatatagttaaaacaacaataaaaacatgcattaagctcaactatatataaatatatatatatttatataaattagaagtaaataattattttatatagattacatgtatgaatctcatgaataaaaaactaaaagcatacctgatcaattcagaacttcaccacccaacgtggaaataaaaagtaaataaaatactccaaagagcttaattttgatttgtatatatagagaagagagagtacactaattttgcttgagttatttcttttactcaatttatttgtagtccatttgtaattttgtattatcttttataggtgagaaaagaataaagtaaataaattctttccttgctacaataatttataatttgtaacaatttatatcttctatgtttcttgtgactttagtatcaaattaaaaattagtttcatatttttaatattaataaagaaaacttttttgaagattctattatagtaagagacatttgtttatttcttttcaaacatattaataatgtagatacgttaatggttacttggaaaaaagactaagaaagtaaaatatatataaaaatatatagattattatttccttggaatataggtttcgaaataaaaaatacattaataataataatattaaaatgaagttatcctttaaggttttttcattttttctagaaacaaacaaccaaaaaaaaacctcttccctttccctagccaaaaatatatacataaaatttgtaaggaattcaaaataataataataataannnnnnnnnnnnnnnnnnnnnnnnnnnnnnnnntaataataataataataatcgtggctgtgtagtgttattacttattttgtctaaattattactttttgataaaaaaaattgaaaaataaaagaagaaaaagaaattaaaaaaaaaaataaaaaataaagttagagcataattttgttttatactttaaccttaacacatttaatagaaaattccttccttgcatagaatataattccttgcaaaagtaggtaaaaagaaaaacaattctttgcataagaatttagaaatgtgtggggaaaaattattatttgcttgtaatagtgccaaagcataaagagtgaaaaaaaaaccatcataaatgattagttggttgtaatttttaggataattagaatttttgttccaaatattttgacatatactaaatcgtaccctttaacttttaggttgttaaattttttccttgaactattgagaattgttagattcaagatgtcacaactcgagccctaggccgtgacagaaatataatatccataactctagtggtcaaagatcacactttgactcttgtaggaagataatacttataaataatccttaaatttatattacaaaatatttattttaaaaaaaatggattaactcctatatttataaaaaaaaatattagtaacaaaatcagaaccactcatgaatatgaaagaacaataatatcttcacagttatgtagttaccgaatagatagatttagtgagccaatagaatacaaaaattatatctagcatccatcattcctaatttctaactagtacatagctaatttaagttatacagaacattcattcaagcttaactaccgaatcacttttcagtggaaagtttgataaatagactaagactaaacgaataacgactttcttcctcaacggtactatcctcatccactagcatcaaactaagtttctagaatgggagaaaaataagggtgagtttataaagcccattcgaaaaataaataatatcgaagaacccttgatttattaaaaactcttgcatggttagcttttaaaaataaaacatatcatcaccattgtcaaaatgtatatacaaaatagagagactacaaataatcacaaagtcaagcttcaaatgcatatcacactgcccactagagcttagctctcaataccaatcatagagaacgacatcgaaaattaggtagtcgcacttgataaccataataccgaggctcaaattcaattcactttatgtacaaattctaggtctttcacctacaggtgaatgcacacctgatctacctatgatgacacagagactaggtcgtgaaacaacaatatgcacaaatcataattaacatggctctcatcagtatactaaaataaggcaaaataagagtaacagaagaacatattcacttttattttggaaaatttggtagcatagcggctgtattttgaataaatctaaatatcataacctgcataaatatttgtacaaaattatttttggcactcgttatgcaggaacagtcccgaaaaatatgtaggttaagtttttaatttttcaaatattttataaattataaaaattagaatatgcctaatgttattctacacatataaaatcaagccatataatcaagttaattaattccttacctctcccaagtcgttaaacttttcccaaaaaggacgatcctaaactttcaactcttgagctccaattatttaaaccaattttagatatcactttcatttataccatcaaataaataattatcattattgcattctacattcaaaaccgagtccaaagacatataatacgactaatattaagtgcggtagaaatcggtgtatcggaaacatcaccgaaaataggagtagtatatatcaaaacgaccacctcgacgagtaaatcacacccatgctaaccatttgtcaaaacggtatgcagcaacaccaaaaatttgtcgaaaagggacggagctacaaaaacatcacaagaaaaagtatcgagttaggcgaaatgactcagtatagattgttctccttgacgagcaaattctagtggtgaagaaggatctttaatagcatatacataatacatatgtgcccacaataggattttaatccaacaaggacaatcgtccaggcccatgcaaagctaagaaagcttcgtctcttggtccatttggtccggtacttagcttcaggcggaggtcacacgtaccgaaaggtccttctccggccacctcccgcactcacaacacctcacagagccaatcatggggatccaaatccccttcgcttggtgtgaaggagggacacctttggagtgtatcaagatgatggaacttaaatttgtaaaaaaaaattgcaagatattatactgcagggtaattaaattctaagtaaattatattaaatcaaagtagtacatgaaacaatttattcttgtgtaactagttctccaaaatgaaactagattatttttggacatgattcatttatgagtaattctttgtgagggaaataaccaagttcaagtacttgtcattggcacactcaataaccttataagcaagtctctcaaataattcatccattattgtttctccaaattgtttcaccaaaataggctctgtaactgctcttatgtaatctgaaacatatttccctcttttataattattattattattgttgctttcttcagcttcaaaatttaaagtagtgtcatcatgttcactagtgaagcctgcatctgctgttgtttcgaaagtattaagcttttgtaaagagaaagatccttctttttcaatcacacttttcacttcctttgcactaggaaaatatgatggcatgttgaaattatccacacattttgcttcaattatattctgaaatattaatagagaggcagtcaattatgtatatatgtgtgtataaatcattaattaattaaataagaaattaatatatgaatatttatatatatatatatacatacctccttgaccatttcattgagtactgtttcaagtatttcccaattagcagaataatcactttgaatattaccaataattgttaatatcatgataccaccactcactatttc

SEQ ID NO: 162294 - DNA, 4736 bp, Cannabis sativa
gcacccgccgccgctagttaactgtgttgagattcctccagtggccatttctcggcccttaacacaaagctttcttggccaagaagagtactcttgtttgagtcacaacaacaagagaagcctaccacattatgagggatgtggtttcaactccagcacaaagtaccaaaaggttgttctgtactgacaaaggggtagttagttcactttagttgttaagttttgcttttaaaatttcttgtgaaaccatccttttcattcattattcaaaggaatcaacatgaactggatggttattttgtaccagttaaagattgatttaaattacatggaaattaaaatcctaactaattcagtagtctttttcatgtccttggagactaaagttgtcttttccatggggtaactttttagtttttctgcccaattgtgaataatatgatgtttaattcaccagattattatggatatgtaactaattatcttatcctatataatgattaatttatgaatctggccttgcagttgatcatctggtcatgagatatttattcttctccttagctttttagcttttgaagtgtattacccacaatgatggtatgcatgaccaatgaataaggtctatgaatcaaacaagaatttttgcttttcatgaagtttagtctagcacattagtgtctagcatatgcagcgcataatatggcgtactaaaattcatcatacctaatgaattttgcacttgaaaaatgaaatgcattaaagtccacctcaaattcatttctttatagacaaaaaaataacctatggtgggacacagtttaattaagatagttctaatatttgttttcctaattaccgtgtccaaatcagagtataagctgtcgttttcaacataattcttaaaaaatcttttaacatttcacatttcaccttcctccacaacaatcctcctatgatcttaaccgggataggtgaagaatctcctgcttcgggaacccatcactacagaagaacactgatttatgcccatgaccaccatcatgcaacctatagaaaaattcttgtttgagaattgtttcaaaattgataatttatcctgatttaaaagaacccaagtcaaatgcaatttagtgatgcgtttcggcaaacatgaaattttgtgtcgtgataacttcccacaaagagttatgatagaaaaatcttgacactgagaaagcaatttcaaattcggaaattcaccatgtttgtccagttgcataaacaaggaacgaaggctacttaatagttaattgggatcaaactaacatcgttatgacttggaactcaggtattcctaaatctagaatcttatccaattcagagatacatcatgtttcatcaaatactaatctgttgttactttctgtttctgttgggtgtgcaactaaagtctcagtaaagattatgggtataaggatggatattatctggtataagttctcaaatcttttgagaaggtgcccaaaaacaaacccaatctcttctcattagaaaaaaagcacatgaatatagatataacaaatccaatctctctactgattcttccctattcttgtgtttatagtttgtagatatttcagataagcattccttaacttactccttttttatctccttgacttattcttttaattcaaatagtattcaagcatcagattgtaaattaatatacgatcaatactacttagtctcatatggtatctagagcttagatccaatttttctcatatgattcccacgaatattcacccatggcatccaatgatccatctacccccgaaccaaccaagccttccatcctcaaactcactcccacagactatatatcctggaaaactcaatttctttagatgtgttaatgataacgttccatcaaaaaatactttgccaataatgtcttcggtagtagagcatgataactgccttaacctggaggtcttattagaatgagtctcactggaaattaaataccatatataaagataaatgagctattgttaattgaactccatgcaccttaccacaaacacacatcctaaattctaacacatttcaggtgtttggtccttgatctcttaaagatctttcgttacacccatattttccaaacacaaacatgagaaggtgtgttttgtgcatgcacttgtggtgccgtaatggggcgtgataatctcttcgagatatgtgtgcattcaagcgtggtgcgccaacactcttaggaggataagatacaagtttctcaaatatataataggaaatgtacgcagtaccagtagcagaatatataattgaacgaagactacaatgcactccatttgagctgaatccagtatacttaccacaaaagcaagagaagagagataagcacactagaacaaaatatacttttcaagacaaaacatttaaataatatacacatttcaatcagtaaagtgtttgatctgttgtcaatgtccactctaatttagccaataaatttcaagtatgcgctcctcctatttcactgactaatagttcactgagatttctaatgcataactcgtctggaatcgtgaccaattcaggcatataattaacgtgtagtcttctcagattgggcatagctgtttcttctggctttacttgccacaacattacatttcacgagtgaactaatttggagagtctccaaccttggaaatccttccacacactattttagttccattgtaagaattatgcaatcggagataccttaactttggtagcttctccaacactggcatgggggtccttaacaagctcagagtccttcaagatcagtttggtgagactttctgggaaaatttcaacagtaagatcgttcaatatcttcccgtctaagaaaagttttgagagagaaacacacttagaaagttgctgcagatttgaaaatccaccactaatggtgttgagagacatgtgtagagactggagcatgcttagcttgaaatttgggaaagccaagaacgatctaacctcttcgttggttttgaattgtactcctaaatttcgaagattggtcagctcagattgtgtgatcttgtttttgagaagcagcggaccaaatcttatgtacttgagagtctgaatctgtttcaggtcggaaagaacatatgtattccaagtatgatcatcagaaaaacacgtaccaaaaggtaaaaacatatgtttcaaacaggatagcttcaaaatctccactggtaggacaacctcgtagttatcacgaagattaatggtgcccaaatttcttaagtttcctatggaactaggcaaagtgacttttccaccatctctcaaccccaagtacctcaagtgaatcaagtcaccgatctctacgggaacatgagtactgttacacataatggtactggtgtcatttctaaacccaaattccaaaactctcaacagtttgaaactcttgctccttataagtttcaagaaagacagaggacttacatggaagcaagtaagggaacagagtatgatgcatttggtttctatcaagatcacatccaggaatatggactgcaactctacgactgcttgttagatgaggagtagtattactcgaagaagagctagctgtggtattaccacgttcttttcatgatcatcatgttgttgaataacctcagagaatttgtcttctctagccttggagacgcagatatctctcattagacagtgcactgcacacgacatgtttttacaccaacctcagtgtaatcccatttccccacttgaatcatacacctattaattaactctctaaaatattgctctgctatctcttccatggtctatctttttgttgttgatgcaatccacagctgaattaactttctcttgggtatttcaaaaccctttggaaagttgcccaaataaagaaaacatggtttcaagtagtaaggcaagtcatggtaacgtaaagccaaagtatcttccactccatatctatttaagtgcaaattcacatctctctccactttctgccattcatcatctaactttttggttctcaaaaagtcctccaagtttaacaatggcaagaggtagtcctccacatttcatagccattctttttcccatatcctcaaattgagatgatactaatggagtaccaggagtggagactatatttcttgcaagtgcttttctttgtagaagaacccaactctcttcaagtgttaaaaaaggaggttcaatggtgaaattatttggatcggcataagatgctacttgcttgatacgagtagtgaaaacaattttacttcccttttcaccacgagggaataccctttttatggtatcccaatcattcaattctccaaatatcatcaacaacgtacaagatatatatatatctcttccattttaaactatctttaatgtaatcactcaaatcatcctctcccaaagagttgacaatctctttgattcttctcctctcttccaacttagttcctaaatcatcatcaccatcaagcgttggatactgagactgaggaaacccaacttgcatcaaaatctcagaaaatacatccctatagaaagtagaaacgtactgatgggatataaaaacccaagcacgacaatcaaagtgattcttcacatcatcatcattataaactttcttggcaagagtggtcttacctaatccacccattccaact

SEQ ID NO: 162295 - DNA, 2911 bp, Cannabis sativa
gagagagagagagtttggagagaggaaggtaacatgtcatattttttttccaattttgtaaaataataaaaaccttatgaattatctactagaatgaggtgtaaaatcaaattgtttaacttaatatggtctcacaaaaagacaaagagtcaaatggtcaaaaagaccattttattctcacgtaagccataaagtcaataaaccacataggagtaatttggtcatttctaaaacttcggatattctcgacatttctaatgtctacctaagtcgcccctctattactaaaatactaaaatgtgattctattggccaaacgccgcattccaatgttgtcgggcacataacatgaaaaacgtaaaattttgtacatagcataaataatacaacctgaattaaaataaatctccataaaattaataatctagtttcataattaagcccttattatctactaattctaaattaaaactaagcggtatttacaatacctgaaactgggggattgggcagcttggagaaggtttcaagagagatattccatgataagtataaatatgagaagggataaagggtctccttggtgaagaccattaactccttagaacccccattgaactcttccattcatcataagagagtagtgtgtgcctctaatgcatatcatcaccaagtgaacaaatttactagttttatttagggcattcaacagatcttcaacaaattaccagtctaccgtgtcataagcttttcttatgtcaattttgatggtgcaccgaggagagacattttttcttctgtaattctttataatatcgtggagaatcatcacatattgagctatagatcttccttgaacaaaggctccctggttatgatgaacaagcataggcagaaccacaacaattctaacacataatagtttggatatgcactgtagattgtagaaaaacatccaattgatctataatctactgcttgggctggagtctcatgcttgtgaattagggaaatcattgtgtgttatgaaattcaaatggtatattacctaaattaaaaaaaaaatggtgacagcttcacatatctctcctcctacaatcggtcatattttcttgagaaaaacctgaaccaaatccatcagggctcggagattcaatgtctggaatgttgaacaaagctatcctgatttccttgttggtgactggtttcaataggccaagttattgatcaagagataaagtaggcccctgatcaatactgcttatgtttaaccttgaagtggcactacttttgctccccatgtagccctgaaaatgattcaagaaatgcttaatagctccagaaaaagtttctacagtctggccttgatttgttgtgtaggatgtgattctattttccaccttcctttttttaagaaaagcatgaaaaaaggaagtgtttgtgtcccctttctgcaaccatgttatttttcttctttgtttaagaaaatcatgatacattttctcatggatagtgtaacattcagctactctagctacctattgctgtaatggaccgtcactcggattagcttcatcacgatgtttagcctctatgtagtttcctttggctttgtgatatgctcttccaatatccctaatatgttcatgattgaactttttaaggcagtgtttcatcctcataagcttcaaataaaccccttttaagcctccagacttcatgggggctttccaattcttctccacactcggttgaaaatcatcatggcagcccaaaaattaaaataatggaaaggtttcaagcctatcaactctgttacagtagcagaaaccacacaagaacaacgattcaatattatttcccaagtgaaacaagatgaagtattagggaattcatcatgacaatcttcattcacaaaattatgatctatcttggaatagattcgcttgttaccatcttgattgttggtccaagtaaagaaagaatcattactttggagcttatcaacatgagcatgattcaaccaaagattggagtcttccatttcattttgagtgaacgggttcccactatttatcactcacattgaaaatcgagttaaaatctccaagaataacccaaggcttaacaagaaatttgagttgcctcaaattatgccaaagaccttttctatcatccattgtgttatagccatacacaaaagtaacacaaaaggctttggattggccagccattttaaccacacaatgaacatgttgagcagattcaactattacaatagccctcactaaatcgcttctccaaataatcaataaacgaccctcaatagtggcactagtgaagcaatccagctgctaaatttatcagccatagtctcctggactttattccctttcagtttagtttctaataaattgcagacacctaatttattcctattgcaaaactctataatgtagtcttgcttctctttattgttcattcctcgcacattccagctaccaatgttgtaactaatcatgattaattgcagtttagatcagggccctcttcctctccttccccttctatttgctcctcccaatctgttgcttcttgtaaaccactaaaggtgttactcaatctttgttcaatatcaggatctatattcataagatacgctggttttggctctttcatagatttgtttgctgatttcctaagggttttatagtcatcaacaatcttattctcattttcaaagaaatagagggtttagttatcacctttgaatcctccactagtttaggcattgaatttttgacctctgccttgttagctttcacccatgcttcccctttcctgcaatcagccatgatgttgttgggctttgtgctttaaataaaactctatttcaatgtaatcttttcta

SEQ ID NO: 162296 - DNA, 823 bp, Cannabis sativa
aagcatataaaatagggtatactaaacttcagttcaacttcaaggttaagtacttgaagaacgaccagagagaataatgtaataatcatctagttgatgagctagatattctcaagtatattgataaaatatattacttatagtgatgtgcatattttgaaattgttaggcatctttcttggcttattgaaagcttccacaaaataagatttgtcacaacacataagaatatgtaatgttatctctaatttttagcaaatgatgtcgtggcatgtatacgatgatatgatttgtttgacttaaatagttaatctcttttttagctctagaattacaaaaatcttataaaggtgtgaggtgactggagcaccaacatctaagaaaccctctaaaaatactcaaggtgatgtttagtttaatagaataagaattaataggaattgattaagatgtttagttcgttattgtaataaatattaaaataagtaataaattgataaaattattctcactatttttttttaatttgtataacaattatacccctaggctcttacaatgtgagcacctttgactcaagcacacaacaaattagaaatgcaaatgtgttgggatgatgactatcatgccatttttttcaagtaaataaacgacataataacatcacaatttggcccaaaaccgatgtagtgttgatgttagtttaaaaaggtatttcaaattataaaaagtaaaattaaacgatttcttttgggaattttgattatttatgcatactaattgagggaaattaattccctaaatttatgtattttaaaatttt

SEQ ID NO: 162297 - DNA, 5314 bp, Cannabis sativa
gggtttgggtccgggtctcgggtcctgggttcgagaccgggtcaaggtccagttcccaggtccgggtcctgggtccgagtcccgggcgggtccgggtccgtgtcccaggtccaagtcccggttagggtccaagtcccagtttaggtccaggttcaggttcgggtttgggtcccgggtcctgggcgggtccgggtccggggtcccgcgtctgagtcccgggtctgggtctgggtctcgggtcctggtccgggtccaggtccgacatccaggtctgtgtcccatatcagggtccaggtctgggtcgcgggtcacaggtcctgggtctgggtctgggtttgggtccgagtctgggtccgggtctcgagttcgcatccgagtttgggtccgggtccgggtccgagtctgggtccaggtacgagtccaggtcccaagggatctaagtcttcaattaagttttttgtaaaataaattgaaatcgggtcggataagatccgatccagaaaagaattaggcggggcggagcagatctgatccaagatccaataagtatccgaatgtttcggatcagaggtgattcgtcgggtcggagctccaacccgctccaactaaatggatctttttgacatgcctacattcgtgtgtgtcgtgtgcgtgggttggtgacttgcgtgcgagcccatgtgggggctcgcacgcaagtcgtgcctgtgtgtaagtgtcgtggtgtgggtgtgtattagggctctcatgagtttgtgtgttgtgtaatatgcatgtgttgtttgtgtaaaggaaaataaaggtgaaatttgaatgcacatcgaagagaatgccattagaggaggaatcaaacgacaaggcgtgcaagggaaaagcgtattaccacacctcatggaagctttgaaagcaaggaggtacgagtagtggaggcattggacctgtaaggtctgaggacccgaccaagggtacgctgctgccaccacctctgcgacctggaaccacctgataccggacaaagtgtatgaggcacaagatcactcctgcgcctgtggtttgcatcctaaagcgatagcttgtctctttgggacaatcatgtatctcaggccattagaggagggtagttgggacgaagatgagtttgatgatgagtagcctttctcaagaaattctaatccgaacaactaccccctaatttcaaagagcccaatatactaccatacgagggaatcactgatccaaaatgttatttggatgccttcaatgaaatcataaaaatgaagagggttacaagcaaagcaaggtgtcaatgctttgtggtaacactcggaggtacgacataaaaattgttcaaaagattaactcctgagtttattacgtcttggaaaaaatttgttgatgagttcttggcccaacaccgtgcttcctgagactatatcattccaaggacgagtttggccaacattaagcaaggagagatcaaaagcttgaaaagctatatccagcgtttcatcgctaaagtagctaaagtcaggagattattcaaagatgagcataagattgccatagctgctggagttaggccaaaaagtaagctatggaacaatatactcaagagagagttggacgatctggaggacttttatgagggagcctaaagatatatcttggtggaggatagacatgagaacttgggagggggaaagagtgatcatcctaggaaggcacaagttgaagaaccacagaagaaaaggggatttgaatacaaggaagatggtcaaaataagaagatcaagagagatgtagagccataacaccataaatacacctattatacggaatagactcacttgagagagcgtattttcatggagaataagcatcaagtatcgttcaaaagaccaccacccataaggaaggaaataaccacaagagatcctaataagtattaccaattccacaaggatatcgggcacctcatggaggactgcaaacacctcaaggttgagattgaagaattgatacagcatggatacttgagggtatatagaagagaaaatcagaggccagatgaaaggcatctgcaagaaatacacgacgtagccccaaaggtattaagagacatcagaaccgttcgaggagggcctggtataggagaagacactcgcaaggggagagacaaatacacctgagaggcaaggtgggagcccctagtcttgagcctggaacaaagacctttgaaaagcttcaaagggaaaattgactcagtcactttcacagagaaagatgcaagtggggtgcattttccctacaatgatttgttggtgctcacggttcagatggacaatacgagattgcatcaaactctagttggtaatagaagttcaatggacatcttgtacttcacaaccatcaagaagatggagttttgacctaaagatttgaagaattgtgcctcaccaatacgagttcactggagactcactttaaccgtcagagactacagagttagtcctgactgttggagaacggacttggcattccacggtgatggccaccttcttggtggtggattaccctgcagcttacaataccgtgttgggaagaccgttgctcaaccagttgaagtaaatcacttcagtatatccctggcaatgaaattcctaattcccagaggaattgccaccttgaaaggagaatagaaggaagcccgggaatgctacaacatgtcactaaggattgcaccaaacctcgagggtcgatgacaatgacaattcattgaggactcaacaaagtcatagaaaacttgtttgaactagacccacagatttacaatgaagtgagagtaaagtcagaggaggaactagaggaggttgtcattttagagaatccgctcaaagtcctcaagattggaaaaggtattctagaagcccttaaaaaagagttaatgaagtttcaagaaaggaatgtagatgtattttcctaggggcacgaagacatggaaggaatcaaccaaacggtaatgtgccaccatctcaatatagaccctaatataaagccagtaaggcaaaaggaaatggctctaaatttttagtagtacacagccttgaaaggagagatggattggcttgaaattatcaagttcattcatgaagcattttacccagtttggatgttgaatcacgtgttggttccaatgcccaataggaaattgagagtgtgcattgacttcactcacttcaataaagcttgctcaaaaaacaactttccattatcgggcatagatgagttagtggattcaacagtgggacatgagttgctttgctttatggatgcatacacaggatacatccaaatacccataaatctcgcagatgaggagcacacctcgttcattattgatcgaggtttgtatttctatccggtcattccttttagtctcaacaacgcgtaggcaacgtatcaaaggcttctcaataagatgttgccaacccaatcgatcccaacatggaggttgacgtggatgacatgctgttaaaaaccaagaaggtaaaagacttaattaaagacttagagaaaatgttcattactctctgcaagtgccgaatgaatttgaatccattgaaatgtgtgtttggtgtgtcatctagaaaattcttaagaatcatggtaaatgagagaggcattgaggggactttaaaaagatgaaagcgttgatggatatggaatcgcctaagagcaggaaggaggtccagtgcttgacgaggcgagtggttgcactgaataggttcattttgtagtccactgacacgtgtctcccattctttaatgtcctcaaatgaaacaagaagtttacttgggatgaagaatgtgaaagagccttcacaagctaaagctgaagctctaatgacattttttgcttaagggcttgttttttatttctattacgttgaaattattgtatggatgttatataggtgttctatgatatttggaatcaattggttaagttttggtagattttttaagatgtgtaaaactcggggttcccattaataacgaaaaatgatccaccttttaggacaaacggttaaccgtttcatgccaggaaatcccagaaaatggttaaccgtttttgggaattttgggaagatcaaaagtcgtattttggccatatcttttcactcaggtgtctattttagacgttctatataccatgttaaagcttgcaacgagctctataataaggtatatgttttagagctaaatataattttttattttagggtgttcataccatgagatttggtagaaaactttagattttcttatgcgaatattaagcagtattttgggatagacacttattggtttaccgttgttacgacatagggctgagatcatcaagcatgtttctccatttgggttggccaacatgcatgaatctagatttaaagtaagaaaagtacattgtactacatagcatgttatgttacaacacaattgtaatcattgtgaatcgattatattgaggttaaaatacgattattatcattatatgactaaaaaggatgcattattagaaaatgatgagaaagttatcttattatacaatgttaaaaagtttgccttattagacaatgatgtttggataccgaaggattaggtatcaaaagtcataactataaatgaaaactgctgttaggttttccacttgacgattgtcttattaggcaatgactaagatatatgaaagtcaggttagggcatcgacttgccttattaggaaatgttatatatggatgtcgagttaaggcatcgacttgtcttattaggcaatgtgatatatgaataccaggttagggcatcatcttgccttattaggcaatgagatttatgaatactagagaatgattttcagattgtctgatttgacaatgatagtacattagtatgctaggtgaggtattagaattactttgttaggtaagtagtgagaatgattactttatatcgtcacatacattttggtctttgtaatgcttctggaacctttcaaagatgtatgatagcaatattttctgatatggttgaaagaaatcttgaagtgtttatggatagtttttttgtgttttgaaattcttttgatgactgtttgcaccatctttctcttgttttaatccgtttcaaagaaaaaatttagttctcaatggggaaaaatgtcatttcatggttaaaaagggaattgtcttaggtcatgtgatttcatctcaaggaatagaagttgataaagcaaaagtagatcttatttcaaaac

SEQ ID NO: 162298 - DNA, 1493 bp, Cannabis sativa
cagccactaccagtactataatcatgatgcaagctcggcacaataattgtaccgctatgatagcattagtctatactcaaaagtatcattaaccataatatcactcttaaccaatattatactcgtactgccgactcggtactatagttggcactgctataatagcgtcaattaatactttatggaattaaatatcagtcacaaccagtactatactcgcattgttgacccgacactatagtatgcatcgccatgatactaattcattcattttggccactaccagcactataattgtgttgcggactcgacattatagtttgctccgctatgatatcaatacatatattctaacaatataatcatgtatatcacatgcatatctatctatatatacattttatactattcttaccttaactctgtaatcaagtatgtcggttgatcagagtgaaaatattgcttgctgaacggaggccctatgccacatttgcataaaataggtaagtgttactctaaacactttcagggatttaaaatcaaaactaaaatactccctacctttattaccatggtaataccctaaatatcgagaaaatactaaaatcgagaccatagaaaaattctccgaaaaacagtacgccatttttggaaaaatagcagatcatttttctaggttgctgtcagtaaaagtagtagatcgtttctagaaacatggtatgtcgttttctactgcaaattttccaaacatctcctttcgaactcaaatctaccccaaacttcatgaaatattcaagaacacctaataatcatcatatgaacataatccaagcagaaaatccaaccataatgccctgtagaagaaatcaccattgtggagttaagcttgagcttaaaagctcaaacctaactcaatctaagctacaaccaataaaacctcatcaaaattatcccaaacaaacctaatttaacccaaaaaatactcccaaaacttctcaagtttggacaggacccaattcagataacataaaaccaaacctaacttttctttgaaaaaaagaaagagaaaagacaactaaatcttaccttagatattgctatccaattccctcccatttctagcttaattcctcaagaaagagataaatttggatttgaatcccttggttcaaagagaggctgagagagagaaaattaaagagagaagactgtatttgtgtttatctaacttagaaaaataaaagagtttaattaaatgttttattctttaataacttagctatgaataccttagaatcaactaccaattccagtaaaaaacaataacgaacctaagtaaaatcctagctagtttttaaggattattatgtccacttgaatttattttataaattaatgtagttgttcaatttcttcttcttcttctaattaaatttcatacaatctgttttaattttgtaattatttactggccatctataattgttatctat

SEQ ID NO: 162299 - DNA, 2495 bp, Cannabis sativa
atatgtatggacagggtttgaggttgttgaaggcttctctgcacactaaaacagctcttactcaatgtttcattgtagatgccaaggcttcaaggggaaataatgttatcaccttttgatagttcaagggggtgttttttttcttctttggattccttaataattagttatggaatgttattttggattaatgggagaattttttgattatggccactgaattattatgtttcacttttctttatgcatgttttttatcttttgttgctcctctttgtttaggtaattttgtacaagaattgtgttaaagatggaattgaaatttattttgaggattaatgaaaattcttatactggttgactgaattgttgcaatattttacattaatggtagaagaaaaaaaaaacaagcaaacacggtagcttgttgaatgggtgtgtaacattctcagtaggctgccgctgcgatagatatatataatatccataattaaagtggtcaaaggtgtcacacttaaactcttgcaagaatataatgcttatttataaatgatcctttgatttaattacaaaatttaaaaataataaaatagctcataattataaaaaattagtaacaaaattaagatcattcattaatatataagaataataatatccctatagttactacaagaaatattattttgacagcacatttttgcgttggcaaatgtttggtaatgtgctggcaaaataaaatctaattttgatgtgtttgcaaaaggggttggcaaatcaacgttagtattataacgtttgctggtacaaaatgaaatgcgcgggcaaaaataacttttctcaacacataaatgcgctagtaaaagtcagacgtttgccactgcaaacactagcattaaattgagttcctaaaatgggagaaaatgtaaaccaattaggaaaacaactaatatcaaatgactattggtttaataaaatttttagagcatctccaataatgatggtctctatttttttttatctaattaaattttagttaaaaaagttaaaaagttaaaatagagtgtcatttttattattcttgctacaagtatgctccctatattagttagcacttaattattttaataatattttataatttgtttaccaaaaaaaatattttataatttgaatttattaaatggggatattgcttatatgtttgaataataatactaattcgagatatttgaacacaacacacaatgagatttatgaaattaagagaaatcattgagggaaagaggaatatacatatatttattggacacacttacaaagtgaggagagagagttatggaaagaaaatattagggagaatatacttatttttgtagtattatacaagtatttactatatatttagtgattaatatcttaatgatttacgactttattgatttggtttagtgtagattattatacttaatgagtcgatactgttctctctctctttttgatatgtgtaattaaaatttatcacaatcgggctctaagagtgtgagttggatgagttggaagcgattgagtagacataagaatgatgtaggtatgggctttctggaccttcgggattataatcttgctttccttggtaaacaagggtggcggcttctgactaatgaagactccttagtaagcaagatatataaagctaggtattatccttcgggtagttttcttactgccactttgggacaaaactcaagctttatttggaaaagcattttggaagcacaaggattagttcaagctggtgtaaggaagtctattggcaatggaactaatgtaagtattctcttagatccttggcttcctgatccttcaaacccctatgttttatctgatcatcctagattaatgaatcaaaatgtctcaagtttattctctgtgcaatctaaaagttgggaccttgatattgtaaatgatctgtttgaagaacgggataagaaccttgtgttatccatacaactgagtgagaatgccactgcagatgagtggtattggagcaaagaagctaatggcttttatactgtgaaaagtacataccggttgttacaacaagcttctggtgttgatattgctgtcaatgatcagacattgttcaagttcttgtggcagttggacatacctccgaaagttcaccactttctgtggcgtgttttagttgggtgcctaccaaccaaggtccaatttagcaccaaaaatgtcaatgttgatctgtattgtcccttctgcaactcggcattggaaactatcagtcacatattgatcaagtgtcgatttgcaagatcctgctggtgtgtttctattgtgtagaaagtgttgatttcaacagctggttttttgctctaaccgtgacacagtctgctgctatcactactagaaaaatgggttttagtgacacacattaagtaactctaaaactctttagtgacacttcaacgcgcgtc

SEQ ID NO: 162300 - DNA, 5659 bp, Cannabis sativa
  modified_base (5599)..(5622): a, c, t, g, unknown or other
aaccagccttaacaacaattaacacaaaaacagaaaaaatgttaagtgatgattaattgtttaacagaatgatattttttttaattttttaaataaaagttgaaagcttaatttaacaaaaaaaaatcaaaatatatattatggacacaaaatgcctaatattattacaagacgactaactatacttttttttttttttgaaatcagacgactaactatacttaatttataattttttataatttctattaaactaaaataaattaaattatataaataataattttataactgtgctaaataccataaagaccttttaatatttctcacaacaaaaaaatcttataatgggagggaagaggtacgtgctgggtaaagccaacctactctttgagaaatgtgtggtagtagtcatctagattaggcacgtctacattttatccactttctaaaggtccaaacagaaatctccctgattattaattaactaataaaccgaacaaaatgataaatagttaattaataagaacatgaaattatttgctggaaaaagttaacacttaacatatattttttaattaatcttactttcaattcataaaaatgttattttcaaaaaaaaaaaaaaatcattagaatgtttaacgactgagaaagttatttgtgctaactgcttgtttattgatggattatattaattatattcgtagcactatcctcaaatactttacaaaacacataacaattatcaacaaagaacatgtgtgataacacaggagcccctctagcgactttacaaccccgaatcttccccaaccatttatagtctcttatcaatatgctgagaatttgcagaatattgtgttgcagctccaaatggtggaagctttgggtgttaaggaggcgctaagttggattaagaaaaaagattggaaagagtttgtcattgaaactgatagtcttacagtgtgttacgtagttctcttcctatggtttcatactttggaagtataatttctaattgtaagatgatgttaagtaacttgagacatgtttatgtcaattttattagacgttctgcaaatagtgttgctcacttcttagctcgagcatcttatttagttgctgatcttgttattaggagtagtgatattactctggattttaatcatgtaatcaatatggattgcaattaataaagataataattttattcaaaaaaaataaaggtggattatattattattatatcggttcaataaaaaaattggtcaaatataaggatgttcaaaatttaatcgagctaatttaattaatattctcttccagaagaagaaggttcattatggcatattggatattcttgtgaggtattcttggaagatctatctaagagatatctaaaagcaaaaatttatgtagaaatacctctaatatcaggtcctactaaattagggatttaccttgcaacatattatgcaatatttattttatgaattttgacagcaaattaaaaggatcctgcaattatggatgatagtgatcttgtaaattacgttattcttaatttatccaaagtcaatattaaatgtatttactccaccagtgaaagggtttgaaaatcattattcaaacactaatactaaaattagggttcttaagctcgagcgagaacattatcattgtgtaatgcgtcaaagcttttcagctaataatataagctcgcgaacttaatgccctaaccatgtaaattttttggtcttcttctttatattattgatttctaaaatttaattttttataatcaatttgtgaaaatcctagtaaacatatatataatattcaaataaaaaacctaaaaactacaaactatgcaaataatttcatcttaccttcagaaatataaaaaaaaaatcctcaaatgtaggaattctccatcaaaatctaacttcaaatcctaaagaataatatcacttatcacgtttctaccaaaattcagcctatatatcaaaataaaacacaatataagttatactcatagttctaaacaaaacctcataaaaaattaagaaaacttacctcttacgtgctcaaatcagactactgcagcttgttgttcaaaattgaaaaggagctaagaagaagaagggctcatgcttagtattgattttattataggcccacgtacagctttgttggatactttaagagatttctttgtagtagtgaacccttctcggacctggacggtctgaccttataataatgaatttaatatattactgaacatagagtcgcggatcaactccctttgttatggattttctagtacgtaagtataggtattcgaatcaagtaatagactcacaagagtgaggtcaatcctattagaatatttatatattaagtataaaatcaatcactaattttatacgtgtatataatacaatgaatattttatattcattaaatttgatcacaattatttagttaatattctatatatggttagattttgatttactaaatatttaatttctaataattaattgtcaaaatattctgacaattaattggggcagagactttaatgcaaggtcttacctacaacaaccatcgtcttcacaaactcaagcttcaactcacaatgtacttcagtttgggagtacactgaatatttttctctaaagttggatcaaaacaacttttctatggaaaactatcgtctcagtatttgttcgtgggcatcgactcgacgactttataaaaggcactatacctcgacctcctaaatatcttccttgtttcgctgatgacgatggtagcatcaactccacacgtcaagccaatccagcctttaagcaatggataataaatgaccaacttcaattcgattggctatatggctatatgctagaagggatagcctctgaagtcatgggttgcgactcttggcttccctctggcgagctctcaaaacccttttacgccactcactctcgagctaaaatagatgaatacagaacaaaaatccaaacaacaaggaaaggctctcttacaatcatagactaccttcgacaaaaataacaatgggttgatgcactcgctcttgcagtgaaccatattctgagtctcaccttaatttgaatgttctttctagtttagacattgactacttgcctaccatcttaatcattatggctcactcatctacttcttggtaagagttgcaatatattctcctaattgggtggaccaactcagtgccctctcgtgacacaataaactcattaatgcatgcaatttatctacaaatctggctaataaaggaaattctcctactggtggacgaggttcaactagtaacactccaaatggaagtagaagaagtttaataaaaattaaggaggtggtcgttttcgtggctgaggtggcagtcgcagcaatggtcccaaacgcaattgccaagtgtatgggaaatatggtcattcggcagcctattcctacaatcgctacgacgtttccttcatggaaactccaccaggaggaaatacccatcagaacaaaggtccagcaaatccaatagaccatataacattaccaaaaacccttgatcatgatgtgttgtatgcagacaacggaaccactagccatatcaaagttgagtccaacaagatgcaacagaaggaggaatacattggtaaggaaactctcatggtgggtgatggtaaccatcttaaaatccaacatgttggtactggttcttttcaaacttattctgcgtcaaaactctctctaaaagagcttttacatgttcctaatattgcaaaaaacttaattagcatcttaaatttaacaactgataatgatgtttttgttgattttttctctcatttatgttctgtcaaggacaaggttacaaggtaggtactgattagagggaaacttaaggatggtctctaccaatttgagacgccacacgcatattctctaccaagtctcaactctaccacaccaaatatttttcttcccaatgtaaactagctagtggctgctagatcttttagttcaatcaagaatacatggcatcataggttaggtcatccatccaaacatgtcttagatgttctcttaaagaaaatgaatgtaagaatcgattccattgaactaagcttctgtgaagcttgccagcttgataatacaaattttttattttatatatatattttattgatgactttagtaagtacacttggatttatccactacaagccaaatattacttttcgacatttcataaccttagttgaaaatcaatttagaaagaaaattaaaagtctccacatagattggggggagaatataaagctttcactcctgatgttattgaaagtggtatagcctttgatcattcatgtccacatacctcagctcaaaatggaagagctgaatgcaagcatcatcacatgtggagatggacttaccttgctttctcaatcaagtgttcctcaaaagtactggtgggatgctttttagacaacagtaaatctaatcaatcgcctacccacaccagttctcaacaataaatcaccttttgaacttgtattaaaaaggcacctaattataaatcacctggacgcttgttcttttcacgaaatgttatcttcaatgaagacgaattttctttcaaatttgggttttcaaacactcataaaccagagtcatctatttccctttaattttgatcttggtcagcatcattttatccaaaatcatctagcatgattcattcttcaaatgtagcaggttctcatatttctaatgaccatcaggtaaaaaaccgcagttacatcatctaacttgtcaccacctcatagacataccacaaattaggtaaacaattcaattgaacatgctgttaattttgatttgactaatgagcctgcttctcctagtattttagtaggcaaatcatatcaaaatgaagcacctcatgacacaaaattatcatcaacttgctctccaaatgtagatgaaaatgcaacctgtatatataggccatcctatgatcactcagtcaaaggctagaattctcaagccaaagacttatctaagtcaatccagcttggaaaaaattagtcgtgaacctcactctgttgctaatgccctaaatcatgctaggtggaatgcaggaatgaatgaagagtttcatggtcttatcaagaacaaaacatggttcttggttccacgaagtccacacatgaagatagtgggaaacaagtggatgtataagtagaaaagaaactcaggtggctcttttcagtgatttaaagtgcgtcttgtagcaaaggaatttaacaaaaggttaggtgttgattttggagagacattcaatcctgtaattaaagcctctacagtccaacttttcgtcactataatagtgtctcgaggatgggatgtgagacaattggacataaataacgcattcttaaatggtcatttggtcactataaacaaccacaaggattttttgatgaaccaaaacctaattttgtacgacaagcaccaatggcgtggttgttgggaatattttactagnnnnnnnnnnnnnnnnnnnnnnnntttattaacatcctaaatatgaaagatcggaagagcg

SEQ ID NO: 162301 - DNA, 1484 bp, Cannabis sativa
actcataattaatttacctacgacttttcgattgatccaaaatatataggacttttcgattgatcctaaaggctgatataaaaaatattctctctgttcgagagtataacttcatggaagtttttaccatagcctagtgttattgactgttaggctgtggacttttcgattgatcctaaagtctctatactgtgtgagtaacatctaagtgcagtgctatggcggacaatagtctcagccatctgtttgaagatacagtgcagattactacggaggatttaacttgtcgccttgaccccggcgaaagtgaagtacaggaaccccaaggaaatgtactactgggaaaactcatctgcaaaggaaaactgggaagaaaggcaattgctggaaccttgaaaaaagcctgggcttctttcaaaggatggagctggaaggaggatgaagatgggattatacatttcacctttgctaataatgaagatgcctggaatgtcctcaatagacggccgtggatcatttgtggtgctttgttggtcattatgccatggcaaacgtggcttgctccatcagaagtaaaatttgataagtccccagtgtgggtgagacttagcggtattcctcctttttactggaacaagaccaacttggaagaactagctgcaaaagtctcagctatatacaaattgccccgatacattgacttcgagcggggatcatttggtatggggacactacgctttaaggccaccattgaaatcgataagccgttattctcggggtttttcatgaagagggaagccatcaaagatttgtggattcaatataaatatgaaaaattgcctaagttctgccaaaaatgtggcattatatcgcatgaacagaagctatgctttaagcctcctacagtcataaaggactccaaaggcggttttttccctatgtatggagcttggatgaaacatgatgacgaggcgagatggcctttctctccgattttgccaaggtggttcgaggaatggatattgcagaaacggctaactgtcgacaagaagttcaagcaaatgtggaagatggacaactctttgaaagccattgaatcgtgggaggctagagaaacaagaagacaatatccagggaagaggcgaatggtcgagcaagtgattgaagacttgccggaaacggaggaagaacgggttagccgctttccgatggtctcgctgcctgggataggtgaaatttgcccatttgaagatacagccaatctggtggtgaaaaaattgcctgcaaatttgcctcttctagagccaacaactgtcgatcttgaaaaggactcatcctccggcgtgcttttgagtacgttacaggcagcagacaaagggaagggtcctgaacctgcgtcggatgcagtaactcagaaggcttccagtcacaacggacaactccttttgtaatgaccgctttagtaatttggattagtaaaggca

SEQ ID NO: 162302 - DNA, 2014 bp, Cannabis sativa
ttaccatgtcaacagaatgattttcatttttttccttttccttttacctctcacccttttttgattctgtcttgctggattttctttttgttatttttgaaaagagatgagtaaaattagccatcatttcaagactcgagaggttctatgatcagtatttgactatcgttctaattggttggccgatgaagatttttgtctgtgaatattatattatggtctggtacattaacgctaattctagaaactaaccttttcataaccaaaatattttgactctgcttttttattatgaattatttggcatttggcttgaccccataaagaaaatgttattaaatattaatatttatcactaatcataaatttcaactgttctctccaggtgtatgaacgagtctgttggaatacgatggttcaattatttacttactggatcatcagcttttttgttctgtgtctattccctgtttttctatattatttttactttagtatttttgatgtatgatgctttataataacaaaaaaaaaaaaaaaccatataaattcataatcataatctgtcttccctaacctttattcacaataatgtcatttactttggactaaattggaaaatgtacaaatggctttctttctttcttcttctcattataattgaaaagaatatgtggtgaatgaagggagactgtctcatcagtccacagtctcaaatattactttgccaatgtggaaattgatggtcttagaatcacagtaggcagcataataaaaagacttggccaccagtagaaatgtctgcttaatttttgtgttgatgtcatctgaagatttttgtagcaccaattgcacaacctcttgcatatctgactctatttctggtgttaagatgtttctgttaaattctccattttgatttgcctgtattgattattccaaagaaaaaaaaaagttcaaataataatggactgtatctacaaagatgatttactgggtccacacttttcactagtgtgactgtttaatgaaatgtctaagtcaaacaaaattaattaaaatataaatgtgttgtggatggttgtgaatcatatataccaaccttggccctatgcctttgtctttgaaagtgacgaattttgcagcaaactttgtttgtggtactgaagagtttttcatagtgaggatttgacagcaagagggccttcacaagtgtacggcctgagctaaggtttattgtttggatcaataattctgcttcttcttcgtaatgtccatcaccaccctcttgccacttccccagccacttttcccactatacaaaaaaaaaaaaaatcacatttaattttgctcaaaattgtatagataacattcggtgccgtggaatcttttactgtatatttaagaatttttggcaacaatattaaaatttagacgttcaagtacagattcgaagaaaactacacagtttgacagattatatgtacgtatgtttggtcttttttattttttggggttagaacagacagaattcattgaaattattccttcagtatatatatacagctctaatatcaccgtaccattttttttcaatgcacatgtggtggtgaagtgatatatatataaagttgagtgcattatttacattcgacatatatattgaatcgattgcagtttgacaagaatatgtttggttgttgcttcttctaaaaataaaataaagtacttgaatttcttttttacaactaattttgactttaaagtagattatgattgaaaatagttactacgtgctagtgagtaatcatgacgtcacatagatacgtattctccgtataaattttaaaaaaattttaatttcttgatcacataactatatatagtattttgtttattttttaagaaaataatgagtaatttatgttccatgtaattgaatatttaagtctgtattcaacattttaagttattattattatatttttagaatttaaactactttttttttaaa

SEQ ID NO: 162303 - DNA, 4813 bp, Cannabis sativa
taaaataattccaacatttcatacgagagagagaaagagagagctacgtaccgagacaaagagaaagcaagggtttcaatagtggacgacacaacagagcagaggatggcggtggacgatgcaatagtgagtgacagtgggtgggcagcggtctttcaaaatggggaagaaggtgagagcttttggcgcaattatctgctatagggtttcgaaatgggggctctgcttgggtttcaaaatggcttggggaagagcgacaacatgaaatcctattttttgaaaattgggtttttataaaacttaaaccgttttgcttcagtggataaccgtggcaaatgtattaacctctgtttttaatcgaagcgaaaataattggccccacttttccaccgaagcaaaatgtaaaagataatttttaaaattttcacatttttcctcggttatacttttagcatcgaagtactaattgacgctaattggtatttttttgcttcagttatactctgaagcataatatctcaattttttttgcctcgatcaactattttggcgagacgcgttgaccgacgcaaattaggcattttgtagtagtgcaagggagaaaatttcgatagttaggggaaattatgtaaactagcaaaattccttcattcgattagatcaatctagtgtaaagaattcaaagtcataatacaaatttattgttgatcaattttttagaatcagcaccgagccttatatgtgtcctgtttaagacactaatggagtccgtattgacaaaaattacaattttacgtattatattactaaagaaaagtattaaatttgtagcatttacaaacttaaaattttaggtatttacgccactattaatcaccctaaaattatatatccaacattagagcaaacctatagggtatatattgttagagttttcctatgtactatatgcaaatagtaaatctttcaaaagaagaatacatgattttccttataaactactaataatcatttaaggttgttacattagatattctccgttcacatgattaccttaccttattttccttatacacatcatcatgctgaaagatatatataaacgacaagtttgggttctccatattccccttcctcacctaacaattcttcttacatatccctttgaaccaggaacatatatgacctactcccctctttccatcaaaattagctctatataatttattctcatcctccttaagctttttattaactcctagaaagtctccgttataataaggatggagagtagtgtcatgcatcatcaagatgctaataaaagcttctctttcaactccaattttaagtattcttcctcctcgttagaacttttcacagatgatgatgatgaaaatgacgatctaagccacaacaaagacagcgacacagaagaaaattctttcatagaaatatcattcgatcaaccaaagattaatcaaacggaagatcaatcaaacggcgatcgagtgcttcatgaggataatgttgaccacctccgaatatcgttctcgtctagtttcccttcatcaattcacgatcatggaatttataatactatcaattatctgtcgcttgactctactcacacagaatcagctgaagcaacagttaaggccttatcggcattttcttcatcacaatcatctttgtcttcaataagattatcatcttcgacttttagatcttcttatactggccccagtctccctcaagcggttgtggggtctgagtccttcaatccacttgttcacaccctactgttcagtctcgatggccctccgaacatggccgacgaaattaacggccttcatgatgatcaaaaggagaataataggcagttggcaatcatcaatgccaacaacagaaggtatattttacgtacttattactctaatgtgttcatattatgtgcaaccgttcattttatatatattaaattaacaatccatatcaccaatgcaattacttctaccgatacaataaatctacaataaacatgtaaaatcaaaacaactcaacaaccgaacgagactattttgtgttttatttttcactattcttggctgagattgagttatgcatttcgtgtgtgaagttattattttgattatttcgtatctaatgaatttttttggatgttctcctataattgaaatacaattaattaatagagatattctttttagtggatcagtagttttaatatattttaattagcagtcagtaccaaatccttttactataaaataatcaaacgtattagtcttgactatacacttcattgaaatttaaagattataagttacaatcaataattggtttattaacttatatacacgtatatatattcgtttattatagaaataaatgtaaacatttattattaggtgattagaggtttttgtgttgatgttacttgaaattcacttataattagttttttttaataggttccattaagtaatttaagtgcaatatatatatgtaatttttttttaattaggtaatgtattctttttttttattatttttaaataaggtttgagataaaattttagctattgctacattggtatgtcatttggatgattatatataaacctatttttaaaatttttaaaaatttcttaattaaataacatatctgataatgcatatattgaaatttactatattcttaactaaaactcatataatcaaatttgagtgtagtatgtctatatataggttggattctaaacttgatataaagattttttattctcaaattttacaaaaaaaatataatgttgaatcagttacataaccacactttatatagaatatatataatatatacattatcattccaactacacttgcgtctatattgttagactaatcaactaatattgacttaatatgttaccatattcatttattcgattttaatatttaaaccgcaaaaatagcagaataaattgtcaaagaaataatgttgctttggttggaggtaatgtacgttggattgtatttttgtttggttggatatttttatacagcatgatttttccgcggtaaatgactgaaagaaaatactatttccagtgtaagatgattttatcaacgtttttttttataaattttaaattttattctattgtattactactttcattctcactctcctcaaccaaaaacaaaaatatatatgttagattaatgtatttccatttccatttaatttcaatatccctaacataaaatcgttaagtcaacagtatgtttacagctacaattattggttgcttctattactttaattttacattgttctttttgttttcttttctaatatcttccaaaaaaaatggacttcttactatgcatttattctttccctacatgatctatgctgattaaattattaatgaaggagagaatcgagcattacacaagtaaagaataatagtacaaaaagcagtactagtggcatcatgaagttgttgatgatcaagtttcgaggtaccaaagttcgaaagctatgggcttcattatttgccaaatctcgtggccatgatcaccttcacttctattcaaacaaagccaatgccaatgataggtcacacaaacctaagagattaataagatcatccacagaagcacaaacaatagagtgctaccatcatgaagcaatgtacattagtaacgacctcgtaagcgacaacaaatacacttctcataatcaatacaagtgttctagagcgatggatgtaaacatgggtgccctgaaaggggttttaggagctgtgaacatgacaagaagtgctcacaataacagtcgaagtagcaatagaaaaaccagcagctgtcctagctctttaaagtcctctccaatgcaccaggggttcgcaagtagtgatgataacaggaagtttttcccagctgaaaactcagttcaggctgccattgctcactgtaagagctcacttggccagtcatcagattttcacttctgaattacttctctagctcaatttgtatcctcccacaatagcaagagctagatatatatatttatatatatatatataatataaactatatttatctaattttcaggatcatgattttatttatttgtaccgttaaatttatgtatgtcttttataaaccactacgtattctacaatgatgttaattagatctgctttcttgagttcattccctctaaatttataataacttcatacacctagttgaatgccaattatatttctctcagatcattctagttttaaacatcatatataaaaatgttgaacacactcacactacaaaaaataaaatttttagtcacaaccatttatttacaacaaaaataacttgtgactaaatgtgtgtttttaattatcacaacttattagctacaaataatattttagttacaataaattatttgtgacaatttttaaaatttaaaattttacaatttataacaaatgatactaaaatgttgtgattgaaaatatatttagtcacaattataaaattttgttcttaaaatctgactaattattatttaattactactttcgtaagttgtccctattaacatgatttttagtcacaactatttaatttacagcctcatttagtcacaaaattacttattttctttatctctaaaataaaaattaaaatatataggtaatgtttccgattttatacacttaaatacctaatgtttatttttggtggcaaaaatacccaatgttacaattctcttaca

SEQ ID NO: 162304 - DNA, 4201 bp, Cannabis sativa
aaataaaatttattttatcctattagagtataattaaaaaatatggagtcagaactaaattcagtataaaatttacacgatggtcgagaattcgaatgaaaaaggaaagataatatacatgcttatcgaaataattgaacttttaattttcctcctacatcattgtcaaattgtttattacttttgagttttgacagttacaatattattcttctgacctagtaaaaagaacctttcaactagcttccatcaatttctttagggcagaaacataagtattatgaactcgaactttaaaaagaagaaaaaagataaaaggaaacagagatagtttttcgttcatttaatttatatcacacaatacgtaatatttaaccaatcaaattggtgataattcaattttcatatatttttaggctactatgaaaaggacatataaattgattttggtaactattcagaattgcccgacatctatatatgtatatattgtttataatactattactagtattttaattatcattgtattccttttgaaggggtctcgggaatgtgggctcggaaagaacatgtggctcttctttcacatttttctttttctttgaagaaggtaaaagcttccaaaaagaaaaacaaattttataataataaaaattaaagagacaaaccctacagacatagtcatgcaatgaacagaagagaagaaaaaaaaaaagtgtagtggtgggtagagctaagagtacctggaaggtcacatacgatagaggagtccttctcacgaaatttgtctttacattcggcaccgacgagtgaataatacacaccaacgattcccacatgttcaaactcagtgagtcacccacaaacattatcttcttacctctccacttcgttagaaaatttaccccatcaaacctaccaatatttcaacaccaaatacattatatacaaaacatataatacagagctgatctcatctagtctaactacacctgttgtatctttaatttgatgagcttaaaaagatatgtgttttgataaaggtgacaaaattttaaggaacatgaacaaatcaaatgctgtcattatctaaagatacattcaattcaaaaacatgttcccctgtttttgcaacaaaatatgcttagtgtgtgtgtgtgtgtgtgtttatataaggatatataaaataaaatacctgggcaagtcacaagagtcaggtttccaggcgtacttaagatactgtttatctggtctaccatacttttggcaatcaaactcaggatctataaagggacaagaggaatcgtagagaggataagaagggtcaaaaacccattttccttgaaacaaattacaaccattcaattgctttcttccattatatctactcacgttgtagaaaacatgctctgcttttgcttcttccacaaacaataccataaccttgagaagaaacagaagaaacagggcttgttggacccgcagccccattttggactttggaccccaaaaaaaccaaaacacttgtctaagaagagagaaacagcagtggtggtggaaaaagcttgtgttttatgtccatatttatactgcgtggaagtgagacaatgtacattgagagatagaaagagagtgtgtgtgtgtgtgtaagagagagagagaaagagagtctttggcttggcgggctcacatggctaaactctacgagtctgtgataattattttaatacttttttattttttatttttacggtgaatggccttacgttacaaaaaaatcctggatggattttgggttttatggtgaaatgtgtaaaaggaaaaagagaggaaaaaaaaaacacaagatgtttaaaactccaatgcaatgttttgatttttatttataatattttattaaaattgggtgagtatgatgttttattgtttgttttgttgtgtcatggtcttgagtaaaaagttctcttacattcctgaaacggtggtcacggactcacggacatcgtataaagcttttcttgatctttacacgattatataatcccaaaattggcctctaactaattagttatataattataagttacaggaattatatttaaaatatttaacgtgtaattattattttttttaaatgtagcttaatggtattttataattatatattagcttaatagcttaaagatcttggattcgaacccatgacctctccctctttcccattcctctctcaccactaagctagccttagtggcttaacgagtaattattttaagtttatatcatcgcaatagactttttaaggcaataaaatctgttaaaagaggcccttaagtttggaagaacattttgtagggtaatgaattatttgatgggggacactttagagagtaggggataatagagatattgccatttatgaagacaagtgggcaagttttggaatcttgtctcaaaatttacttgggatggatagtacggtagatttttcgcgatctaattttggagattgggatgcaaatttgattcatagtttgttttctcctcgtgaaacttttgctattctttctattctttgacctttaggggtggcaaaacgtgtcatcgtatcgtgttcgtgttagattttatgtgacatgcttttatatttcgtgtcaagcgtgtcgacctattttttgactcgtgtctaattatctcaaccctaacctggcccgtaaaaaaatcgtgttgtgttcatgtcgacccacagtgactcgttttgctattattaaagctggaattgtagagaaaaataataaatttaagctccattaaaaatacatttatgtatatacagtttgttatatatatataataaaaattaaaatatttttaatttcatgttaaaaaaattaaatttaaaactttttaacttaacattgaatcactaaatatatatttttatataattatattattattattaattttttttattttattatatttaaaaaaattgtgtcaaacgtgtcacattcgtgttaaacaggtcgtgtcgacccgcatctaattttcctcaccctaacccgtaaaattcgtgtcgtgttcgtgttcgtgtgccgtgtcgaaacccattttgccacccttactaaccttcttctccatctaatgataaattaatttgaggtcatgatttttcaagttttcattctgtcaagaggggttattggtttgtttctcgttgtttagtgtgaaactagagcaaaggcaaaacaaagaatgtacaaaccagaggtaaaaactaggaagagcacaaagacaaagaattgccaaaaaaaactcaacatcacagttggcctacattgttatttatatatgagtttatgagtacaaagcaagttgcagaaaaaataacagaatcagtaaactaactaagcaatacattttaactaactaactgatttaactatatgtgtaacatccccctcaaacgaaatgatgaagaagccatttgaagtttgctctttagatagttaaatctgtctattgttaatgacttggttaaaacatctgccacctgatcaagtgaaggaacatattgaactgcaagctgatgagctaatatttgatcacgaacgaagtggagatcgatttctatgtgtttgcaacgagcatggaacacaggattagctgctaaagatgttgcagactggttgtcgacccataggacaggagttttaacagtaagaacttgtaattcacttagtagagatgtaagccatcgaatttcagcctcagcatttgctaccgcacgaaattcactcttagtacttgatcttgcaaccacctgttgcttctttgctgaccatgatatgagattgcagcctaggaacatgacatatccacctgtcgatctcctatcatcaatacaactggcctagtcagcatcactatatccttgtaaacagagaaaatctgttggatgcagccacaagccatcatgaatagtgccttttagataccttagttgtctcttgcaagcctcccatgtgtattggtaggagcatgaatgaactgactaagtttgtcgatgatgaaagtgttgggattttatgccctaaataaaactcatttcaatctatttgatttgttattaatagaagattagaagttatttatgtttacatgtagtttttatgtttatggtttaatgtgtaca

SEQ ID NO: 162305 - DNA, 5745 bp, Cannabis sativa
caaaaaatatcaggaaaaacagagagaagcgcgtaattgggaaatatctgaagtatcatcttacccaaaataaataaaaaattgaagagagaaagtgagaaatttgcaaactcaccatcggagctacaaacgagtaaaggaaaatgagtactgccactatcggattattgagctcggcggcaaccgctgcctcttccttcacccgttccggcgccggtaatgcttctcatgatcatctaaccattttcggaaccatgaattgttcttcctccgccgcctcctcttcttcttcttctctttctctcccattttcgcctcccaaaattgcttatacctttaccaacagaagaagaagaagaagtgttagttgtgaagtcgctatcaaatcagactcaacgacgtcgtcttcttcttcagatttgtctgcttcgtcgtcgtctctttccgaagaagacgcggctggagtagctaaggttggagcgagggttagggttaaggtgccattgaaggtgtaccatgttcccaaagttccggagatagatcttatgggaaaggaaggagaaataaagcagtatgttgcgatttggaaagggaagcaaatctcagctaatctaccttacaaggttcagttcgtcacggaagtcgaaggtcgtggcgctgttaagttctttgctcatctcagggaagatgaattcgagtacctttaggttttcttctccttcaactctcatggcttccacaccaggcaaatatatctcttctttaccctttgttctctactctctttatggtaaaaataaaaacttgaatacattatagcccaagagctgagttcccaatacagtattgtatgtaaatcactttgattctgatgttattacttttgatgtaattgatattttattctggctatactgttgttattgccattagattatggtgaaatatatgctcgtttttgggttatcaagttagcttattttgcaaaccagcacctatcttcatggattagcgttaatttatattttgccattttcatctaacttgctggacgagtgactttatttttctcctaatcacattttatggggttgctttaagatgagtatattttccttctttttatgggattgaatcaggcctgttatggttaagttagattgaatcagacttgttatggttaagttacgtgataattttgtaaagctttgggcaggtctgtaataatctgttcaaatcattattgcataagtaaacagctttcaagtggctttactattcattttatgacacaatgagtagctaggatcaacctgatttgatttgtttctgtttgatggttttataaacattggctgtaatttgttcgttggctcttgatcccctgacgactacttagtttgtaaaacttcctcaattatttgggttgtacaattggtttaccctgaaatgatattccagtattgctcaagtagtcttgagcgaacttcaattttaaagtcttgcttaaagctgtgaaagtaaggagttatggctgtgtagtgtgctgtactaatattgcttctcggtatcacatttattaagtttaattaggttttgttcttatggtgtcaacaattctagaatatgaaagctgtagtcacttacttaaactagatcatttggttgctaatttggtgacgttaaagctagactggtccatttagaagtttaagctatagaatggaagaggactgtgttctgtgtgttgcacatgaagaaaaaatgaagtaaagaacaaaagaaaagcaagctcaattacttcaacaaatgtgcatcccatttttgtggaaattgggtggttgcttgtgagattcataggggtgccatcttctattgtctcttgtttggtgagtctttatctgatcactttagcgatgcgattacgtttaaaattcacaagttgtctgagtggtacttagaattaagtttaatacaatcagttgtgcttcctttactgaggataatagtgtagactatgagcaaaggaactcctgttactcatatttcttatactaggcagatgagcaagtatattatgcttggaatgttagaaaataaaagtcgtcaccactgctttactgatgtgtcttatgaagctttaatggaaggttttattcgtggcttcttcaaatatctacttcgatcgttttcattgcgggaactcattaatctatttggaatagataatatagatatcaactttagacgaattcaatttaccctttctcccaaatctcgtggttgcaacttttaaaagttctttgcctccagctataaattcccttgggtcttcacttggttccaactgttctttcgactttgggatttgcatttctgtcttcttcttctattttaatggaactgtcttattttgttgatggctgcttttactctgaatagatctggcgtagatacatatcttcatccaacattctagtgaataggccatccgcatttcttatttttgcagcagggtcccaatattgagcctgtaattttgaaacggagtcccatgatttttgtctgggatattggagtatggtgtctctcataaaacaattataaaaatattgagttatttatccttgtcatttatcatacaaagagtccttagatcaagctttgatcatctcataattagttgatctcattcagacttgaattgcctgtatcttaagtagacattgagtgttttgcgtgtgcaacaatttggaacatatccatgactcacataccttatacaaacgatttacatttattgtgtttggattttccaatatgtggaaatgatcaagtatgattatgaggcgaagggtactttttaaatttggcaccaattctaattctcaattaggcaactgagttatattttttctcaaattcgtatgttgcataggtttctcaagggcatttctcatcatttttgaactagaaatgactgatgtgagattctgttataccataataagtaatagaacgaaattactgaatgaagactctagattgagtcatggataatgtcgttctctttatgacatttcgtggctctagcctcgttgtgcaagatagcctagcaaaaaaaattgtttctgtaaaagaatataatggggtcgtgggaggaacgttggtgatcacctttattattaaaatatactctaatggtaaacaactttagaaagttactaatatggttccacacacttttaatatatatttattttaaattcttacttttcttgtttcaattttaattttaacattttaaaattaaaaaatgagatgttaatgttgttactctatagcaatagcatatgccaataaattcaatctaatgcaatagctattctttaaagtagcttcacctgacatagcaacccatatattttatgcgttggagctctaagagcagctccaacctaaatgttaaagttgcatatgaaaaagtattcttatcccatatgagactcttttcactatcacacactaaacacttatcttatttttgtaaaatttatatatattcaaacaacatttgtttccataagattgtgaaaaaacaaaggtatcttttgaattgaacatttgcataatgcatagtgattacaatttaaattttactagagtgacatgtagtcttgaactctatctctaatatcatattacacaacaacctttctagaatgtactcaaaagtttgtgctttaatggtcatgcacatccatctcagtatagtgaacgttctagaaagtctgctccaaatttcataggaagtgttctcattttcacattcacataggtgagtctatcaagagtactcttgtatctcggttctcctctctacatagagtattaatctcattaagagtttctattaactcatcctcatatcgcttcaagacttcatccttttattatataaataacatgatcaaactcatatcacctcacaacttctgtcaaaggattgattaagttgtcatcaatgcgtacatgatccactctaatagctcatgttgagaggaactcctctctaacagtgttgtgcttacgacatatttgtcgttacttaccgttgtagtaataattctgaatttttacaatagctgcagtactttgcagtgaattaacacaaatggtattagtcattcccataaaagggattttagttagcagtcttgtcagccaacctgcttcttcactagctaaatctagtgttatcatttcagactccatggtggattaagccaaaataatttgtttctttgacaaagtgttgcttttgagtcatttgctccaccaactatattaaacatatagccacttgtttccttagactcattttacaaagtgtttcagttagcgtcgcggtatccttcaagaagagctagaagcttttgataatataatccaaggctcatgtttttcttaaggtattcccataacccttttaatatcatgccaatgctctatactaggtctactagtaaacgctgccttagggtcggtatcgcacaaaaatatattacttcctcctatcttagtcaagagatcaaccttgaacaatattatagacaaataccttccttaggaggacaaaaatgaagccgcctccaggccagtccatactctttcggtgttgaccaatatggagaccgtaagttacattgacatgtactctttctcccactcactattttaagttaatgtgtttattttattagttcctagaattaatacatatcaaccactttaataattatgattaatttatttataataaaaacctaaaattatatataaatttcccatcataattattaaatatgagttaactctttaattcataatttaaaactcttttaattaataggttaatgtttaattaccaaattaattctaatttaatcttctaaattaaccttagtcagtatacatatgcttttagtttcagaaagggtaaacacataaacacataggataattctaatatatccactatgagatgcatgataatataattgtgtgagatttttatgtatggcatgttattcactaatacatgagcatgttattaattaactattaatgaacatttatttattagccataaataaataatgatgataaaccgagtaataattgtgtacttctaattttacaacccttaaaaaataaaaaatttaaattacaaaattaatctacattgctgcaagggtatttttataattttataagattgtcgtaagcctgaaaaattaattaaaatatttttaattaattattcttaaataaaccttttatttaagacatcttttaaaccctttgaattaattaaaataattttaatgaatttattattaaataaatcttttatttaagacaactatattattatattacttttgtcttaaaataataacatttattattttatttaggatcaagacaacttttttcttaatattgttatagattttgaatttgaatttcaaatctataactaagttatatttatttgattcaaaattaaattttaaaaaataaatatcccacaaaactatattaggggtcgtttggtatgcaggtttcatttcatgggaataggtttgatattacttggagagtgatgaagggaatgataaaactaggaaatcaacattaccgtgtttggttgacattggaatggaatgtgacaactttttt

SEQ ID NO: 162306 - DNA, 4178 bp, Cannabis sativa
agggcataaaacccaacaacatgacactaccttaaggtcttactttttccacaaccactcaatctagtactccacttatttgcaaattgcacaagtccatatacggccttaaacagtcttcaaggcaatggtatcgcaaactttcagatgctctaatcgaagaaggttttcatcaatcccaagctgattatactctgttcacaaaaggatcacatgaatcctttattgctctccttgtttacgttgatgatatcatcatcactggaccaagcttgtctctcctgtatcagttacaagagtctcttaaaaacagattcaacttataagctctcggccctttaaaatacttcctcggttttgagatagcccgatccactgaaggtctctttttatctcagcagaagtataccattaaactgcttgaagacactggatacatagggagcaaacctaccaaaacacccatggacccaagattaaaacttgatgatgaacaaagcgaaccccttgatgatccttccccatatcgccaattaattggcagattactgtatttgactttgtccaggcccgacatcacctacgatgtaaacaatctcagccaattcatggccaagcctcgtacaccccatctacaagattttcaccacctaattcgatacctcaaagttagtccgagccagggtctcctatactccacatcttccacattgcatctacgaggtttttctaactctgactgggcatcttgccccactactcgacgctctaccacaggtttttgtgtcttcttaggagactgcctcattcctttgcgcaccaagaagcaacccaccatttccaaaagttcaactgaaattgaatatcgtgcccttgctgccacggatagtgaaataacatggatgcaatatctccttcaagactttcaaattcctcaaaatggtccagcttttatatattgcgacaatcgctcatcaatacacaaagccaacaaccccacattttatgaatgcaccaaacacatagagcttgattgccacttcatacgtgacaaaatcaagaactctagcattcgactcataccagtaaatagcactcttcaactagctgatatcttcacaaaaccgcttccttctactacactcatctcacatttccaagatgtctgtccatgacatataccgtccatcttgagagaggagggggggatattagaattattaagtcggttcttacagctatgaccgttattactgtttgtaactttagtcttttgtgttagttgtctgttcttttccctttcttgctttagttaataagtcggttggttcttttaactgtagtttgggcagctgagttgattatcttatctagagttagtttgcctaactctcccctattttccttttcactatatatagctgtaattactttggacagttcaatttaataaaatagaattcagattaacaactggtataaaccagcaacagagaaaacagagagaaaaatagaagaggaaacaatggagctttttattattatgaattgaatcaatacaatcaattacagaatgaatgaaagatcagcaatatatagctgacaagaatcagttacaaactaacaactctaacagaaaataaccaacttgacagctaatactaactaaccccaactaactaattctttgatactccccctcaagatggaccatagatatctctaagtcccatcttgtctttgaatcccttgaattgagtagaaaagaggggtttagttagtatatctgccagctgatcttttgttgagacatggacaattttgacaatgccttcttgcactttttctctcaccaagtgacaatcgatctcaatatgttttgttctctcgtggaaaacgggattcgctgctatgtgttgtgccaatttattgtcacaatataaaagtgcaggtccttcatgctcagctttaagctcctttaagattgacaaaagccaaactacttcacaagtagtgttagccattgccctatattcagcctctgaagaagacctcgaaatagtgtgttgtttcttacttttccatgatatcattgaagtaccaataagaacacaaaaccctgtagtagatcttcttgtatcaagacaagaggcccaatcacaatcagtataggcatgtaattttacctcagtttttgctgcaaagaacaatccttgaccagggctgctctttatgtattggaggactctttcagcagcatgaagatgagtcattcgtggtgttgcaaggaattgactcaacttattaactgagtatgaaatgtcgggcctagtgattgtcaagtattgtagtttgcctacaattctcctaaaaagagtcgggtctgcaagtttctctttttcatcctgcccgagcttgagattaggctccataggcgtgttcatgggcttgcagcctaaatgtcctaagtcctcaagcaactgcagagcataatgtctttgcaaaacaaagatcccttgatctgaccgagcaacttcaagaccaagaaaatacttcaaatttcccaagtctttaagctgatatctgtcattcaatcttatcttcaaggcttgaagttcctcaatgttgttgcttgcaagaataatatcatcaacatacaccaatagaaatataaaatttccattaaagtgtttgatgaacaatgagtgatccgtggctgaatgataaaatccttcatcaactaaagcactagaaaacttggcaaaccattgcctagaagcttgctttagaccatataaggatttctgcaacttgcaaaccgggttaggtggtagctttccctttggtttgtatccttgaggcaaggacatgtaaacatcttctttgagatctccatgtaggaaagcattatttacatccaattgatgtaaataccaacctttcatggctgccaaagctaagacaagtttgactgtaaccaacttggttactggtgcaaacgtgtcagtgtaatcgatcccctcctgttggttgtacccctttgcaaccaaccgagctttgaaacgttcaacacttccatcagcattcaattttatcttgtaaacccatcttgaaccaataacatgttgatcatcgggcaaagaaacaacaatccaagtatggttcttctcaagagcgtcaatttcagtatccatagcaatatcccactccggaataccatgagcttggctgaaaaattcaggttcaaagtgacttgaaatggccaatgctaatgctcgaaaagttggtgacaacctgctataattgacaacttgagacaaaggataaggagtgattaaagagccatgagaagacaaagcagaaggattagaggctagatagcaatgataatcattcaaatatgagggtttcttaacctgtctacctgatttactttgaatggcagtaggagaagaaacaaaatcatgaacataagatggtgaaatcggatcagtagtaagagatgtggcagtgtgcatatgctcaggatatgatgtatttgagtgcatatgttcatgattggaagaatgactatgagataaatcaacatgtgaatgtttattatgcatcatatcagtattatgctgctggtttatagaagtacaatgcatattggagaagaaattttcatgagcagtaggaattcctcctgttttgacataatgaaaaatttgctcataaaaataaacatctcttgaaacaaacacattattggtattaagatcaagtagtttataagccttcataccaatgggatagccaagaaaaacacaaggggctgatctaggtgtaaaattagaccttgattgacttaaggttgaggcataagccaaacaaccaaaagctttcaaatgagtataggcagatggcttattaaaaagaatatgaaaaggagacttgtcctttaaattgggtgttggtgttctattaataagataggcagcagtagaaacacactctccccaataaactaaaggaacataggattgaaaaaggagagctctagccacattaagtaaatgttggtgttttctctcaacaaccgagttttgttggggtctttgaacacaagaatggtagtgtaaaatcccaagctcactaaaaaaagaaggaaactgtaactgttggaaattatttta

SEQ ID NO: 162307 - DNA, 1539 bp, Cannabis sativa
gtgaactgtgaaactttgatttatggacatttctgctgaaaattcattgataattgttttgcactctgatttgaagcggttctgttcttattggactgacagagattatgtggttaggattcatttaagtcaggtgagttgagcagggttcgggagcctgattatggtgattctgatgttctaattgagtgtcgagacgtccataaatcatttagagagaagcatatattgagaggtgtgaacttcaaggtgaatctaatttcatctgttaaaataccaaatcattgtctattttattttctggttgatgatttttgtgtagtgttgcattacattttcttatatactgttgccttttctcttgtatagattagacatggtgaagctgttgggataattgggccatctggtactggaaaatctacaattttaaagattattgcaggacttctaaccccagacaaggtaattatttggatcaggctttccctagagtgtccttactcaattaaatcatctttatcttaattgagctttagaattttgaacattatagaattgcttgatctcatttgttgactctacttactattcaatgagcagggagaagtttacattcgaggcagaaaaagagctggtttgattagtgacgaggagatttctgggctacgaattggattggtaaatattgtttaaaacatatgtagtttaatgtatagttggttctcacattatgtaatttataatgcactggtctataatttaacaggttttccaaagcgcggcactttttgattctctcacagttcgggaaaatgttggtttcctcctgtaagaaaacctacactacccttgttttatttaatagcatctctttaagttagattttgtgattttaatattgtactcctaagataagtgatacatttgagttttgttggatagatatgagaactcaagcatgcctggtgatcaaatttcaaagcttgtgacagaaagcttggctgctgttggattaaaggtaatattctagctataaatgtctaattattctgacagaatagaagttacatttccaaaagcccatgtgctgcttttactagattttggcctttataaggcgtcctgtggttctgtttctcacatgcactaaccttgatttttgttctctttatcccatcaggatgtggaggaaaggatgccttctgaattgtctggtggaatgaaaaaaagggttgcattagctcgatcgattatttgtgatacttcaaagaaagctatagagcctgaggtatggtttggttagtgcataatagcttgcaagtgtatggtttttactcaatcagcctttttttctattatgcttgatagtgttggaaacaattttgtagacgtccccacagtatgtgtaggaaagatactccttatattaccatgctaatctagaatggagagttggattttttttttacataaagcactcatgttgatataaacagattaaaaccttttgtttgattgaaaaaatggaaggaaaaa

SEQ ID NO: 162308 - DNA, 3161 bp, Cannabis sativa
  modified_base (2873)..(2887): a, c, t, g, unknown or other
ctctctctctctctctctgtaattggcttcatattcgtgacatgcattttccttaaaagtaaaaaagtattttctttttatgtaaattggagctaaagccacttagcaacttgtaatgtttcagattccaaagtcaagatccatgttggacttaaattcgctctgcctggaaaggaaagacaggattcagtttatagtggacttcaggtgcataattttttgatttccatattcctattttaaatttggcattctttccaaatatattttcggtggtccatttgtcagattagtgtttctttgccctgctttctttctatttggatgtcactttagcataagatacaccgataactactttatgtttgtttcccttatctggatattatattcatttttaccagtttaacatatagttctgaattgcatcttaagacgtgtactagtggctatattatttaatctcttgcagttggttatgttggttttatgcttggggtattctacattaaatggccttttaatagtagtgctgcatattctttttacaggcaattgatccaaactctaagcttgtgtgcattcacgattctgctagacctttggtaacaacagaagaagttaaaaaggtgtgagaacatattttatgcactttataactcattggattagttttaagtttattctggtaatttttaatgtacaagaacgttatgaatcttcagtatcaaatcctgcaccatcactttctttcttccttccttgtcaagtacatgctaatagtatttgcatattttcctgattgattcagggaattgtttgaccattacttgtaaaatttgcgttgcatagaaaaatcttattttatgtgatgacaacccaaatcaaatatgagaaatgatgcgtaagaaacatgtcacgtcatattcactaaagaatcactcagagtattctggaaagttcttggttgcattcgtggaaatgcaagcatgctatgacactatatctgagacattctcagttgcatctgtggatatgcaggcatgttgggggcacgtttcaaagttaattgagaagacttactgtccatttaataagccaactataagcataagaaattataattataattatacataatgcaaattatctcaaaacattacttcaaagtttgaactttgaatacattccgtgaattattctgctctaagaggctgaataagtttactggtttgcatattaggtcattgaagatggttggttgcatggagcagctgtacttggtgttcctgtcaaagctacaatcaaagaggtagtgaatgcatgttaaacccatgtttatttcctttatatgattagttgttttaattattggatttaggccgatttcagttttgatattattataaacgtgtttcattcaggagcaagatctagctcctgcctttgaaataaccatttatgtctacctatcttgttttataggcattaattgcatgagttccatattaaatgtaaaatcccctaatattttcaccttgtttattttgaaagttgtttaataattatggtgcaggcaaacaatgcatcttttgtaactaaaacgttggagaggaaaaaactttgggaaatgcagacaccccaggtttttaattttaattttaattttaagtttcttttttttttttttcttttcttttcttgcttcatttcgtaatttaagatcatttcaaataatactgattggtcaatgttcatggatgcctatcaattgtcttctacaggtgatcaaacccgagttgctcaaggaaggatttgagcttgtaaataggtaaccacttatcttttcaccacctcttaaaaaaaagttagataattgacttccaccatctcaatttaatttcaagcctgaacagtgaggttactttggttagaagaaattcctcatacacattgtaaaatgaccaatgtactttctctttaaattttgatatagtatgcattaaacttgtctacagggaaaatctggaagtgactgatgatgtgtctatagtggaacaccttggacatcctgtatatataactgaaggtgcttacaccaacatcaaggtactaaactttcacttttgttgttcatatggaagctataattctataaaaagtaatcaagtttaaagtggtccctttcaaaataaatatttaaagtggtcaaatcttttgcaggttaccactccagatgatttattgcttgcggagagaatattgagtatgaactctgtgaaggctgttgcataaatattcattttttgttgtactttcacattctttgtaatctgaaaataatagttatgaggaaatatttcttgtgaagtttgcatctatctatagccaatataaaataataacattaaagggtatcataggacttaagtctaactactaatgagtaaaatgaaacaaatagtacaaatatgtgacagcatttgtagtttttttttttttttttttttttgatgaatgacaacatttgtagttgatctatataaattttaccacctattgctgattatttctatgatatgcatgctacttttaggactcttcaagtgagaaattttataaatggctctttcattgggctcacaatgatccgacagtggttaggggagttccattttgtgtcgtgggtgagctgtggaattgtttttaaagtaatttgcggcataaatatttaattttaacttccagttgcaaataaatatctaagattaatttttgatagtaaaaagttatatttttgaaactatgtaagtacttaatcgttaaatgtttaagttattatcatgtgttttttttattggtatatttaaatnnnnnnnnnnnnnnnaaaaataaaaatttaatgacttgcattaatcagggattgggattgtcccataataatttacttaagactttatagtctaacagaatttttaaaattataatttatgtattattaccgctaaaaattaaacttatgtatttatttgcaaccaagagtcaatatattttataactagtaaactatgggagtaaatggtcgtgcctctcggttgttcactataaaaaattgctacttttagtgacaatcttttagttacaacataaattttttgtga

SEQ ID NO: 162309 - DNA, 4614 bp, Cannabis sativa
actcaatcttgtttgcctacttaaaatctagagtatgtatttgcatatttcttgcaaggcgtttacctccttcaagtttgtacgagttattacagtctacagactacataacatctatattctgaaaaagtaatcagaatccccaaaatgattacatataaataaaaaacagaaaattaccaaagtgaaacgaaaggaaaattaccatctgccttgtccagacgctcataggctcctgcacgcaaatccggctctaagacatatggatgcacatgctttgcatcaggaattaagtttttcggtctcttgcgtttaagtggctttgaactggatataaatgagcttatattttagtctaaagcaacaatattatcattccaaatagcatagattaaaacagaaacaatagtaagacttactaataggagaatacttcaagcttagggtcaacactatctgcaacaatctaaagatagtaaaagaaatgaaatttaatgagtaacgaacccataatagttactaaaaagattccaggagtaataacatcttgaatttgtaaggatacgatcatatgactaaaagatgtaatagtatcattttttattcaaaatgccaatgtattagcagccaataaagacagaatttttctaatccaacaagtaaaaaggtttgtagctaagagttgtaatatacaaaagaaataattaaaatgcatatcaatttaatcataaaaaggatgttctatccacatatttcccacccttctggtgttttttcatgcaaagaaacagattcttaactacatgcacaaccactccaaatttctcatgattcaaacataactgtaaaagcactacaaaaatcatcaagcatttacggaccctgagttgaaagaacatttgactcaatccagtctgcgtttctagtttacaaacggtgtaggtataaactacataattcaaagtttgataaatgtaattcatctctaaaattggcagataatttaaccccctaatcaacattgtacaatacagagatctttggctaagtgtcccgtgcagcaaacacattcatgaacacaatcaacatgaaaaccaatgccagttggagttgattatattagagtaattcagagaaacaaccattgaagattatcagatttcagattgcccattatcagtttttttttattttttttttaaacccgtattatcagttatagttgatagctttagagtgaattaaagaaacaaccagatctattttgaagattatcagacctcagatcgcccattatcaactttcacagacacattcacagcttggtactcttcagtgacctacaaaatatcagttagctcaaaagttagaaagacaaacacacaacttcaccatgtctaaacgatggtattgccacaagaatatcgatgattaccaacccaaaactcaaaattgaagaggtcatgtgatgaggtcaggtgatatctcaggccctattaaaaaaactatacatcaataaaatggaaactcacggatctgcaaatttatataacagcagttcacaatagattaaaagaatgagaatttctaaacattgaattaaggaaattttcaaccttaaagcttgcacacttcaccaagcaaaatggacaagaaaagtcttctgtcactgcagaatgaagaattgatgaaaaaacatcacataaaagctcaaataagagagtaagggatgataagtaaaagtcatgtaaataaataaataaagacaaggaagactgaaaatcgtgtaaaattacaattcttggggaacaaaaatataatcactgatgctaaaatacttagcttcccgctcgctccctccctcccttcctcacccttaccttcaccctcatcctattcctctccctcaaatcaacacaattacaaatgaaaataactgtccatgcttggcatttgtaccataaaagataaaacagtaatatataagagtaactatcactttaaacacagtatattgcgaattgtgagagaatacgaaaatatcagagaaatcctagcactaggagtatatttttgttataaaaagctctattatcaaaactaacccctctgcaattatgaaatggtgaaatatataaataagcatagtaattgatgagatagtatcgtacagtaacagacaaatcaagggtacgcaatacccaaaatattaaagcatgtaataccttctgtcctttgcaacttattgttgtaatatctatagttgaagatgacatttcctgctctcaacctgatggaactagtgacgtttttaatttagtagaaaccataaaggatttgacactatttatacacatgcatgatcaaattacattaatatttcataccaaggaaacagattatcaatttcataacagaaatgtacaaaacagtgacattttttttcatgctgaatctttatttctgtcatataaaaaccctaacaacttgaaaatagaaatggcataagctaaaaacaaacaccaatgcatttacgtgtatttttttaaaaatagaaaatatgacctaatgcaccgaggtctgaaactgaatagattcaataaaaccctaaactagctgtagtattataagttctataattatataaaggctacagacaaattcaaaggaaacctacactagctgtaggaaactcttactataatcagggtgggagaaagagggtgcaattcataattgcttagcacaaggcttgagcatgattcccttggacaagggcatatttatgattttcttttttgagactgcctaacccctacaatatttggggaccaagaaactgagcaattgttatgtaagtatccagaaggaattcgaacctcaaaccttgtgggtgggagcacaccacatgcctgaccatctgaactacccctcttgggtaagggcatagttgtggttgaacaaagtctagtcttcttcattttcttatttagtttgtaagatattaaatttgagtccctatctagaacttattagacttttatttagacttacattaacgttttaaatgttttattaaaatatgagttgatgaatagttgttcatcattttaactatatagttagtgatcaataattaatgagcttagcatttctaaagtctagttgaagcaaaagtgggtttttttagttaactgaaacatttgatgaggaggcccagtccaacaaaagttgtgttgctaaatcctatccctaactctataaatacaatattgtcttatcacaattatatgcttttgttgatctgttgatcttttcttgttttagaaatctagaaaggaagactcagtaagttagtattgcactaccaatcatattaaaactatcttattaattcagtggccgtctaaacatcttaggtttgatattttgtttccatttaagaattatatttaaatgtaataggtttaactctaaccatctgccttttcttttaatgaaaaaaagaaaaagaaaggtttaagttttataagttcacttgaactggttattcgtccaatcatttcttaaatgtccatatcagttgtgtcaccttaataaaaattaataactatgtcccaaagtaatgtgaaaaagaaaatcggatgagtttcctacttatgttatttggtttaatttactagtgattacataacaatgtactagtgaatatggagagggaagaatatagaagtgaatttaaaaacgaaatagcactaccaatgtattctagaagaaatgaaatcagtatctgaaagttgtaaatgcacataaaatatatataaatgagaagatagaaaactttaccgaataatatgagacaaagacgaagaagggatgtcattagacatgtaagaattgtacggagatttttctttagcacacatttcctctgctgaaacagtaacttgaacttgctgagaagtactctttgagaggccaaaaaaaaaagggcaagagaacataatcaataacagtcaaatgtaagaagagtgtaagcaagaagagcgagttgtaatatataaagtcaaataagaaactgagagttgaacaaaccacagtttctgaatcatatggaacttcaatggagatgcttttttcctcatttgaagagctcagctgtaggaaaaaagaagaaatgtaccaataagagatactatacacgaaagaaaaagaaaattaccataaacaaatcctgttttctttttcttgttttgtttgttggagggatggaatggccattaaaattaataagttgtacaccttttgtgataacaaagaagttaagtctaggcatcagatgacagcataccttcatgaggcaagagtgcatatcgatagttgaaatcatttcagccctctgccccagactaaaatttggagaattctcccatgagaaataaagtgactccaattgtatctttccccaaaggcagtttcccccgagtttggctgtcaaacacaaaagaagttaattgataaaaacaatcacctaattggaaacgtttttgagaaatgagttatatttcatacttgatacattcacagctggaattggaaaaaaaaaaaaaaaaa

SEQ ID NO: 162310 - DNA, 2852 bp, Cannabis sativa
aattagaagtgaaatttcaaaatgctttattgatgctatatattattggtttcgggagagtttttgaggttggtttttgtcttgtagtttattcctttttaagttatgtagttcaattagttaatggatggtttattgtggacaattcccatatatgatgggttcctagctaataccttaatacctaggcctagctatatatttagttcaaataaatgagtgttgtgttgactccggattgagctttaatggccaaaagatctctcattagtagtagagcttttataaataataaatgtaagttgaatatagatacatgcaagcattttattatagacattattattatgttgagttcatgaatgaatcacttaaagctctaaactactatttatatagagattgaacagaaatataactgttattttatttttgacaaatattaaattcaaagtactttggaagatgactgaaacttaccaagtgaacaagaagctttacagttagcagtacttggaaatgtatcaagtatttggcaatgaggccttagcccttcatgaaccatttcattgtgaagtctaagggcccttttcttgtctcccttctcaatgtagttaaggatcattgtctcgtacaagcactcgtctctagctagcgaacggtctttcataatctgaaaatgcttctctgcttcctccattttacctgattggcagaagctctttatcaatgctgcaaaaacagacgaacccggagatagtagcatgttctccatttcataaaaaagcttgacaacttcttcaacatcaccttttttctcatagccattaatgagagtagcataagtgatttcatttggtttgaaacctttattctctaataattgagttaatgctgcattagctttttccatatctccattttcacaaagcttctcaatcatttcattgaaagcagaacaactcggaataaagctctgttccaccattctttcgcaacttcttaagctttcttctaatcttcctgccttggcaaagcccttaattaggtaattgaaagtctcatcataaggcttcaaaccaatgtcttccatatcttgcatcaagcaatttgcttcttcaattcttccctcttcacagtagcctcctataaacagcgtaagaacaaaagggtttggccgaaaacctctcttcagcatttcttcataaacaacccaggcagagcctaaatttcctagcttcactttagcataaacaatcaaagagtaagcaatggtgtcaaaaaccatattcttttgcaacaatcttttcagtatctccacaccatcttcaactctaccttcgtctaaaatcctcaaaatcaaactagtgttgatgatcacagacggagagcatctatttccatggatcctatccaacattccaattactttttgcagcttcccttccttgcacaacgagctaattaatgttcgaatcgttgttccattagggtatatcctttttgtaatcatatgctcataaatcttccaaactagagtactctggccagacttttgaacaacgtgcaccaaagtattgaaagttgcaagacttaatgagaacccatgttcttccaaatagcagcaaacttcaaaaccagcctcaaacattctcaatctagaataagcttgtataagcagatcaaaaacaaatggattcgaagcagtatttttataactactaagtagtgaatccaccactaggaatctagaagagtctccagaatttttcttcaaaactgattcaatcaaagctctagcatccacattcaaccgagcttggaccagaatatgaatggctatgcagtaagactggactccatgctcagatttgtttctgtgagatgaccaatgaaagaaacccaaagcctgctttgcatcaatgggtcccttcaattccaatagtactttctcaacaagtagttcatcaagctcaacatgatgaaattttttagtgagtgtgtcccaattcaaaccacttctgaacgaattacaaatggaagtgacaacattaactgatgttgcctctgtatgaatcagttggattctttctgactgtgaaccatagcaatgtagtttcccacacgatttcaaggatttcgagattaaagatggagctagtaggcggagtaagctcatattatgcgaaatttcctcaatgtaatactgtcagatgtcaatgatatcgttttatcagttctaaatatcaaactggtagtactaaggatataggatttgttggagaccaactatcaagccctccttttttacctttacagtattagaatagtaaaacacatagtaaacaagcaaatgttgaaacttgaattggtatatagacttgcataccttaaaataagccaagcctacttaaatatccttcatacgcacgggaacatgctagctttcattgaacacagacatgccacaaaggcatcttatccattttctatttagtgttgcagatgctttactgattctccttgcagttgcagacttttgtatagtcatgagagctaatcaaaaaaaaaaaaaaaggaaatgagattgagaagattagatggcttaatccattacaagataattaggaaaattaataacagatataactctagatgtgatataatttaagtacttttggtgagcaattatgggaggaaagaaacgtgcagagggcatccccctttcgtaaataaaaaagaagagggaaaaacactccttaacatgcctataactatataaatacatacattatgaactaaatcattctgtcacatgatttttgcttcacattcattgacaaaatttacag

SEQ ID NO: 162311 - DNA, 1288 bp, Cannabis sativa
  modified_base (1022)..(1035): a, c, t, g, unknown or other
attatattttattatatatgtgtaaagttagatatcattgttatcatgatattaatattataaaaaggaggctactctgccatagtctctcttgaaagaaaactatatgtatgttttgagaagggagcatgatttagatctacctcactacttatcccctgctcatataaactaaagtgatagaaattatttacatattctatatatatatatatatttatcttatatataagataagatgatgaagaagaggccaagttggtcctttctgttgtgtaaccagagttgtaaaagcaatccatctaaaacagctgatgactaccatcaagacgatgaagtgaaggaggataaaaggaatggaaaaattgtttacgatgattcagtcaaaagaagttccggtggatggaaggccgtatcttttattttaggtactacatgtactgaatatatattatttttaggccaggcttatctggataaatgtacaattgatattttggatttttttttttttttcatttatgagtataggaaatgaaacttttgagagattggcaacgttcggattattggcaaactttatggtttacctaacaacaaagcttcacatggatcaagtatcagcttctaacgttatgaacatttggggtggcatcaccaatttcgcacctttaattggggctttcatctctgatgcctatgctggtcgcttctggaccattgccgttgcatcttttgcttcgcttttggtatgttcttttaacatctattaataatatatacactaaaaaaaagacaaaaaaaaaatatgaaaattatataaatacttcatacgtatacatatcttttatataaatatttgtatactttagttacgaacgcttctccataaaattgattttttttggggcaaaaatagctaaattcctattccgttttactctatactcctttattcaaaaatcacatttaagtgccacagtagactgtatacgtggtaaatttttagtggtccacgtaannnnnnnnnnnnnnaataattataaatatttaaaaagttaaagatcaaaaaaaaacaaaaaaaaattataaatattttatttttaggatatcggcagctaaaccacccgcacgttaaattttttaacacttaattaaaaaaattaaatttttagaggcaaaactacttaaattctcattccgtttttaatactttccttttttcttcttcttcttcttaactgaaaaaaccttaacacccagtcgcctaccccacgacccaaccttc

SEQ ID NO: 162312 - DNA, 1138 bp, Cannabis sativa
aactctaaatagaatttaatttataatcataataaaaacatctatgataatatttttagaaagcatattaaaactagaaattaaaatatgagtgaaagaaaataaagtagatagagttgtcttacttcaatcttcatctccaatcctctccttcttcttttctttttgttctctaatgtcctctatcgttaattgcttgaaaaatcctctcaaatttgacctatttactcctaaattcataagtaaaaggtctagcccacacagacccgcatttacgtgtaaaagactcgcgctcgcaaattgcttgttgtccaggtattcttttgctccaatctctctctctcaataaaactcgtataacttttgcatactaactctaaattagttgattcaagatgtgtttgaaagatgagaaagatatctaaaatttctatgttttgatttttttcaatatataatcagaacatagttgaatttaggttagaagttacagctttatttttcttgtaaagtttttctacaaaaacacaaaaataacaaattaatactaaaactaaacaaaatgaataaaacaaacaaaacataaaaaaaaaaataaataaacctaaaagattataaattaacacaaattcaaaagattaatgatgaaaaataactcaatttcataaagttaacacatgtcaaattcgtgttaagagactcatatcgtgtttaacccgtttttatttcgtgtcgatctgttttcgacctgcatcatattttaccgaccttaacccgtaacactcgtgtcgtgttcgtgttcgtatgttgtgtcgaaattcgttttgccactcctatagtggtgcctagcaccatctagaggtagtgcattacgattggtttacaatattccttaaaggttataatatagacccaatacttaattgcgcaaatagagatattacaccaagggggtgctagatacaactggcgtcttttagcacttttctttaataaataaaatgatgtgacatgttagtatggtgttgggcaacttagagcactctcaacaacttttttattctatcatttaaaataaattaccaaaactctactttatctattttcatttttacccttcaaaacagttttttttttt

SEQ ID NO: 162313 - DNA, 2204 bp, Cannabis sativa
tgaactctgtatataacaccctgtaattcattcattgttcaataatgaaaagctgaatttcaaagtctaaattctgtggtgtctgaaatctgtcgaattaaatctctcatatctgagcttcatctgcatctatcatctcccccactggtctggtgtgacaacctcagcgccattcttctcgctgctaatctggtgctacatgcaagaactaaacacatagagatagacctctattttattcgagataaggttcttcaaagcatagacagacctaggggtgttgagggaggactaaagcctaccctgagatttaaaaatatattaatatacaattgttattttcatatatacatagtaaacaattggttaagatactttaaatttacatgggagaccatgttttgaattttcttacccctttttttctacgtgtatatacattttatttatcaaaaaaataaatgaagtataaggtttaaattagaatcaaacttatgaccactagaataggaggatgccactaaaccatcattccacttaaatttagctagttatttattgttttagattatattaaatgtataactaagcccacccttacactacaagaaatgtcacttttgccagcacatttttatgctcgcaaaaatttgatattgcgctggtaaaatgaaatttacttctcatgtgttggcaaaagggattacaaatcaacgttggtattagaaattttgcagcacaaaatgaaaagagctggcaaaaatgacttttttcagcgcataaatgcgttggtaaaagttagattttagccactgcaaatgtgcgctgagcgcagtttgcgaaatgcgctggtaaaatagcgaactgtgctagtaaaagtaacattttcgtgtagtgtaaaattcaatcctgggtccgccactgtcaaaggaaaatccttcttcaccatgaacctgcagaacaccagttagctgactcactcaccaaagcaatctcaaattctaagtttcctttcttaagagacaaacttggtgttatttgctctacaaaactaagtttgaggggggctgataaggaaactaatcctattgaaccctctcagctgtcaaacattgtttttgatagcggttaggattagtgagttagttcaggtacttatgttagttacttttcaattgtaactaactcttctacaattagcttttctttgtaattgaactttgtatataagaccatgtaaatcattcattgttcaataataaaaagctttctctttcactatctttctcaaacttaacacttccttgtccttggtaagggaaacccacccaaatcagggagatattttagaggagactgttaaagaagagtcaaacaagcttgctaaaggtatatatgtagtggtggagccgaatggctcgagttctgttgcttgggtttttgaaggcaggagatgctaatggtgagggaattgttcgtagttgtgggggataaggtgttgggttttttttgccctaaataaaacttaatttcaatgtaatcatacttttatttgtcaataaaagaatataatcattaccatttcgtatattacttggttcacataattttttcttgatcatatgtttgatatataaattctgtgaaagtgaaattcgtatcatattactcttcatgattatagtattgtcgatacaatagaagtaataatcatgactatatgatataaacctttttagtcctttaatttatcagttcacaaggatttacactgatatgataatcaatgatgtaatttacttacacatgtttaagtgaaatatatttttcagggcattagcaaagtaaatatgtatcaaatgtattggctatacatcagactaccgatattgacaatgaaaaaaatttatcaaatgtaatttacttacaattattttagtggaatgacttgtttgctactttcttacctatacgaatagcctatacttatatcttgaaaacacggtagtacaatggagtgggagcattaatcatagatatagaatctatatcttctatcaatacatagaaatgaaacgatagtttcctttagggttgtacatcagtcggtttgggtggtttatcttatatattttctaacccaatataaggttcaggttgctaaaatttaagtgcaacccgctgattttaaaaaaaaaaatctg

SEQ ID NO: 162314 - DNA, 3223 bp, Cannabis sativa
tttttaacttattatcacaattcaatttattattttattaaaatggtatgctttcaaatgtcgttaatatactttatttatttattattttttttcaaatttttatattatactatacatcactatataaataattttttttctttcaaaaaaaaaaaatctcacactttttatacatgcaccactaaaattttattttttaaaaatttcaatattttaattaattgtaaatatataatattaatatatattcatattcactaataaagaatgttaaaatctagaacaattataaaatatatttagaataattaataaatttaaaaaaaaaactttaaaagaaaaatgagtttaaaaatctgacgagctacattaaatataatttataatatgcaggtctataattatcctaataaaacatttttttgatagaataatacaacattatcaaaataaaataagtttgattaattttataagagcataaagtggatgaacttgtacattaaatcttttttttgcttttaattatttgtgtatttgtcgttttatgctgagacgatgcgaaaattaggaagttgtaggctacgagctacattaatttttgatgatttttattatcatttttttatagttgatttatttcttagtaagaaaatatattttgataattaatttttgtttttgttttttaatttcacttggttttctactctgttgcatcttctcgctctctcaatccctgaaaaatccctctcggcgcataaaagataccaaaaaggtacggtttgatccaaactcagaacacttaatcacaaacacaacacactttctctctcttccccaaaactctctatctttctctctcctcaactctgtgcactgtcaaaacgaagctcagctccaacataaacaatagtcagaggaaaaaagagagtgaaatcaagtcgttaaaatcagaaaaaggctcagattaaagaaataattattggggtttcaagggaagaagataccagatcttctgtacctgttttaatacatattttatatgctagaaaccctcttataaggtcattcctttttccactgaactgaaaatttttattaatttatttttctgttttatttattagttttgttggagttttgctgtatgcgagatcggtatttgatttttttttggttggttcccttcagattgaagaaaggggatgtgcatttgtttgtgaaggcgaggcggtggttcggggagatttttgggactttggggcggttgaaaatggagggttaacattggctttttgtttgggtgaatcagggttcgatttcttttgggcttttcttttagggtaggagggtttggttgagatgggaagcgctggtgaaaccagtaacaagggcattgacccgtcggtgggcgggttggtttgggtccgccgcagaaacgggtcatggtggcccggtagaataatgggtctcgatgagttatctgagagttgcttagtttcgccgagatcgggtacccccgtgaagcttctgggtcgcgaggacgcaagcgtgtaagttttctcaccctagtttattttttttttttgaatgagaacttagttttgattgtttattgactttgttcatcgatataacttatattcggctcacttgataatgttgttgtttgtgttcttaagtgatttgtagatatatgtgatatgtaccagtttttgaatgacattttcttccaaaatagtgatgaaagttaacagtctatgttcatatccatttttattaactttgttatgttttttatttgatgatgaatattgtcacacatttttttagatgtgtcctcatctgatgaattgctttaaatttatgcttcgttataaacctgatctgatggtgttacttttggttcagagattggtataaccttgaaaaatcgaagagagtgaaagcttttcgatgtggagaatatgatgactgtattgaaaaagcaaaagcgtctgcagctagttctaataagaaggcagtaaaatatgcacggagggaagacgccattctccatgctcttgagattgagcatactcgactggggaaagatcatatggactgtagtcctataatggatagtttgggtggtgagattggtagttcaaccagggaatcaccttccatgtctcattctgccaatgaaaatggcactatggatgattatgtgagtgattcaaaagagaattcagattcagccccggaattatctcaatctggtatatcttttgaagagcccaatcatatcagttcttctaaagtgcaatctgtgcagggaaggaggagaacaccaaatgattcagaagatgatggaacagaaggagtaaagcgaatgagagggcttgaggatctgggagttggtgcagcctcaaaaagaaaggtccaggttggaggtctgcttgagctagtccaacaagacaatgcttcactctcagattcaaacaacgggaactgtgtgtctaatggaagtactgcaaatggtagtaaaggtaattcttctttgaaaagaaagagaactccagtagcaaatgtccatgagttcttgaaaaagaaaaaccgccggcgtccactgacaaaggttttggagagtacagctatggtttctgttccggttagttgtgaccaagctcccatttcatgtggttcacctcttcagggattatctgatggcaaggtttctgctctagaatctgctgaatcaaggaaaagtctctctgtggtggccaacaacaatgcagactgtaatggaggttcatgtgagaatgggacctctttaaatacttcacaactcgcttgtgatacttcccatatcaacaagctgaaagaaaatgaaaattccagcctatctgaatttgttgagaatgattcttctgaaaggttattggaggtgccattctgtggagagcaaaagaagtctgcaggtatcttcgatgtagatgtttataatttagagtttgccagatttttgtccatgttaagttttttacatggttgatgaggatgtgccaattgttatgacttgggaggattccaaactactttctgctgcattaaagtttccagattctttatgaaatactgagttagggtttatacctgtgtacatgtcagattggtttgtttatagctagttgtattcagttttcttttgtatatgtttagtggagtcctacat

SEQ ID NO: 162315 - DNA, 1793 bp, Cannabis sativa
tagcttaaaatattattttatatatgtttaaaaatttaagatgccaattatcatttaacaataagtataaaatagcatttacagaaatttctaaaactgcctaagattttatgaaataaaaaatttgaaaagaaaagttcataaaaatacgtatggggataattataaatatgtagtgtttatttttctctaaacaaaatttataaatttgtaacggaaactaataagtttgtaagcatatgtttcaattttgtaagtagtatttaatgaataaataaaaaactattttaatttgtgacagaataattacaaattgttatccatatatttgtaatttattacttataaattctatatttttttcttctaaaagacaaaaaaagagagtaatttttccctttacaattaaaatgtacaagggaattggattgaaattgtaatgaaagaccgcctcactagtattgtattgcttgccattcttagtcatggcccaaaaaaatatggggagcccaattaaagtttcttagaagttaagaagaaaaaaaataaaggaaagcaagagaagagaagagagaatatactagacttgttaaagggtcttgttcttatcaagcttcaaatcttaataagtctataatgaactttgattagtgctctgtaaagttctacatgattacttatctaaaggtgtgtcatattgattgattcttcgtgaaaatgacaattaaataggtccaaacagattggtcatgtattcagtaattaaataacaactttgtcttcacgcctggctagctagaaaagattgaaatccaaaaatatgtaattaatatacattaaaaaaaaaaagaaaaaaatctagaaggttgttcgttgttgtcaatggaaataattaggagtgcacagtatggtggacattgtcccacatggaataaatggtagagaattgagccatatataagtacatgagctactccattcaatgccaattagttttgaaatgaaactccataattctcaacatggtatcagatactcgttgtgttttataaatccccaagaaaatcacaaaatatcattgtaattgtaaagcacacttgtattgtgatcgatcattatttgccccaaactgatcatcattctcataatcatggataaacccaaaacatcactcaacacaaatcactaagctagtagtggtttcctccaccattcaatttgtaaataatataattaaattaaagaaagaaaaaaccaaaccttgagtacagagctaagtaaggagaaaactaaaggtccttgaaagcctctaggaggaagacgatgagcaaaacaagataaatatatcatttttcttggaacaaattagggtttgaaatcgacacaaatcattgttaatttcttcatacactaattttagttacaataaattaataattacacaaccaaagcacaggttgatatgatggtttcctaaaaggagttgatggcttatagaaatgtatgtaggttttttgtaatccaaacaaatagacaagttgtcttttatctagttccaagtttgttggaaaagttagttaattcggttatgtcactactacaaatttggcttttcccaacagttaataagagggtcaattataaaaaccgttggaaaagatgagtggaagtttttcccaacggtttagaaatgaagcacaaaaaaccgttggaaaaaattaataccaacagtggagaaccgtgggcaatactaaatagaattttttaaaagaaaacaataaatgccaacagtt

SEQ ID NO: 162316 - DNA, 1755 bp, Cannabis sativa
tttttttattaaaagtaatttatcaaacttgtatttatatattctttttcatgtacacagtcgcctagctagccacatattttagtaagtatatatttttttaaaaaaaatattaataaaaaatataatttttttttgagaaaaataatacataaatggtacaaagataaatatataaagacaaaagtaaaaatataaattttataagaacaaaagtaaaaatatataaagagaaaaataaaaaaatatttattttatagcggtgaaagtaaaaatatatataaaaaaacgacagagcacatatcccacttctctgcactctctgcatgttcactttaattttatttaggatctaaatgaacaaaaggtttatttttcttttctttttttttttatttgaatggaaaataaaactttattaatcatcaaactcggttatcaaaactattaacaaattagttgggacattctccgaattgaagttatgattaagataagaatgaaaagctaaaaaaaaactatgagcaaccatatttgcagatcatttcacttaatgaactttaacgaaaaataattcgacaagtaaagccttaagatctttaattaaatcactaaacaatgaaatcatactaatagggctcctcaaagcttgcacagccatgaaacaatcaatctccaaaaaaaattatgctgccacaaacattgtttaatctaactaagagtttacaaatgttcatagtttctgtcacctcaacaatgggtctggccttcaatgaaaaatctattctcatattgagcaatcatattgaaaccataaccattaagctcctcaaagaaagttccatccacattgatcttcacagtattaaacagtggtaaacgctaatgctccaccctatcatccttggtcaaactaaataatgatgtttctaaaataaaaacttgagcatgcttctattgttcaagatggctaactgctgaagagatgatctccaagggactaacacttttttagttccatgcttattcatacagagcggcccaaatggcccgacagatggctgtcaagagacaacattagtcttactgaagtcccatgaaacaagcctcaaaccagtagaaaaactctactcctaacggtaatcttttaccaatttcggcctgattcaaaactatttgggctgttgcacatgaaaacaaacagtggatagtagttttagcttcattttgacatatggggcaagcaagacaacctgtgcaagcacgccagatcaaatcgttattttaggaggagctctcaactgccagaatatcttccaaaatttacttaatgtattgacacatcaattcccatttaattattgaataatcttataagccgacttgaccgaataaaagctagacacttagtctacacaatcttgtccacccgagatgttaaattaagagggatgctatgaatgagacaacgatccctctcattaaacatgtcattgattagataaatatcccaagctaacaaacccgaaagcatgagatttgtcgcttgtggtattatttcttaaacccaacaaaatagtcggttagttaattgttcttcaactaactcaacttttaaatatgacatcaagcttattgggtctattagcctatataaagaggactactcatttcataacaacacataacaaagagactcaaccaatacagtaaagagagaagttagagtgagagagtgagtgagtgagagagaga

SEQ ID NO: 162317 - DNA, 1676 bp, Cannabis sativa
aacttctacacatttacaatcatacgagtcattagtgtaatattctattcaatacatatcccaatccaatggtgagaagtctgtcctgtgatcgaacttgagaattggtttaaattcaatgcgatcctgatgaagatcaaacaaagagctgcttctttttttctcctttctgaataaatgaaataacatatgcacagccacgaacaactagctaaatagaatactacgcattgctaattgagattccaaaactgtacataaacaacagattgcatagcaaatctaaattctaaacataacccaaaggttttcctctagtcagtctgatatgctcaaaataaaaagtgattaacctcaaaagccatacgaacattctgtgtcaggagttgtatagatcccagatcaagaatgaagatcatgttcctttttaaaatagaaaaagaaaagaaagcattattaactaacaagtggattaccatcctcctttcccaccatcgctgccccaagattttgatggtggcttaccccatgaatcagttgatccactagcatcacttgtatcttttgcagcatttgattctgacccctgattgttccaactgccagcttgtgccgttgaactgggttctttaaagccggaaccactaccccaacctccactggcagtacttgagtttgattctgtactgttccaaatcttagcttgtgcagttgaactaggttctttgaagccaccaccactaccccaagattttggcggtggtggcttaccccatgcatcagatgtgtcttttgcatctgcagcaattggttgactgttccaagattttgatggtggtgttggcttaccccacgcttcggcgttggaagtagttccatcaccactgcctccactactaccccaagactttgatggtggtggcttgccccatgattctgttttggaactacttccgttaccactgcctccaccactaccccaagactttgacggtggtggcttaccccacgcttctgtattggatgtagttccatcaccactgcctccgccactaccccaagactttgatgacggtggcttaccccatgcttctgtattggaagttgttctttcaccactgcctccaccactaccccaagactttgatggtggtggcttaccccacgcttctgttttggaagtagttccatcaccactgcctacaccactaccccaagactttgatgacggtggcttaccccacgcttctgtattggtagttccatcaccactaccccaagactttgatggcggtggcttaccccacgcttctgttttggaagtatttccctcaccattgcctccaccactaccccaagacttcgatccccacgcttcagttgattcatttgtaactggggttgcttgagtattccaatcttcaacattggaagaagttccgtcctgccaatccctccttccacggcccctacctccaaaggcccctcctcctctgtctgatccacctctaccacggaagcctcctctgtcggatctacccctaccaccaaagccacctctgtctccacctctaccaccaaagtctcctctatctccacctctaccaccatagcctcctctgtctccacctctaccaccatagcctcctctgtctccacctctaccaccatagcct

SEQ ID NO: 162318 - DNA, 2197 bp, Cannabis sativa
ttaatcatacaaggccaaaggttttctaaataatataattttttcctaacaaactaagagaggcttttgggtagaatattagtgtttgcaaataaaagaaaacaaaataggaagaagctgtacctgaacagccaccaatgtgtttgccccctgttcatgaattgaaaagaaaaaaaaggattgagctttcagtctcactaaacatcaattcaaatataacatggtattgcaacttaaggaaagcaaaatcagtgtgcttaaagttgaaaatgcactgattttctgttctaaaagtggacttcatgatagaaaataacctcaaaaaaggggaaaggccagctttaacaataacagccacacagaaaaatcaagcatactggctagtggtttaacaatcaagatgtatttatattgccaatactgtgcatctgaaaatgggaattctttttgctttttggacatgtgaacccaagtcaatgctataatgaaacaattcctaatggagaaaagtctaccatggcacaatgaaggagggaaagggaaaggcatttctcatcttttgtgcaaataatatttcaagatgttctcaggtagttatcaaaagcattgaaaggtcttacttaccaacgaaaacattaggtacagtatgctgtcctgtaagcctctccaaaagtttctgtaactgtggtccatgggcacctgagggagtagaatacaagttcaaataaaaaaagaaaccatgaaacataagaagagaaactactgcctcagaaagtgaatcaccaaaaatttcaattcacatatgaataagcaacaaggtgtacatggaatatctaactattaagaacacttgtttttattaagaacaccaaaaagagcatgcaatgttggtgtgtaatctttcttgttttgttgcattataatactcagattggttggtggttacaatgcagttcaccaagaaaactatatcatacaatgttggtattcttggactttctgttgtgagtattatgattaattacactccataaacaataacaagttctggttgattcttttaaataagaccagaaattcaattaacactaatcaacttcataattcagcaacacaaattcctattgcttagagttgaagttatagaaaagagtgaagcgaaacaatgttgttcaccaagaaaactaaatcctacaatgttggtattcttggacattctgttatgactgattctaacagttatgattattcaagaccagaatttcaagaaacactaatcaacttcagaattcaacagcacaaagtcctattgcttagagttgaagagttataaacaagagagaaaagaaacaatgttgttcatcgagaaaactacatcctacaatgttggtttatgactatgattctgacaattatgattattcacacagttccataaacaataaacaattcttgttgattcttttatacaaaaccaaaatttcaagaaacacttatcaaagtcataattaaaagaaaagatactcacccaactcgtccaattctatgaccagtggctctacaccaagtttcttgaacagcgttttcacctcaatcgagtacctttaacaacaacaaacaaaaaaaaaaaaaaaaacaacaactgaataaatcatttcaaatcaaagattacatttttaagcattgcaagaagaaataaaatttcaaagggggtttgaagtttaaacttacgaacaccaagttttcgagtaaataacaactgggttttcctccagagtcttcctcacagtctcttcaagccgagagccaaaggaagaagaagaagacatagcttgaacagagatgggtctgctgcatctcctcgtgccatggatggtcaaaaaggttgaccttgagcttgttccggaatagaaacgggtgaaagcaattgggcaaacaaaggagttgattttagaagaagtgatagtgcgaggagagttaagagagagggaaatgaaatgggtgagattagatgagaccgccattgttgaagttggaagattcgagtgtatcttcttctacagctttcttggaattgtttctttcttttgtgaccaatcaatcaactaccttttcatgtataattttcagacatggaaatgggacttattgagattttcgttaagggtaagttgaaaaatgcctcttttattcatca

SEQ ID NO: 162319 - DNA, 5700 bp, Cannabis sativa
ctggtaaaatattcccaacactttgataacccgccacacctgattaagaaaccatatagtatggagctcaaagcggtgctgagaaggagacaacatacgatcggagcgagatggctcaggcaaggtttaatggcaagaggtgaaagctccggtggctggtctgatggggattctaccgtgaaaggaacaacatcaggtggaattattggtggacacaatcaaggaaaggatcaatttgtgccccgatcagtgggattggaaggagccattagaggagttgacttgggcatcaatgctagcaaatctccatttaattctatgggatcaccagccaattatggcacaagagatattggcatgaatgatgatatcaatgatgatcttgatggggatttaattgtcctatagtcaaagaggaaaagaatagctgagaatttgactagtgggccaaatgaaggtaatggagaaagtacagccattaataatgcagtagatacaaaaaactttgttggggcgggttctgtgtcacaggcccgccaagaatcatgaatgtgctaagttagaattatcgtgggcttgggaaccaacagacttttcaattccttaaagagattgttactcaaaagcaacccaattttatttttctgtgtgagacaaaaagtaataaagctagaatagattatgtgggccgaatgttgggttttgaaggggtgtttacagtaaatgcccaaggaaggagtggtggtcttgctttattttggaaaaataccaaagatggtagagttgttggtttctcccaacatcatattgatttccttgttgaagttgatggaagctcaaactggaggcttacaggggtgtatggggaaccgcaaagaggccaacaagaggatacctggaatctaactaagttccttgtgaattcttcaagtgatcattggtgtgttattggggatttaaacaatgtgttaagtcaaagtgataagaggggaggccttccgtacccgagtaggttaatttctggatttgaacaagctcttattgattgtgatttggttgatatggacttggttggatacccgtacacttgggaaaaagggagaggaacatcaagatggatagaagtaagacttgaccatgcacttgtctcatctatttggtttcaacattttcctcaatctcggctcttaaaccttgacacttcccctttagatcataatcatatttttcttgagttcatggtgcctgagaagttcattcctaaccgtcatttccgtttcgaaaatgcttggctcaaggagccagtgtgcttggagatggattgctggacagtctctagccgaatgtctacggtaaagaaaattactctttgcgttgataagttgtctaaatggggatcaaatgtgactggaaattttaagcttcgaatcaacaaatgccaaaacgaattgaagaagttgaagaataatagagatgccctttctgtccaacgttatagtgaagtaaagaaggaactctttttaatttggatcaaaaggaagcgttttggaaacaacaggctaagcaattttggttaaaagaaggtgatcaaaacaataaatatttccactgtgctgctagtaaccgccgaagcttcaaccaaatttcgaaacttaaagattctagtggtaattggaaggattgggaaaatggccttgctgacgtagtggtggattacttctcttctttattcagtgcttcaagtttgggtagtgatgttgtggtccagtgcattcaaaggaaggttacatctcagattaatgaagaccttcaccaacttgtggttgccgaggaagtgagaagagctgtatttagtatgcatttcgataagagtccaggtccggatggtatgacgcccactttttatcaaaaatgttgggatattattcagactgatgttactgctgtggttcagaattttttcaatactggtgagtttgatcaaggttatggtgatgctaatgttgttttgattctgaaaaataaaatgcctgaaagtatggttaatttaaggccaattgctttatgtaatgtgttgtataaaatcattactaaagtaatggctaatcggatggagccttctatggatcaaattgtattagaatctgagagtgcttttattcctgggagactcataactaacaatattttagtctctttggaagtgcttcattacttgaagaggaaaagaaagggcaaggatgggtttatggcactaaaactcgatcttagcaaagcatatgatcgcattgaatggaacttcttggattcagttcttagaaaaatcagttttttagaaaattggattttgttggtgatgaagtgtctcatatgttattcgcagacgacagctacttgtattgcaaagctactcttcaagaagctacttgagtcagagaactcctccactagtttgaatgtgcttcgggtcagaaagtaaacctggggaagtcatctattttctatagtactaatactgtgagccatgttagggaggatatcaacagattgttacaaatgccacaagaagatgataagagtatgtatctgggtctccctagtactatgggatgcaataagtcagctgtgttgggctttttaaaggatcgagtcaggaaaaaacttcaaggttgggactcaaaagtcttatctcgagctggtaaagaagtgttaatcaaattagtagcggaagctcttcctagttacgctatgaatgtgttcttacttcccttggagattagtagagatattgaaagtactatggcaagattttggtggaagagttcctcgaaggacaataaaggaataccttagatgtcttgggagcgtatgtgccacagtacgaacaatgggggccttggttttcataatcttcgtgattttaacttggctcttttgggaaagcaaggttggcatttccttacaagacccgaatctttggtttctcgtatttttaaggcacgatactttcctaatgggacctatctctcggctcctattggtaataacccaagcttcgtgtggcgtagtgtttgggaagcccaatctttagtctgtgcggggattcgttggaatttggtaatggctcttcaattaacgttttgaaagagcgttggctgccagaccagaaccagccttctgtgacttcttcccacccggctcttcaacaagttatggtgtgtaatttgatgaacatggataggtcctcttgggatgaagaaatattataggatttttttgatgatagggagcaaagattgataaaacagatttctctaagctcaaaccagtccattgatgttctctactagtttaatgagcctactggtgtgtactcggtgagaagtgcctaccaattacttcaagcattgaaagggctgtgtaatgagatagatgcttcagtgttttggaagactttgtggtctttgaagctaccaccgaaaataaaaaatttaatgtggagggccagttctaattgtctcccaactctcgcacaacttgcttcaaagtgtgtacctattctcgctgtccattgtgtgaggagattgatgagtccattacacacattctgctcacctgtagagtggttcaacaggtatgggagagagtcggtattggaaccttggtggttgctgcaggtggtgtttttctggactggtgcgtagatgtttcaacactttgacagcagaaaaacaatgtcttgctgctgcactttgttggggtgtatggggagcaaggaacgatgttgtatggcaagggaaatcagttaacatttcagtaatagtagctcctgctaaaagctatcttgatcaatggtaacacactaaaaaaactcaaattgagtcatcatgggctgatcttcagtattatgatgggatggagcgttggcttaaaccacaggttaacagcatcaagatcaatgtggatgcagctatttttgaaggacagaaccagtttgggggtgcttttgttgtacaagaccgtaatggtctgctcattgaaggccatacgaagttgcacatgggtaatattgctccggctgttgctgaagctttgtgctttcgggaagctctaagttggattaaaaaccaatcgcctagttctgtttgggtggagatcgattgtcttctgctcgttcaagctttaagaagttcagctagcttgtcttcttattttggttgtgtgattcaggaatgcaaagccatgttggctaatttaagtaatgcctatttttgctttattaagcagtcagctaatagagtcgctcatgagtttgcaagagcgtcttttttttatcctgattgtattttcagtatggaaaatattccaactgagttgttacctatgttggtgactgaatttgaaggttaataaagtttgattttcctttcaaaaaagtttaacctagtatatatctatgttatattaaatgtgactatataagagaaagtgatcttcttttttaaaacattacaatttaaatttaaaccccaaatatctctctcttattttttctctcttatattaattgtatcttttttacattacatgtcaaatttaaacccactgcacataaaaaaaaaaaaatctttctattattaatttttatccaattcacatgtgtaaaaaaaaattatacaactaaaataaaaactaagaatataacttagtatatatgcattgtatgtaaattaaaactagtgtatatataaaacacttagcataataatgaaaatatatcttataagtgtataataaataaattattgacatgaattatactaatgtaagtagtggcttatgtccctaatttagtgataatatttataatatataggtaaattacatatttatttattattaataatttaaaataaattttagttcacacattatatttataatcataatataataaatagtaatctttattttttaatttgtatattaactccaaaaaatattatgttgacggtaagaattcgtcaactaaactttcgttaagaaataaaaagtaaatgggtgaagatgaaaaacttaagagaaactcagaacataatagagaaaactggtgttgtattaaatctctaaacttccttacaaatgattattttctaattccttctttcatgaaagagagggatatttatagggagctctaatggctccagaatacaagtggtcccaaaactagaggacaaaacttttgtatcatgaagatcaacatgttagacgggcagtagtgaggtggttgtcgggtgtcatttggtactccaagtgagacaaatagtgtctccactatttgtacttatgtacaaccactactttttcagaggcatgtgcatgctttagcaactttatcctttgttgtaccttcccttggcatccctctctttatagcttacgctcatgatgcgagtataatacttaggaaatttagctaagtgataggtctatgagatttttgagtcttgttgtttaaacttagtaggaacttcttcctcaatcacttttggtggtcactccattgtaacatatatactctaagtattattgttcctttgtatggagcaggtagtattaggtggtgattaggggagtgagtaagtaagtaagggagcaagagagagagagagatggaatggagagagagagagagag

SEQ ID NO: 162320 - DNA, 1500 bp, Cannabis sativa
tgtcgagtcttctaggatcgaacaagttgttttcttgacaaacaaacacccgaacccagatgggttttccccaaatactttgaagaatgagcatattagaaaatctggttggaacagagagagccctaaggtttccatgtctttgggtcccaaagcacaagcgtcgagcaaaacatgccaaccattctctctagcaatactcatccattgatatgagtatcgagagccagtcattctcgattgaagtgggaaaacgaacaaccccttgttgtttttattacctctcattaataacatcttccttagttgtttggtttggagtttcatatggggccaggagaattcggccgagttaactcgggcaccttttctttttgagctttcaaccatggattccactgcctcgcttttgtaatcgtacacagtgagaagatttcgattggtctgaaaagggtatgaatctgcaaggagtttgaaagcagaggactgattggatgtgaataccatgaagtaatcatcttctgaaacgttcataaaagccatgattctctttcttaatttgacttctagctcttgttcttggctcaacacggctctgctaattaccatctgtgatttcaagctcaatggtttgtaacagatatcaaagaagtgggattcataaaattccgataacataggagtatgactcgaagaggaagccatagtaggatcaaaacgacgtcgttgttgttgtgaatatgagaaaaggccaattccaatgtaatcaagacaagcatgggtctgtagatggttatattcatgggatcgaagttgatcagttcggtgagtttgagagtagtgaggaaaagctttaatgaagtaagaaaacgattcctttaaaccaggaagagactcgtggtttgtgaaatatggagtaatgttgggtagagaagaaagtgctgccatggtgaaatggtactgagatgttgaggcagtagtcatggtcgagcttgaactggctggtgatttaggagattgaacgaaacttggtgccctgcaacagccatggaagcaagcttctgaggtttcaccagtgcaaggcgagctcattttcttgttcccttctttcttttaactttactcccaacttatttattatgaatgtgaaaagactaaagagtgttgtccaaaatatggtatcttataaatggtggccttttactaaataattagctgtttttttttatattaaatattaaataaaaatgtaaaatacaatattaaattacattaataatgtggtatagatttttggttgactgccatttataacacaatattaattagttgaagatactgtttgggtttgtgtttttagtttgcctatttttgctaattatgctcaatgagcattatttgtatgtagtagattatgtctaatttactaattaatagaatttctatttattttagaaaaaaaaaatgtggtgtagcttagtagttttatgcttttttttt

SEQ ID NO: 162321 - DNA, 2401 bp, Cannabis sativa
aaagaaacaaactacaattgcatgctttttataaaataaacagtatggcagcatctaacagaaaggggaaacgaaccatagttatggagcatgccttcggacttccagaaaccaacttgcctctacaagaacagagataagaataattaattttgttttctcaatatagcattaggacaatgcacgagttctccataacagaacaaacttaactacataaatgaatagaccaacagtcaaaagaagacattaatttccataaaagtcaatagtatacctcgttagggaaacatgaatcctcagagaagtaggaggaagacaatccctgcaggtctcttatttcagatggcatgatgataaagcttaaaaaaccctaattcctaaatatcaaactgtttcaatgaaatttcatctatctcccaaatccacaaacaagtgcacacctctctattaacacttcaaatgccaaaaatcaaatttaactgcattaaaaaacaaaaattatcaaaaacttgataatttataattgtggccacaagggaagagaaaaagaaaaacatgcacatagcaaaattacttccgaaaaaagctaaaaattatataaaaaagaagtgattgactttaagatctcggatacatataattcaattatgagaattgagaagcattaacaaccttgaaaaatttgaacagaaagtaaaggtacccaatctaaacatgcatatagcaggaaatgatgttaaagtgctactataggcctgaaatccacaagatcagcaaagatcagaagcagataggacccgaaaaaacaaaggagagtctgaattacctgaggaaaagcgaaatttgacgtgcagaaggtagcgatcagaggaaaaacggtgtagattgaaatgtgaagagaggagaaaacatagaaatgggaaattcggaaggaaagttataatcttttcgagaaggaggaaggaactttaaaacataaatttaaaaaatagaataaattacggcatacgccaaggaaattgcagaagggatcatctaggcatctgtgccgtgtaagatcctccaaagcttctttgatgccctttttccctgcattgcacgttaacttcttcctcttctctcccaaaactaaaaccagttatccttttcttcttacttttctctcttcaaaattatttatacttccgctgctgctcagatacaaaaccacacgctttcctcttattttttcttcagctccgtcaaaattcttagaagcttccgtcggaatctatggaattcccggcgagccaccgcgattctccggcgagattcgaagcctcgccagagatagagacagagagaagatattgatttggggttcgaaccaaacggcgagaagaaatggacggtttgtattagaatttactcacacagaacaaaaagaaagaagaaataaagcaaaaatatatatacaatataaaagataataataaccgaataatttctccctttataaaaaatataatatatatttagctcctacaaacacgtgaaaagagctagattacggaatatggagttgaaacggttttaacggcgtcaagtcattgtaatttccaaaagtaaagaagaataggaaactcttgtccgagtgccacgctggcagactttgttgtgaaagatggttggttgaagggtattatcctagggaattgaaatgacgaaaatatcctcacaggacaaaagaacatgctacattgaaacggttattattaggtaaatttatccagatcaaggaaagtgactttggagtgcagtggagaatggaggtacatacatgcgctgttttaatcctgtgctgccgaaacacatggattctcccattttctggatctgcgttgaaacgtgtcatgatatcatttgctgaggcttcttatcttcttttctgaaatgccttgtctgtacgcggcgccaatgataggaaaataggatatgatataaccaccgtcaaccccgctgttccgtcgggcgcgtgccccaaattttattcgtcggacacatagtaaattacataaataccctacattgtttgaaaactcaaaaagattttattttttgtttagtggagataaaattattattattttattaagaataaaaccgagaaatgagtccaataatatagggtatttatatataaaaaaaaattgatattaaattggagataatttagaaggtaaaactcataatttaaactgatttaaacagtctgttttgtacgcttacattatttaaggtgagtataacaaattgtttggattctaattttaacattttaattaaattatctctacaaatattacaaatttatgggacgttttttataattacactatacactctttttttttttttt

SEQ ID NO: 162322 - DNA, 4269 bp, Cannabis sativa
aatttctttttaattttgaatgatcatttctcaaatacaaatactaattaatcaagggaagtactgatatatatatatatatatatattatatgtatatacatcactatttaggagtaaaatacatccagactgtaaacagagcaaaggcaagaacagaagtggtacaaaccagaggtaaaaaccaatagagaaacaagaagaaagaaatgccaaaagagctcaacattatagttggctaacactgttatttatatacggattttgagtacaagacaagttgcaagaaaataacagaaactgtaaaaactaactaactgatacagtaactaactaacagatttaacagtatgtgtaacatcccccctcaaacgaaatggtgaagaagccatttaaagtttgcttttaagatagttaaatctgtcagttgttaaagacttagttaaaacatcagcaacttgatcaagtgatgggacatattgaacgaccagttgatgagctaaaatttgttctcggacaaagtggagatcgatttctatatgtttgcagcgagcatggaagactggattagcagctaaggctgttgcagattgattgtcaacccaaaggacgggagttttagccaaaggaacctgcaattctgtgagcagagaaataagccactgaagttcagcagtagcattggcgagcgcacgaaactcactctcagtactcgatcgagcaaccacctgttgcttctttgcagaccacgaaatgagattgcagccaaggaacataacatatccatcagtcgatctcctatcgtcaatacagctggcccaatcagcatcactatacccttgtaaagatagagaatctgatgagcgcagccacaagccatcatgaatggtgccctttagataccgcagtaattttttacatgcctcccaatgaatagtggtgggagcatgaatgaattgactaagtttgttgatgatgaatgccacatctggccgtgtcaaactcagatattgaaaagcacctaaagtgctcctatagagtgttatgtcttggaatggctcaccctctgtaagactaagttttgtggctgagttggtgggatttggacagctcttggctccttccatatgcaatcgtgtgaggagatcagtgatgtattttgtctgagagagatacatacctgttgcatcactataaatctcgacaccaaggaaatagtgaattggccccaagtcttttagggaaaagactttgttcaaatcagaaataaattgagatactagtttggtgcttgtgcctgttattagtatatcatcaacatatactaataaatagactagtgaagcacttgtgccatagacaaaaagggagttatctgatttggacaattgaaaaccccactagtataatgtattcttgagcttttcattccatgcccggggagcttgttttaaaccgtagatagctttgtgtacttgacaaacatgagttggttttgtaggatcaatgaatcctttaggttgctgcatatataccgttttgaagagttccatgaagaaaagcattactaacgtcaagttgtttgaccggccaatgcatactaacagcaagacttaagacaactctcactgtggtaggtttaacaactggactaaatgtttcttcatagtcgattccgggtgtttggagataacctttggcaactaaccgagatttgtacctgtccaaagagccatcagcatttaacttgatcctatgtacccacttattatcaataacattcatatgtggagcatagggaacaagagtccaagttccttgtttgataagagcatgaaattcaacagacattgcagcaaaccagcgagggttgttgagtgcttctttcaatgttcgtggttcagttggcattagagattcttcaagagggtgtttagtagccaaatatgcctttggtttccttatgccactttgagaacgtgttctcatggaatgagttcgagagggctgctatacaccaataacaggttgggactgagtgttttgtgaggaaatgacaggttgctcaggatcctgctggggtgggggaggtattgtagatggtaaaagtgtctcaggtgaattaggattggatagtataggcatattttgggtggtagttgcaagatgttggtttataggtgaggaactggtttggtgagtatcggcctgatgtggtagctcaatggtagaacctatgatactggtgttgggttaggaaactcagcaacagcagtagcaataggagcattagtgtatataggagcagatacagtagagaaggtagcaataggatcagatgatgaagaatgtacatgtactggtgttggagatgtggtgtcagtagctttggctggaaacaatttttcatcaaacaccacatttcgagcaatgtaaatcctgccttcagaactctcacaaacatagcctttgtgatgagaagaataccccaaaaagaggcattgcttggatctgaaatcgagtttgtgctgattgtatggcctcaaatgtggataacatgcacatccaaaaggtttgagaatgctatactctggtttgctgtcaaagagcacttcatatggagacaagaaatctagtatcttggtaggcaacctgttattggtgaactcagcataactgaaagcataccaccaatatgttagatccaaaccagactgaggtaaaagtgtaaggccagtttcattgatgtgcctatattttcgttcagcccttccattttgttcatgagtatgaggacaagggtgttggaaatgaatgccttgggtttctaaataccttttgaagggtctatactcaccaccccaatcggcttggacagactttataggtaaactaaattgtttttccacttggcttttccatttcagaaagacatcaaaagcttgagatttttggacaagtgggaatatccatgtatatctgctatagtcatataagaagtggacataatacctataccctcctttgacagagcatgaggagggccccataaatctgtatgaacaagagctaaaggttgggaagctctacttgtagatgcaggaaagggtagagtatgactcttcccttgaacacaggcaacacagaagtgtagatcttttatggagcctgtatgagggagttggggaagtaatctagccagagtgctagtggccggatggccaagtttgttatgccaaatatttacatcactgctagcagaagtattaaattcaacatgttgtacagaattagactgagaagcagaagatgttttattgatattggaatggttacaagagtttatttcatgatcacattggcattagtaggtgtgtaggcaagatgacattgtaaaacagaatcacagggtgtagaagatttctctccaagaaggtaaagtccatccttaagtctccctttcaacaggacctggccattgtccttgtccttaatgaaacaccaatttttatgaaattcaagaaaaacattattgtcattagtcaatttagagacactaactaaacttttggtcatagatggcactttaaggacagagtgtaagtgtaaaggagataaattaaaggaaggtaaagaggttgaacctatgtgagatatatgcaatttcttaccatttccaacatcaattgtcttagtaccatgataaggagtggcaacatcaagattggtggtggtattggttacatgatttgtagctccagtatccacaaaccatccagaatcatctccaaaatcgggcaaaacctcaggggagtagtaggatgtgtcatgatcaggatcactttcagcaagaaaggcacggggttgataagggccagacttgggagttacccaatttttatcaaatcggtagtggcaaattgctgcagtatgaccacttttaaggcaaacttgacagatcaatcgagatgtagagggaaagttcctggtaaacccatggccagttgatcgattttggatatcttgagaattgcctcgactgctaggttgattggatcgaaaagaaccagttcttggagctccatgagtcaagttggcttgcatctgaatgtttaaattagtgagagtgttgtgttgttcaaggcgactctcatgagccatgagaagggcctgaacttcctcaagacttaaaagatcattgcgagaagtgattccagatattgcatttccagttagtgttatcagtcagttcatgtcttctccaacaatt

SEQ ID NO: 162323 - DNA, 3757 bp, Cannabis sativa
attcataatgcagaaaatgatttggtggtatttggtggagggcatgcagccacaattactgttcgtgcagcaaaaaaaggacttgtaaagccaaaagcaattgctgctgtagcacctacctgggctggtcctctacctattgtgtttggtcgagattctggcatggagacaaggtacttttaatgaaataccaccttcgtaacctgtaaaaatagagatttttaatcggctttgactggtagggatacgtaatctatgcctttatattagctagataaaattacaccagagaaatataacacttaacgtacgtctagtttaggagtaatgaaaaaagaggaataagaatatggtggaaaatttaataaatgtactatttccaatgatttcatgtaatttagtactaaatttgctcacctgattggtcttttaaatttcatgacaaacgtaccaggtatggactgcttaggggcaccttaagagctcctgctgttggctggatgatgtacaatatgctagtcagcaatgagaaggccattgaatcccaatacaaatctcatgtctatgcaaaccccgaaaatgtgactccaggaattattgaaagcagatacgcattgacgaaaaaggaaggtgctcgttatgcgcctgctgcattcctgaccggtctcctcgatcctgttcaatcccgtgaagagtttcttgaactctttgcagctatggagggaaagacaccagttctggttgtatcaagtaagggatctccaaagaggtcaaaagcagaaatggaagctctcagaggaaccaagggggtgaacaagtttgtggaggtaccgggtgctcttcttccacaagaagagtatcccaatttagttgccgaggagctttaccgattcttgcaagaaaattttgaatccgaagcttaaatatggtcttccgatatactaatacgcttctagctcctacgtataaaatataacaagagtaatttgatattagaccttaatgttatcttcatacatgttattggttgtatagcaaggaatctccactgtttatcacaataaataatccatttttattttcatattccatgtgctataaaattacagataattaccttcggttaatcgttaaaaagtactcggatcccctgtcaaattttctgtcggacccatttgaaaatgccatctcatttaatgattaaccacatgattaactatttaacaagtcttgttctccatggctctattattttcgcattgcaattaagtatcagtgttgtctagtatcttctcggcatgttgtgttgtgattggctagcgatactccctaaaaacttttatattaaattatatgggattgggtacttagttagaccaatagaaatattgacaaaaaagtgttaggatgtcttttagcatttctctttcttattagttgcttattaataataaatgcttagttgctttttttttttgaaaaaataaatgatgttgctttttcttttaaaaaaataaaataaattgaggagtccataaataattattaaaataaatgttgagattttttttatatctttctatttaaagtgatatttaaattcatttttattatgttgatatacatttatttatcccgaaaaattgttagggaaaaattgttaaggagatgattgagatatcttcgccctggttgcgtctcctgaagtaccgacccttcccctatataaggggtcacccatgagctgggaaggggatccaaaaattcaacactaaaaaaaaactctgctatttttattccttgcattcaagagcttgttcttgatttcgcaacttcaattaataaaatacaaggggaataggttattcccaacatctggggccggacctctttaaattttagtgttctttatgtgcaattattacgattttagtttaatttattattaattacgactccgcgttagttgactaaaaatctagtcaacagtaaatcgaaagaaacataaacaacatatgaaataaagagagatgaaatttaagcacaattcgaaagcctgaagaaagtaatagcaaactctaaaagaccaaaatctcatttaagagattaaacccaaaatcttattttagagattgaaccaatgaaaaacctaaagtcagataaatacaagagaatcataaaaaatcttcttctctaagaatctacttcatgctattctcatttttcatttttaaatctctgagaatgaaggacgaaatagataaaaatgtaaaagagtgagagagagagagagggggagagagaggggagagagagagggagggagagagggggagggagaaagggagggagagagaggaagagaactttacttagaatcagtgaagccatggaaaatcactgaaggcatttggagcaagctacagagtaaggaaaacaagcaagagagaaggcacaaggcggagagaagaaaaatgttttaaaaattttaaaaatcaaccaaaatatgtttttaaaatttaatcaattttgattttaaataaaaaaaatagaaaatatattttacttaccgaacacactttcaaaacctagttttcgtatttttgattaaaaataaaaactatttttaaaatggttaccaaacaaggccttaaagaactgttttttggtctaccaacccttcgaagaattacttccggtcacatgccaccgccgacttcaatttatttcaggtcaagtcgagtttcaagtcattcccattttcattaccattactcctcacaaactcaccatttcacatcattcccaatatttttagtaccattacgacacaccgtttcagattattcccaatatctctctacactctaatctccctctctctctctaaatatatgatttgaatgtgattatcctccatcaaagttttataaacaaaattgtagcaagtctttcattgcctaaagttggagcatcttcacctctctttgtcgaagctcaagctctctttcattctctcatgtggtgctcagcagttaagttgcttatcactcgcaatgaaataaactgtccccaactaacattgaaggttaaacataaattgaaggatcgttcagctctttcgagtcttgtcttaagatcctaaactcctttacttcttttcctaatgcatctcttcatcatgttacgaggatcaaaatgtgcttgcccataataaagctcgagatactttacaacttgatagggagttagtttgtagagttctctctttgctcttgttgtaattgtaactcttgttgtttgttttcttaactaaaaaaaagtttataaacaaaatgaaagaaaattagtcatttgttatgaaatcttatttatggatatccaaatcaccaaattagttatcaccattaatgcttcattgtatttttcttgtatttattgatttagtttcccattcttttagtcatattttgtataaataggggttcagtccacatgacatctatatcacttaggggtggattaaactgttaaaataatatgttgtagttcttcatatttcgaactcttctagactatactcactacaccacagtactctatggcacacatatttttgattaaatatggatgttatataatgaaaaaagttagcaaattatttagaacttattcttgatcttaatttatgttccaattaatatattactgttgtaacagaaattgataccaataaaagttcttggtcatagtatca

SEQ ID NO: 162324 - DNA, 8518 bp, Cannabis sativa
gtgaaagaggggatctatagaggaggacgaagacgagtcgccggcgccggagacggaaggatgggtatcggattttggagccattttggagaagcaaatggtgtttggatctcaactccactcttttttcttctaaataataatacaatacaatttctcaaagtttttcttttttttattttttaaattcgggagagattctaatttggaatctcttttttctaaacatgaaactattatatcatcatataagtaaatacatagaataatttacagtgtaaatgtataataattttaattaatttttaaataaaaataaaattttaataatttaaactaattaagatcggtcacgaaacattaaatacctacataaatttcaaaattataacttaagttacctacaatggaaagttaaacttagataattataccgtttattactctaataataataataattaataaaagtttcagagtagattgaatctcagttgatcgatgattaggtgagaccgtttgtcgaacgctttagattaaaggctaattcgaatttgtctccgagtgtttgatatgtactaaatttttcctgaatttttcaagctattaaaaaaatttccaaactattatgattgttggatttaaggacttttgtctaattttactaacgaaaatctgacttggatgaaagttcaagggtacaatttagtacatgttaaagtttggagatacaatttgataaatgttaaagtttagagacacaatttagtacatagacaatatagtcacatttgtaaaattgaataaaatttaacagaaatttttcaatctaataattctcataatttaataaaattattaagagattattatataaataaactaccattttttgttaaaaaaatatatatttttacgtttaattttttttaacgtttttataattttctataaaaataacaagaaaactacctaaaagtaacagaaaaataatacccgaataatatcaaaacaacaaaaaaaaaatttatacaaataacaaaaaatcaacaataaattaacaaggatgcaatataaaaatactgtattttttataaataaaatcataataatagtaaaaatatttaaattcccatataatcttatttttgtaattgtattgtttttatgtatttgtaaaataagtacatgttataggaaaaaaatcataattttaaaaaaaaaaattatcaaaaaaaatacatgccaaaaactgacacgtgtgactaaaactgctcatatgaaaaatttaaaagaaaaaatgaaataatgtctcagttctgcttctttattttctcttcagaaaaacccattcttaatatttttctttggcatttggaacctacaacaatctcttaccagttctttttctgctaatttaaggtaattttgggaacactctgcttttattttgcaaatttctgctttagaacccactataggtttaatttccatttgaagaaaaaaaaaattagggtttcaatgtgcatttacatatgatcatttttttgagttttgattactttttcttatattgactaacagtcagggttagatagaaactatttccatttttaacaaaatcaatagttataatgtgaagttttgatttttatttcagatagttcttttttggggagggggcaattttctgatactgtgttgaaaacatgatttggatcatcatgttgtgtctttagtatatattattctctacttggaacaatcaagtttgatagaaaaacttagttgatgatcatggcaaaaaggatgagcttttgtgatttgcctgaggaaataattgagaaaatcatgttgtgggtgcctgccgattctctagtacaagctaaagttgtgaacaagttttggtattcccttatttcgggtttgattaacgacccaaaatttgtttccgaccacctcctcattgccaaaaaccagtcctctgcatccttactcttcaaatggccttcccaccatgtcgatcatcgcttgatcgcatacaaattgttgactgtaaactatgatgatcgtggtgaggacgatcctcttatgtcagtctcagaacctctcagtatacatttgccagaacttattggtgatgaaagctcttggcattgtagttatcactgtgatgggctaattttgttagtaagtgatgttggaagaatggcgttatgtaatcccgctttgaaagaattcatgtttctcccacaaccaaggaactttataattgaagggcctcctagatatcctaatggtgttgtggaatttggatttgattctgtaaacaatgattacaaatgtgttgtcatttggtgccataacaaatgcaaagttgaggtttacacaatgagttccaattcttggagagaaatcaacatgcctcaagagatagtagacattataacgtctaatgttctaggcaaccctttgtattgggaaggagtttgttactggttggggcatgatttagacaattattattatcgagtgatcctcagttttaatttgagtaacgaggagttccatctcatacgtttgccacactttaaatcttgggaccttacttgttatcgcattgagtttgtggcgtggaatgattcagttgcgctgtattggagagatgacagaaagaatattcttcgccttttcacaatggatgttgctgaagaaggttctgattattcttggaccaactatgagtgtgttggaccagtgggaaaaatttggtttgagcagccaatttggaagaatgatgagattctaatggaggtaaagaaagatgggcataaagagttggtgtcttttaacattcttacccaaaaggtaagaaatgttgtttgttgtgatcaagattttagcagggatttaaggtcaaggcaatttttctttgtaaagagtctggtttctcttaggaggaggtgaagttggattcaagcaaaattgtaatggtatgttactaatatctttatatatttatttatatcacacctattgatctttgttggaatgattaagttgtaaaactggaacagagattgtgtagcacttagactaagtattttgtaagtaaaagagaagatgtattttctaagttcgattaggataattgtttttgttttctttcttaaattcttttccaaactacagaatcagtgaccaagaatagtgttcaaaacactacccagagagagagactaatgttccaccaaagtgactaccaagagtagtgttcaaatcggtggtttacatttcatgaacaaaatgtaaactagactaaaacttaaaagaaaaggcataattggatcaatccacagtgacactatccaaataaattggaggctaatacatattaaaaaaatattcttttattttgtaattatttttatataatttaagaaaaaaaataaaattagggggccatactcttcccttagctttctcacttcaacaaaccaatgtcaatcttctaactatttgagtaataatttttcacaaattatgtgcctcgtgcatgctttgtgttccttgaataacttacacaataatgttttctcaaactaagaaagatgttcattttttaaaattttctacatacacatggatttactttccatgcaacattctcacttttaccaactaagtactctttctaataatttgagtaacaattagtcactcatataaaatatttcttaataggtattacctatctatggttacttaaaaaataactataatgtcaattttagaaatattaagccattaatttttgatccaatagcaataaaaaatgattttttatgcttaattttagctacataattaaaaaaaatatacatgtaataactgcatagtttaaatatgggaattagtggataattgaggatttaattgttaatttatgattatatatttttttaatagaaaataggacttattattagaaataagtcttaaagaaataatttttctatgaagattttcttgaattctaagtgtgctatatatgttatatataaaatttgacttttttatgttttatgcccaacaatcctagagcctcgatggattggccaatagtgttacagttgtttggtttagtattttagaatattgagatagtgagttatgactattttaccctagaattagtggttatttagtagttaagtaatggcaaattagtcatttgccatttaaactttatgtaattaatttttagtagatttatgtagattgtttgggttataagctgaatttatagaaaatatagaaaatgctagaagcaagattaactcataaattaaataattgtatctctcttcaacctttctctttctctaaattctctcttctttcagccctaacccaaaccaaagagaactaaggaacccaagagtgttttcagactaattcttctctttttcagcaagaatttaactaggattcatgaggaattgaaagattaattaaaagtaccctaagcttcttctcctccttgaattttgaaggaatagagggttggtttttatgtgtgaatttgagaattatttctgtttgagtttgattgttttagaaactgttttaaagttcggtttatggtttattatggctggttttaaggttttgtagtagctatagaaggttggagtgagtttgagttttagaactcaagctttgctcatttgtggtgaattttaatacatgttgttttagatgcttttgagttgtggtttatgtttagaataccccaatatgatgttctaaaatgtttggtagctagttttgggtagggttgttccgtgttcgtagtgcgagtggtgcgggtttaagttattttttcaaatcaaaacgcatatgcagtttttgtaatttctcagaccgcaaccgcaccacaaaactttaaaaattgcaaaaaactacatcacaaaaatacagtatattgcggtgcggtttaggcggtttacactatcattattatcaaacattaaaataaaaattaaaagattagtttaatacaattttaacaattaaacaaaaaaaattatcctatcaaactcttaacgtcataatatatatactaatcgcgtactgtattaaattgtctctaaaaaattatataatatacatatatattacatattatatatatatcaataataataggtcaataataagttagaaaaaaataaaaaaaaataaaataatttatatggatgttccttaaatttaattgtatggcttggactttgtaagcatataatgttcatatataaaaagacaagttataatataaaattactatttttgtaatatatagtgtggtgtagtttgagccgcgattattaaatttaaaaccacaccgcactgtgtggtttggtaaaaacacaaatcgcaaaggatttcaaaccatattttttgtgcagtgtgatgtggtgcgggcagtttgtgcgatgttggcagtttgatgaatactcttagttttgggggcttaaaaattggaaattttcgagcccttgctgcctagagaaaaaggttccggatgggaggttccaaatggaaggtcccaaatgggctccaattgtcagaataagggacttccggatggggtttttcgaacaagggtctttcaaatagggtctttcggatagggggcttctagacatggggcttccaaacaaggatttaccgagaaggtcaattatagtattttgaccataatttttcactcgggtgtctattttagacgttctttatactgttttaaagcttgtgaaaagctcttcagtatggtacataagttagagccaaattatgtattttattttagggtattttcaccaagtagttcagtagaaaaccctaaattctacacgggtattaagaaatgctttagaatatacacttatcagttttacgctattgtgacttaaggcctataatcgtcaagcaactttttccactcaggtcgactgacatacctgaatttagaattgaggtaagattagtataatagatatacatgcatacatatttttatgtttgtctattatataacatatcaataagagtggtattgatgcatatagaattgcactggataccaatagacatatgttgggcaatttagtaagtgtggattgatgatatcacatcagtaccattagagaactgagtataggctgataatatggtcaatcatactggatgcggtttatatatattatctaatagtcaatcataggcatttgtgatataatttctcaattatgaagattttattgaattctatgtttgtcatgcatattgattatggattttattatttgcatattttatgtccgatgatagtggaatctgaagatttggctattagaatcacatagatatggttgagtatcttgaaattagcgggacaagttatttggacatttagaatgttggaattgagcggggttacgagttttgaccattttacccattgactttgagatttcttatgtgggaagtaaaactattttggtatttggccttaattttattattatttttgttagtggaatcttagaaaagaaagtggattaagtttttattcagctaaattaaattaagggataaagaaaaagtaaataagttaagattaacatcataaatacaatcaaaccctctctcgtcacacctctttctctctctcggttttggaagctccaagaagacaatccaattctgacctacttcaaccattttagtaagtttcaacaaggattttcagtagaagttaagaggaaaattgaggtaagccctagctcttccatttctttgaatgtctaaggtttaagtttggtttaagatgtgtttttgtgattttgcttatgtaaaagtttgacttgttgaggagctgttctgggagtttgatttaaggttattggtgttgatttgagttggttttggctattgtggtgagagttgagcaagtttgagttttgaaactcaaagcttactcaacaatgacactttttgttcctgaggcttgatgatgtaattttcagttggattatgtttattatggtattattaggtgttctagaggttttggttcgatttgggggtagaattgaacttggaatacagatttttgtgtcttctgcagcaaagcagtcatcgtttcttaagaaattgtgaattgtttccctaagcagaatcccaagaaaacggtccaccggatggtgtgattttaagagcctcatttttcatgatttctcgatttttagggtattgccacgctatttatcaatagagaaacttccggttcttagtttaagtcctcgaaagtgagttagcgagtcgcttacctgttttgcataattgtgacttagggcttcagaatcgttgaacattacttccactcgggttagttggcacacctaattacggaagtgagttaagattagtataaaggacgcacatatatatacatgttgtatgcatgcattatggaagttaagctagttctaacagcactagtacattagaggtattgagtgcatatggtatagggactcaagctagttctaccaacactagtacgttagaggtactgagtgtatgtggtatagtaactcaaactaaccctactgacactagtacgttagaggtattgagtgcatatggtaaaaaggttaaggggttcgaattaatcctaccaacactagtacgttagaggtactgagtgcatgtggtaaggagattagtggaacttcaagggggtacaaactatttgtactcttgttaagaatgttcgagactcgtatgcgtatgacacgtgataattacaatgtaattgggtgtctgagtgcctaagttacagagacatattatatattatgtttttatgttttttttaccgagtctgttgactcacagatatctgcttcatgtgcaggtaaaggcaagtcaaagactaaataagcggtgagtctggagctcatgattaaacctggagggtcagatcttcatgacatcatgggctcagttatagtagtcgtcgggccacacattttgttgtaatgttatttgtaaatgtttgaaaaatgaattcaggatctcagagtttgtaattttatattttatttatatggtgaagttatgtttattataaaagttttgttaatcacgctttttaataaatcctttgattagtaaaggcttgtatagtaattaaaaaaagcactatagcgtgcgtaaattaatagagcgttacacaatattcaccaaaaaaacaagtacaaaaccccataataagaaagatacccgatttcatccacaaaagtattttgaaaaaaaataagtgagaaatttcgataaaaaaattagggtttatgaaatttgaagccctaaaattgaataatatactagtcctaatgttaggctatttttagcctaagttttgggtcacattttatagttgtttttc

SEQ ID NO: 162325 - DNA, 7237 bp, Cannabis sativa
aagtgttatgctagataatagttatgaattcgtatatatataagagatgcattactaactttcactaataaaaaaactgataaacataaagataactgttaacatagattttcgttaaataaaattaagtagccttttagtaataaatattcaacataaattaataaataacaaaatatataataatttcagatatttttacgggttttgtagttaaaatctacctattccacgagtcattcttattagggatatttatttgagtacaaaatacactctctaattttgaataataaagattctctctcaattttttttccgtctcctttttcatggaatctgcccctatttataggagtataggttagacagttgttcattttgggatatatttaaatataactgttcataaaacgtggacaatccctacatttgatttaaatcacatatgagacaatactaaatgactactcagccattctttagttttatcttttagatggttattattgacgtgaaaggttatatcttttctgatttgagttatcttccttatccatcttgataagaaaatatgctaagtgttgggaaggttctcatcttcctatattctttttgtgatatttgtaatgcgaggtgatctttctcactgtataaaatgcaaggcatcttgtgttgatacactcactttgctcggatggatgaatattcctttctttgtcggtatgttccgaggcatgcatctcgttaatctcaaatcaatagttactattcttgtctcgttattgactataaaatcaatgagttttgaatattatctatttaacctttaattaataaacgagttatttaatatccatttaattatatcaaagtatcatttagaattgtttcgtattcgttttgttggacacgtgtcaacttttaaagtgtagctgaatttcgggtataacaattgcctcttgatgggtgctattagtttgtaaacacttgttcttgagccaatacataatctgattcataaaaaaaaaaaaatattatattttaaatttcattcataataaaaaaaataattaattttaatataaaattaaaaagatatttaaaaccggccgaagtgcaagcctattccctaattattaatatttttgtcattattctctctctctctcttgtttttaaatctctcacctttttattttattttttctttaaaaaatctctttttttttcactccatttgcttttttttttaaaaaaagtttttttgtacattttttttaccattttttcgatatttttataatgaattttacttgctttattatttttttgtttttcattttatttgtttattagtaaatatataatagtataaaaatttatacgagcatacatatgatattatatttttttgtattattcttcatctttttgtcataaatttttattagttattatattatttttttttaaattttttttttgcttattagtagataataacgaaaaaaatcaaacaagcttatatttagacaggacgactgatgatcttacttttaatatacgaacttatactacactatgttcttgtttaaacatatttttttttaataatctttaaacataattaatgaaagtaagatatataattataactcataagttttgatgggtattacgtgcctcttggcacatactttacgactagtatatatattgattgattacctaacattcccgctaagtatttttttttcctttaagtattaccacattcaactattgtcccttgaaaattttcgttggtaaaaatcccccgaactagtccttttctagagttttggccctttagttacacgtggccaaaagactgcttatgtgatatttttggagtttaggtggtagcgtcacctcaacgctacgcgcgtataattaaaaaattacaaagaatttttactaatatgaaaaattcagaaaacaaaatttgaatgtagtaatatttgaagggggaatcctatttattctatcctttaactatatatattaatatacttatgtatgaaaatacttcttaatggaatgattaattaataaagtgttaagatattgttacaaaatatatgttgtatacataagatacatatttgttagaaaaggaataaactgcaatgcaagcatgcgaagggaaggctgtacaaggcacaagtgtgcttgtactataaaaagtgcaacatttttttttgaaagggaaaagtgcaacatatttgagaatgtgattttacaattttatatatacatgatgaagtacttcatcaagattcaaatgctaagatcctcccaccaataataaaaatagtaataataacttaatattaaatcatatatatcccaatgtatatattagtaatagtgtagacatatagatataggtttcctttgaagtccaaatcttggtggggatactaattattaactctaaatgtggcaatgcacatgttagagtcacaacacaacataacattaaataatgtgtatcaaacatcatatatatatatatataaatatatatatagtaatggcgtggcacattgtcttccacattcaaagtctatccgacattgaactcaaaatcattcttttcatactttgaacaccacatttttaaactatacatgttcaaccaagataggatcatatttattttatttatatactattactatatataagacaaaaagataataatgacataagtcagattcaataagataagttattgcagctaaagaagcttattattggttcattgggtaaatctttagacttaaggccataatgaaaaatgaaaacttggtaaatttgctttgtgtatgaatctttagtttgtaattaagttaattgacattttttgtttcttcaatctttgactgattgtttcggtaactatcataatttctatgtgattttacagctcaaggctgtttcattctttaaagtgaaaagacaaaaagttcaaaaatccatttacattacaaaaagcagaaggaaaaaaggggtcactcactgaagacaactaacagaatttagtgtcaattattatgctagtttccccaaaaacactgtactaaagaaacaaaaaaagaaagaaaaggccttcatttcttcttgcaaataaaaaatgaaaatcacttttggaaaagaaaaaaaaaaccaatcaatctctatttctttatatgtatctctctctcttaagatattgagtttctccaccttctaggagtctttttggtctgctgatctgcagctgttgtagggagctgagaaccaatttcatggttctcaatgtgtgtcatctttgtaagtttaccaagtttcttccatccacttgtccaagcagatccttgtttttgttttgacatcttttcaaactgtcgttgaagggtatccatgtcgttttggagttcagcatacttggctttaacagtctccagctcaaactttagtgtgttaatgtcttttttggcagtagcccatccttcttgaaatgattgtggggtcccttcaagtagactttttctgtttgagaccattggttggaactgggactctcctgcagcctctttcagtgtagtattggataaggcattacttatcttgacctgttctgagaagagtacttggactactactctcaatggaagcctttcgttctgagcagcgtgcatacaagcatcgatcgatagcttttgacaatccattactcgacaaagtctcttcctttcatgctcagagagtgttggatgagcctgttcacaattttgattttgagttatataaagtttctgagctaaacaaaacatttcccagatgctaactcaattgatgacaaaaacccaaaaaggatacatgaaatcttattggaaatttacaatgcagctccatttgtttgatcactcttcatgaaaaaaaggcattaacaaaaattgcatgaagttagagagtgaattccttaaagaaagttcattttaccttaagataggaatctattgccctgtaaaggccatcatcacatgtccttgcagattcaggcaaagcttcagccaatacctgaaacttagtgagagagaggtttctgtctctagacacctcagtaaggtaactatcaacaagcctagatactctcatcttggcattaggaccagcaagagcagctctttgacttgcatcatacatgtgtttatccgaaaatgattgcctgcttggacttgaaccttcagtctgttcttgaaccagaaaatgctctaaaagtctttgaacaagatcaacatcaaacatagtctctcctttgttgaaattaggaatcaaaagatcagccaaagtggcttgctcaaactgcattcccactctcttctccaactcagtcaccaaagctggcgccactttcaacatgtttgccattctcagcagcctaagaaggaagctgcaggagacactgtccttctgcggcggtataatactaatcaagctctcaattatcatccgttgatcttttgcctgcaccgttgggatgtcttctttagtccctgcgagaatcatatgaagcccgcctttccaactggcagctccactgctactagtgttgctgttgctgctgtggctgccttcatctccaactacaaagccatcttcacttatcaaacccggtagccatttagatgcataatgcattattgcagctccaataagctcaaatctcataccctttactttaattgcagtaatgactctaacaaaatgatcaatccttagaattgaagcatcttcaaaccaccaatcaggaggaacttgttgctgacccctactggggctagattcgttcctttcattccatttcgggcttgaaacactctggtgtttcccagtataagcccatctaatccctttaggattagcacaagccttccaagcaatagactcactacatcttctcacaatttgaagattctcagcccaaggagagagcttctcacaactcttcaaaacaacaatggaatctctccatgaagacaaaacaacataactcagaaaagcttctgtcttgaatataagattgccttcttctaaatcctcagtcatttcaagatactccgcgccacaacgaaggccggatatgttagcagccgttagatcaacagctactccataacaaaactttgctgctagctcaaaagcttcagcccctccaggaatatcatcaagaacaaccttactcatatccgggtctcgggtttcatatataattctattcatctttccactccttgcaagaaggggatacttaaaaaaccaaaaaacaaaccacaattcagaacaattcacagaatttcaagtcttgtttgtaataaagttaaggaaattttgtaccttgtgcaaatgaaaacaaacatctcccacttgaacaagcaaatcactgggaatatcagtagccacataccttattacataagaaaaagaaaagtttattatctcaaatggggttttcataacattccaaccatggcagaattcaacctccaaaaaccataaaaatgaaaaatgatacataccagtcacgtccacgttgctcaaacccatcagttttaacaccatgtttgcttgagctaagaactccattcccatactcacgttcagcaactgactcactttcagattcccacatgatgatggtagtaaccaaaaatcctggaaaatctgaggtgggttttctttcttctcaactcagactgaaaattcagagcaaatatataaaaaaaaacagagaaaaattaaattttgaaagaacataaaataaaaaagtcccacatgggatgcttagaataatcttcaagtgtcggctttaaaaactgaattttcatttttgaagagcttaaaataataatacaggctgtgaagtaatgggcatacttgttctacttacttactgttgtatatttggatcatttcatttcatttctattctcatttttattttttaacattagaaaaaagagaaagagaaaattttgtaatggagtgagttgaattaaaatggtgaaaatattatttagaagaaagaaattaggaggaaggaaagtggtgctttatggagcgtgattgttgttgttttgtgtaaaagcaacgtgttctggtcccggctgttttgatgttgttgttattattatcaatttgtagaattttgggttggattttgtttggggttcacttacacttacattacatataacaattaattattataaatattattctctaggaaaactagaaaattaaatgcaacttttacttattattattattattattattctcttaattaactcaatatttcatcatccattattgtcgatcaattttgggatttcaaacattttaattggctgttactgtcttcaagtttgggatttaatttcaaacattttcgtttaagatcaaaattataagaattaaaatgagataaagactaaaaaagctatgaataagtaaagaaaagctttaaaagcttaacactgttatcattatgtttaatgtctagactctagtagggaggaaagaaatacaaaaataaatttgaatgaaaaaaaaatatatatatatatatatatatatgttgtttgataagcaatagaaaataataacaaattattttaggaaaatgaacaaaatacaacctatggaacatatttgcaatgaatattagtgggttttttagaaaaaaaattccaagggcataactctccaaaatcatagtttagaagattttatttgcatacttacacactatgggatagtgtgtgagttaaaggtggcttctttagaaaggagtagtgctgtaaatacaaaccaaatattgtgatatgacacaaattgacactagtttcggtagtatgagcacgactagacacgaaaaaatataaatttagacacgatacaatatgatgctatacattagtacgatacgatattaaaaatatatgtttaagcacgacacgatacgacaagtacaaatgacacgacacgtaatcacgaatagactagcctgaaagatgaaacaagcccaaaaagcacaaagcatattaaaaaatactataatttaataataataacaataaataatatatatttattaattataaataaattaaactaataataaaacttaaatgcatatagtata

SEQ ID NO: 162326 - DNA, 1590 bp, Cannabis sativa
  modified_base (1522)..(1544): a, c, t, g, unknown or other
tctctctctctctctctcatcttgcacgccgacatctctcaattctgaagttatcgaacctaaaattggcctataagacaggctacacactttacttaggaattaattggtgttatttagtgtgaatcatagcgggatattgaagagctatgccacaacccatgttccatcatatgcaagaagtttcatcctacaaaaattctctccaacacttctctccaatttcatgagttcccagtcgagaggtgacatcctttgtcactcctctccaatttggtatatttatagccgagaatgatcaatttcaataacaagcccaatgtttgtcggatattttcctaggaataagagtgatttttgtagatatttatttagttttacttttttgttcatcattgggaataagatacgagattggaaagtgagacatcccgacatgtcgggcatcactaacaaaccctaagcttatataaagatagtgatgggtagttataggggagggatcgcctacttccctactaagaacacctcatccatttgttcatctttttcctaagttcttcatacagatacgacactaagcttccattgctcaaacactattgatatacatagttaccaataacaagagaccattttcttttcttgctcccattagtttattgttcccaagaacattacaaccatcatccttatcagatatgtgaatgttgggactcccaagagccttgtgttcataagtctcgatacaaatttcaccaaaaaatccctttttatattattatccacacactcttgagaacataactctagtgtgtcagacccaattaataaaaacaaaatagacgtagctccattaccatcacaacatgggggttaactactaccaattcctggtgtcttttttatttattgcagttttatttagtcatatcaattcttcctagtcctcttatttttttacgatcttcttagatctattaaccaaaaaccccatcaacaataggaggctctaatggcctttgttatatgctcagataccctaagtttttcttgggaccattttcaatttatagactgattatagaatcagttttgggtatttataatttggtccctcattaaattattaatttatggtatctacacattatttctaatatttccatcataaattaatattcttttagacccaaaatagaagagagaaatgttaatgggcaccttaaggggtgccaagtactttaagatgtagtatactgctattggtgcaattcactaacgggtgccataattttttgtttttttttttgctgaaaaccaaactttcattaaaccaaaacaaagagtttggtgagcacatggggactcacctcccaaaaatgtaacaaaccattgcatttacaacgcatcatatgaatatagtgttggacactttaagcagggccgaccccaaaatacagtgggtcatgcggcataaatacctaatgttttagcttttatacacttaaatacctaatgnnnnnnnnnnnnnnnnnnnnnnnctaatgttacgattctcttacaccgttactactatttccgttaact

SEQ ID NO: 162327 - DNA, 5391 bp, Cannabis sativa
gcttaaaggcccgtcttgttgccacgggttatgatcaaacctatggcgtggactattgtaatactttttctcctgttgctaaactcacatttgtttgattgttcatttccatggcggtactcatcattggcctttgcatcaacttgatattaaaaatgattttcttcatgaagatcctaaggaagaagtgtatatggagcaacatcttgggtttgttgctcagggagaatttgggcaagtttgttgtctttgtaaatctttatatggattgaaacaaagtctcgcgcttggtttggtaaatttagtcagcttgttgagaaatttagtttttttgaaaagtaagtcagatcattctatattatacaaaagatcaactgctgatatcattttgttagctgtgtaggtggatgacattgttattactggaaatgataccggaggtatctcatcccttaagtctttcattcatacccaatttcatgcgaaggattcaagagtgctcaagtatttcttgggagttgaagttactcagagtaaataaggtatttttctgtctcaaaggaagtatgtacttgatttgttaactgagacaggaaaattgggagcaaaaccttgtagtacttcaatgaatccagttgtgtatcttacacgtgatggagaaccatttgaagatcctgacaaatatcgcagattggctagaaaattatctaactgtgactcgtccagatatcacattctcagttagtgttgttagtcagtttatgtcttctgcaacaaatcataattgagcagcattagagcaaattttgtgttatttgaaatgagcaccagggtcaggtattctttacaaagaccatggagacacccagattgagtgtttctctaatgcagattgggcagactccaaggtaaatagacgatccacttcaggttattgtgtttttgttgggggcaatttgatctcttggaagagtaagaaacaaaatattgtgtatagatccagtgcaaaatcagaatacagaactatgatctagtctgtgtgtgagatagtatggatatttatctacttttgactgaattaatgtttaaaacttcagttttaacaaaattgtggtgtgataatcaagttgttcttcatattgcctcaaatcctgtgttccacgagcgaaatatgcacattgagattgattatcattttgttcgtaagaaaattcaacaaggtttgatctccaaaggatatgtgaagactggatattgactagacctaatccacaaagttgcaagcttttgcactttataatgttcgagaaggaggtacaacaattaattcaatatttaatggcacttcgcgatgactttgagggactcttgaggacctatttagcattgtcctccacttccttcagttgatttagtggtcaatgagttattcgtagatgagatttgtctttaggtctcaaagcaagaaaaggcatccttccaacacctagccaaactatcatggcaattttccctagaacttttgcataccaagagaataaacctcacacaaaagttgggatcaatgagtgcagtttttgcgaacaaaaaagacattagaagacttagtgtcctaagctactaaatcatacacctcagcaacaaagacaacaattcaaacctcctcattatggtaatcaaccacattttggcaatcaacatcaatctcaatctcaacaatactatcatccacatccacagtttaatgtccttcggacttatgtgattttggggcgtaaacatctaaccatgcacttatagctctcttcgtatccaaccttgcacttgtagtttaatgccaaccacagtttaatgcccttctgactcatgatttcagggcgtaaacatccaaccttgcacttgcaactttctcaaatagttttggaagttccttagcattcaaccacatgtcatctcttttttggtaggtcagcctcacactagcacatcaagcatgacctttacataaattttagattctagagtctctcaccatttatcccacattctaaatcttttgtttcacacagatcttcatcagctttgtccgtcataactactggtggtactctcatgcatttaacaagtagtggttctgttgttagtgctcatttattgcttcctaatatttgtcatatttctaagcttcaactaaaccttgtatctgttggtgagttgcttgattctatttactcagtgacattttcttcttctcatgtgtaggatccgcaagctcagaaaatgactaaaaccgattgtaggcaaagggtttatatgttttggatgagttgaatttaataatatatggaattcctagtatttatttgtcttctagtttttatttgtggcactcccgctgtggtcaagtttctacttcctgtttatgatttttagctaccacactacaggaatctttaaaaatttgcaacctcatgatatttttaattgtagtggtcaaaagttgttgctttacatttttttgttgcaccttttcagtctactttgatgtatggggagcatatcctattgttacaaaacgagatctaaatattatgttttttttaattgatgatcgcatttattttttttttgggtttatccaatgaaatgtcattttgaattttatgatatttatgctcgatttcgaggctattgaagaactcaaaatgttgtatttgaatactttagatgcattcaaagtggtaactatatttcaaataaatttgttgattctcttgctatagatggaactatgtatgaaacttcttgtatagttacccctcaacaaaatggtggttgttggaataggcacattgttgaaacaactagttttcttttattgtcatcttttggtcctcatttttgaagggaggcattttaacttcaatccacctaattaagatgataccatcttccattacttaagtttgtttcctttcaaaaaactatatggacatacacctgactagtcttctttgagaatttttggttcagcatgctccatgctttctcctagtgtagagcatacaaatttatagtcttgttctatagtttgtgttctttggttatagtgaaggactaaagggataccattgttttgatccaacttcaaaaaagttgcatgtgtcacttcatgttgtctttcttaagcatatacatttcttctttattcctgtactactcataatttgaccaaatcatattttattcacattaattctttctctgagcataaaagtcctcttgtttctcaagttccttttcctcattactctcacatgtcccaaattatagatactagtacttcgcaacttgacatttctaatacgcctccacctaaagttattttatatgttcgtgatatattggatcctccgcctaaagttattttagatcttcgtgatatattggatcctccgcctaaagttattttagatcttcgtgatgtattggattctcctcgttatcctatacttgtaagccaaactaccatattttgtttattcctcttattctactcctttcacttcatttttagcctctatctagtgtctttttgggtcttcctccaatgaagtgagttactaaccccctttggcagccagctaaataaagaactttcaactttgcacaagagagatatttgggatttggttcctttaccttcaagtaaaggtccaattggttctctttagggtactatctttcaaaagtcttttgtttccctccacctctttattagagttgtatgcatactctaatgttgatcattatcatgatcatgataccacaaatcgcaagtttgttactggcttttgactcgttttgggtgattctaatatttcttgaaagagtaagaaataaactctaatctaacaatcttccaataaagcataataccaccctatgtcaactactatcaaagaaattattttgttgagatggttgcttgtcaatatgagtgtatgtcattctcaacccactcttttgtattgttacaatcaaatcatgatcaagattgcttagaattctattttttatgatcgctgagcacattgaaatcaacggtcatttcactcgtcaccctctgaagcttggcactatcactttgcctattgttccttcttcttttacaaatagttgacttttttactaagttgcactatatttctcgatttcattttctagctagacaaactctagatgttcattactgacgcatcatgaatttaaggggagtgttaaggttattattttgagctcataagggtattttagtctaaatttatcttttgccttttctaaagacttgttattatctttgtaaaattttattatcttttgccttttataaaggcttgcacttgcttgttattatgtttgtaatagaacctctgatagaattttcttagactagaaactttctgccttcaatttagacaccaagaattaaatccctaaaagacttcttttactgttaatagttgcaaaagttacagctagctttcaagaggctactctctcccaattcaacctttcgagagggttgttatctccaattagagttaaactcttctattccgaagctgccttacaaataaatccctggacatattaaaatagtgctagctatctaggatcttctaaaactaagacatatcagcccctcttaaaagaataaaagaaaaaatgccaagtaaaagaaaacaattaggaacaaaataagaactagcataacttggccttctactgtaaacaaaacgtagaggaggcttatcatacacactaacctgctctttctctcttcatctttgcactttctcttctggttcaatggataagtagtattagtatatatatcacttctcactatagaaatatatcattatactttgaaaaaataacatggccaactcccattggcatcttgaaaacgcaacataaaatacgacagtagatgccatccatccggacattttgcaatctttctaacaaccaactcccaatatgatatgctcaaacaatttcctccaaagacaatccaaagtatttaatttctggcttgggaggagatgtgcaggcctcgagaggaaggaggcctaggaattgggagattagaggcacgaaacaaaagtttgcttatgaagtggctgtggagatttcccttagagcaaaattcgctttggcatagggtggtggtaagcagatacggtagggatgataatttctgggattccaagaatggaagtcgtttgtctcccaaaggcccgtggagggacatttcagatctgtatgctgagtacttgggtttggtacatttcaaaattggaagaggggataggatccgatttt

SEQ ID NO: 162328 - DNA, 1470 bp, Cannabis sativa
tttttttttttttttgtgaaaaacgaaaaatgaccctttattggtctgttgttacctgtcaattcataaccagcagtacttcgagcatccggaccagctctccactctgtgggccttgaagatgtcacatgcatgccccggtgaagcatgaaatgactacccccaattgcttgctgatcatcatttcccctgactggatttcttccactagggtcaacaggtgagcggaagcctacattagagggagacgtcacaccaactggtgatggcaacttcatagtagatgcatcacctttcacaccaccactgacatccttcttgctatcaatcaaaaatgtacccacaataacctgtaacacatattcaaaaactgtaacattgacacccaagataaaaagaaggaacagaaacttgcacttattttttggttactgttacttttcaatatccaaatcctgttcacaatgtaaacaaacacttttggggcattgaaacaacactcgaaagcatatctatatctttatctttatcttctttctcttacaacacacacacacatgcaagaagaacatagaataatctaatacttcatgtcccacttgagccctacataatgtgcctaatatctaaaactttgttatcattttgtgataattacaataatataaccattatctactccaactaaggaaaaaaaattaaaaaggtacctgtacgggccctgcagccttaagtggtcctccaacaccgcctccaatgatttgtccatctgtactggatagacacacactgaatccaccactcctgcctccaagctcggtacgtacataagacccggagaaagaaataatgtcaaaccgtccctaattttacagcatgaaattattatgttaacatggtgaacattagctgcaatcctctgctcttagctaaccagcattgataacattatcaaatttctccattttttcccagatagaggaaatatttgccaaattcattctcattgagacttgttatgctatgataaaagaggggcattcaaattgatagctatacttcacttgtactgatcattttaacaaaaatatttgtataattcacctcatatgtaatgctgcctccggaagtagctggctggcgaagggatgcatttgaaattgtgccggacgcagagagaatacatatttcacgcttgctctgttgcatgaacatcataattttctggcccacatcctactaaatgcatccaactatcaggtgagcgggttaacagataaagataacacaatacaggtgagtgggttaacagataaagataacacaatacaagaaagactcgtttggtacgcaatattacattgtattgtatagtattatattaaattgcatttcatgtaatatttttatgtaaaactatatgtggttttgacttttatgaaaatttaaatagataatattttagtataa

SEQ ID NO: 162329 - DNA, 3155 bp, Cannabis sativa
tcatcttcaccctccataatccgatgaaagagcgatgaaagagcttgctgatcctttagtgaagagtgtgtaatcggcttgagattggagaaatccttcttcaagcaaggcttcggagagctttgtgtaccattggcgagaagattggcgaagaccataaatcgatttgtgtagtttgcaaaccaagggtgtacctgcagcagaagaagaagaaggagtgaaaccgagaggcaattgcatataaacttcctcatggagatcgccattgaggaaggcattgttaatatcaagttgtaatatgtgccaatggttaatagtagagatagcaagaagcaatttaaaagtgaccatcttggccacgggggaaaaggtgtcaaaaaaatcgaggccctcttgttgagtgaagccttgagcaacgagtcttgctttatagcgctctacactgccatctttattgaacttgatcttatagacccaacgacatccaattgcctttttatctggaggaagtcgaaccacagtccaagtcttgttatgtattagtgcaatgagttcaacattcattgcttgaagccaatgtttaaaatggatggcttgataataattttgtggttctttttctgcagaaatagcaaaaataaaggcattatgtaaagtggacaacttatcataagataaaactttagtaagagaatgaggagttgagagtttggtatgtatatgagagtaacactcatagtcttgtaaatatcttggggttttggttggtctgctggtgcgccgagtaggggctgctggtatggtgggagatgatgtgttcgtggtggaaatagtaggtgcatgaggacattcttcttgctgatctggggacagcaaggaagaagtggaagtggcatttgtattgtcctgtggagaatcatcagttgtggaaatagatggataatctgcaataggtgtattagtgacagcagtagaaggtaaaactgagataataaagggatttaaacaagcagtagctgtgttgattttagaaaaaggaaaaatatgttcatggaaaactacattccgtgaaataaaaaattgtttggtgtttaaatcatatagtctgtatcctttaacaccttggggatatcccatgaaaacacatggtgtagctcttgctgcaaacttggtcctgtgggcagtgatagtagaagcaaaagctaggcatccaaacactttaaggttagtgtaatcaggttgcttaccatataatttttcataaggattagattaccaaggttgggagtgggggttctatttattaaaaaaacatatgtcattatacattcagtccaaaaatgaagaggaatgtgggcttgaaaacataatgctcgagcaacattgaggagatgctgatgctttctttcagcgatagcattttgttcaggtgtttcaatgcaagtataatcatgtaaaataccatgtttgagaaagagatctttaaaaaccaattcaggggcattatcagaacgaaagcatttaaaaacacacttaaattgagtttgaacataagataaaaattgagggataataaaagtaacatcagatttttgtttgagcaaatatatccatgtaaaacgagaatggtcatcaactaaagttaaaaaatatcgatgattagagtgagatgtaacatgatatggtccccaaatatcacaatgaatgagatcaaacacatgttcagaaaaggtagtgttattaggaaatggcaatcttttttgttttgccaagggacatatgtaacaaggttcattcttgtgagcagttttaacagtacattgcagattattactaagaagatttaaattcttttgagacaaatggccaagcctagagtgccatgtctcagcagaaacagcaaaaacgtgagaaggaggatgtgtgagatccaagatgtacagcccattaatggaatcacctctgccaatcatcttctggctggtgtgttcctgtatgtgaaaactgttagaatgaaaaagaacttgaagagaggtatgattagtgaggctgcttacagatataatattatatttgaagttgggtacatacaagacatttgtaagagttaactcagaacagagagaaactgtgccactataactaacatgaagacaatcattattaggtaaaataagtttagttgaagcaattggactaacagattgaaaaagtttaatgttagaacatatatgtcttgtggcgcctgagtcaattatccaagaattgaatttaggtaaaatagaattgcatgaagaaacaataccaatgttacctcctgaagtactaggatccaagacaatattgctagactgttgtgttgccaagagatttagcaattgttggtattgagtagcagaaagctgaggaagaaaagtattgttgtcgacaggagcagtgactttttcttgttcagtttccacttgatttgctgctgcctctttggacttagccgatttgttgtatcccggaggatacccgtgtatcttgtaacacttgtctatggtatggccatgaatattacaatgggtacaaaatggtctatttctcttaggaggattatttcttggaggttgaacatcagatttattgttgggtgttttggttccttgaaaggcaaaggcaagattaggattgggatcagcagtagaggtggtgtttcctctctggttttcttcttgagaaacaagatgaaagaccctattcacttcgggtaaaggatccataaggagaatgctgcttttcacttgcgagtaaaaatcggataaacccataaggaatgacataatatattccatatggtagtgttcttgtaatttcttgacacctccacacgtgcagccattgcaggtgcaagtcggcctgtaattggagagttgttcccatatagttttcaaccttgtaaagtacatactcacactctgattgtcttgcctgagattcataagatctttcctgaggttgtaaatgtgaggaccatttcgttgatgaaaacggacctttaagtcagtccatattgcggcagcagattcatcatataatatgctagacgaaatttccttagacacggagttgagaatccaagaaatcacaatattgttattacgaatccaagc

SEQ ID NO: 162330 - DNA, 2410 bp, Cannabis sativa
gtcaattttctttccacaaaaaattagagaatcagtggtcctttcctttgcactcatcgatttaactaccaactacaaacaatctcaaccgttggttcctgctcatccacggctgaaattcttccctcttccttcttccaccaaccaacctttacaaattgacctcataacaacactttaaaatttacattaaaatattaaattactaaaatcatagtcaagtctatatttggatgggaactcgttagttctccctataaataccaactcaaactgttggaccaattgtcccagtgagttgagttgtgagatttagacaaccaattttctcttaaaggtttccacgttcaacactagcaaatcttcttaaaagaccaaaggttcgaactttttcaaatttcattgctggggttttctcttttcatcaacttgttcttgttcatttctgaaaagtttcgttttttgttgtttctgaattgttctttatgaaacttcattgctggggtttagcttaacatagtttccattaagaaaacaagtttataaaatcatgagaaaaaatgagaaattggtgaatgaatgtgatctttcatttgttgttaaggttctttttatttgtttatgctttgttgttcctcattgggatcatagacatggtgtttgattgtggtatctctaaggtaacaggtagtcaattctgactttctcttcatctgatttgaattgcagcttgggagaatggattccttcttgttcacttcagaatcagtgaacgaaggacaccctgataagctctgcgatcagatctctgatgcagttcttgatgcttgcttagctcaagaccctgacagcaaggtcgcctgtgaaacttgtacaaagaccaatatggttatggtgtttggtgagatcacaaccaaagccaaagttaactatgaaaagattgcccgtgatacctgccgttctattggattcgtttcggatgatgttggtcttgatgctgacaagtgcaaagttttggtttacatcgagcagcagagtcctgatattgctcagggtgttcatggccaccttactaagcgccctgaggaaattggagctggtgatcaaggtcacatgtttggttatgccactgatgagactcctgagctcatgcccctcagccatgttcttgctaccaagcttggtgctcgtcttactgaagtccggaagaatgggacatgtccttggttgagacctgatggaaagacacaagttactgtcgaatacatcaatgacaatggcgccatggttcccgttcgtgtccacactgttctcatctctacacagcatgatgaaactgttaccaatgatgagattgctgctgaccttaaagagcatgtcatcaagcctattgtacctgagaagtacctagatgagaagaccatcttccatctcaacccatcagggcgttttgttattggtggccctcatggggatgcaggtttgacaggccgaaagatcatcattgacacttatggcggttggggagctcatggtggtggtgctttctctgggaaggatcctaccaaggtagacaggagtggtgcttacattgttaggcaggctgccaagagcattgttgccagtggccttgctagaaggtgcattgtccaggtttcgtatgccattggcgttccagagcccttgtcggtttttgttgattcctatggcactggaaaaattccagacaaggagatcctcaagattgtgaagaagaactttgatttcaggcctggaatgattgccattaacctggacctcaagaggggtggcaatggaaggtttttgaagacagctgcttatggacatttcggtagagacgatgctgactttacatgggaagtggtgaagcccttaaagtggagaaaacctaaggagtaagcttatggctacactgcctgcagttcaccaataatatgtcttcattgattgtcattgtgttcatctcttcttcttctttttatttacttttgaaagaattttactcactttcttggccttctgaaaagaaataaaaaagctatggattttttctgtcatgatgaagtgaatcatggaagaatcaatgtactgttgcttttggtatattctagcatgataattggtcgatattttttactcttcttcaaactatcttcacatgttaaatgttgctagctagctttctaataggtgtgacccaggtttaaattgaattgacccctcgaaaaagaaaataataattaaatgaatcaaaaaccaaagaaccatgagcacaaaaatttaaggataattaggggtgggcaacattccatcaattcaattgaaccgaatcgattcaatccaatctaattacaaaatattagatatcgaagtacttttcttgcgtatt

SEQ ID NO: 162331 - DNA, 12427 bp, Cannabis sativa
  modified_base (5611)..(5614): a, c, t, g, unknown or other
  modified_base (5917)..(5917): a, c, t, g, unknown or other
  modified_base (11917)..(11925): a, c, t, g, unknown or other
tggtaaaatatattccaacactagccacagatgaaaatagtttgattattccatgcttggcacaaaagtcaggtcaattgatcactgtcgaatgctttctgtcattagacactatcttgtgtggaagtccttatctgtacacgatgttttttattatgatgtccagggacttctttgaatttactatgttcatgtgcttagcttccacccatttagtgaagtagtcaacaatgacaacaacaatttgactcctcattttccagttggaagtgatcccactaagtttattccctaaatgacaaagtgtcaaggactgttcataagggatatctccatttgcggggctcttgcaactttcgagtaacatttgcattgctcacatttttggacatatttagtgtaatccttcttcatagtaggccagtaataaccttgacaaatgattttcttagaaagactgggtttagatgtgtgatctttgcaaaattcttcatttatcccatgcatgagagtgcttatctttgtttaacctgtgcaccttaggtgcaacactgattatcctcttttatataatttcctatccatgatcatgtatctggaggcctgatactggatcttttgtgaagcagcactatccttcaaaagtgtacctatttccaaatacctgagtattggcgccatccaggaggttgaatgattaatggcaaacacccccagtgtttttgtgttcggggtgaccaaatctgcgatggggactagtctgtatttctctatttctggattcgttgccaatttttccaacatgactacaaaagtgctcttatccttggggatttccttcacagagtagtgcttaaaattctatattagctccatagttctttccacataactagccattttctcaccttttgtctggaattctccatacacctggttgatgactagttttaattcactgtagagttcaatgtttttggcaccaacctcttttgccaattgtaaacaagaaatcatagcctcatgcttagctacattgttagaaactctgaattttgaaatgaagtgaatgagctggagttgttgaggacaaattaaaatgctttgtctacgtatataatataatggaagttgtacctttccctgttctcgcactaaggcaacgcttatggcatgatctgactctgccaagtaaaagaacaacaactctccatcaactggtttggaatgtattggagccttcactagacgttcttttagttgctagaaggttgcttcgcattctattgtccattcaaacttgttgttacctaaaagtacgttgaagaatggtatgcagttatcaatggatttggagacgaatctgctaagtgttgctatccatcctgtcaacttttaacatctttgtgttttctaggtgaaggcatgtctagaagagctttaatttgctccaagttttgcttgatccctcaataactgactatgaaactcaataattttcctagagaaactccaaaagtacacttctttgggttcaatttcgttctatactcctagattattgcgaaggcctcttctaaatctttgtaatggcttttggaggtttatgattttaccagcatgtcatatacttaaaccaccatttcttccctagatcattcttgaacattttattcaccattccttgataggtagctctagaattgttcaacccaaatggaattacctagtaacagtagattcctttgccagtttgaaaactcgtatgctcctggttagccacatgaattttgatttggtgttagctagagtatgcatccatgaaggttaagagttgatatccccaggtagcgtcaaccatctgctcaatgcccgaaagtggaaaatagtcttttcaaaatctatacacatcctccatgtcccattagtctttgggaccaaaactagattggcgagccatatgggatacatagcttccttgaggaagtcaatgtttgttagcttgtccacctctgtttttattgcttttgacctcactagatctagaggtctcgtcttttgtcaatcttgatctatgttgggatctatgttaatgcatgaaaaataacatgaggattgattccactcatgtcataatgactctaggctaacacgtcaatattatccttgaacgtggaaacaatattttccttcaccgctagaggtaagttcttccccactcggataaccttggtaggatctctatcatctatgcatacttcttccacttcttccattggttctattatatgttccatgccaacttgtggatctagctcatcttcttggaccacccccaatgctggctaggaagatgttctggcttcaaatatctctccttcttggacccttagaatggtcatggttgaaatgttgtaaccacctcgtgcacttctttgatcttttcatattgtcccaattctttggatatcacttgggaactttaagcacaaatgtcggatggatgttaccgcttcaaaatcaatttaaaatggtcttcctaggatggcattattagcaatagggcgatcaactattacaaatgtgttgtacttgaataatgatactacattgcttttggtaactttcccatttattttcatcggaagttatatttttcccatggggatcagtgtgtctcctttaagaccttgcagttgtattggacatggcaacagattggcttccaccaaactaatggcttagaaggctccattaaaaatgattttcatagggcttccattatctacgaggattctggaaactctttcatttgttatgtgagcctctatcactaaagggtcattgtgagggaagtgtacatgcctgatgtcatcttctgtaaaggtcattggtaaattcatcatcctcagaggctgggcaagtgactgtaccaggtggcaagctttgccttggttcaattcatttaagtaccttttttgcacattatgggtgcttccaataatatgaggtcacccagaaatagtttctgcatgaccatctaagattggtaaagaaactcctagagggtgcagatttttaggaccgagggcaatagctattactactaccaaagcattttgtgccccttaaaaggcttgtgcatttagagcttgcattctaagagcttgtggaaggcctactccctaacaaggatttttggctccgtgctacactggaatgaaaagctatttgtctacaactacctgtcatggatatatgtcaaggatccttacccaattggataagtgtccattctgtattagtccttcaatttcatctcttaaagagtcacattcatttgtggtgtgacctatatcactgtgatattcactcctcttacttggatatcttctttattttccatgtttatacattggtagaggcttcttgtaattaccatgttacaagtggccttgtacatattttctcaaccatctacaagacttgtatactcaatgtaccttgattcatgggtctttccctttttcacagaatcactacagtttggaccctttaaactccttttacaatgagattggattatattggagtctagaacttctactttttagttcgtttatccagtaacggcactatatctgatttgtgtagctctaaacccagaaagactagcctgtacagctggctgcacagaagtactttattcatatattgttggagtagtataagcagctggtggagggtaaatggataaagttgtcatatgcaaagtttaggaatttgctacattgatggaaggtgcttgaagtactctgtaagcttgggcataatcttcttccaagtttatgattccctagccccttatctagaattcagtcaaagtgtctgccctcttatgttggagatctccccacaacaaggatccagttgccagtcctaattttaaggctaccattttcatgtcatcggtaactatatttttagcaaccatatccatcatgcacaaaatgaatttcttcaaactttctcccaattgttgttggacgctggtcagggaactagcttttaagtcataatttttggctggtgtaaattgctttctgaacattgcttgtaggtctatccagttgtggatcaatctcggagacaacctcttccagcagttcttcgcgaacttactcaatgttagttgaaaacataaacgctcttgttaacatgcataatttttttgtacttggtgaagttgtcccttgggtacatccgcccttcatacaaatccatttgttgcattttgaaatgttccagtagtggcgctttaatggttctcttcagacagggctctttatcctcttccttagaatctaacacgatgccactttgtttcgtagaaatcttgtctgtgatcttcatcaactccttaactttgcgttccaggcattgagtcttgtcaattgaagactctcttccacaaatgcaatcgttgttgtggtctctcagattctcccacggggtctagctttttctgctttggctctctctttcttagcattcaatcttctttgaagattgttcatggaaaggcttccactgctatcatctgatacttgatgtacttcatcaacatcctcatcacgattattggaatccctgaaaggatccttatccatttgggactctggcttctggaatctgacatcagtcttattttcttgtgtgactctgcctctagagtttgtctggtcaccatgccctgaatcatggtttcctttcctcctttattgaggtaggtcagcagctttagactttttgtgctgcttggtggaaggagtcttcctcagttcttcgacgtctatccctttttatttgtctatgcggacacctgaagttctaggatcttttggatctattttgtcaagggcatcagttcttggagatgcttgtacgtgaagagcccctttggtcagggcactcattacagcctccattctggtcatctttgtgagcaattctcattaaattaatcttgttgagttaacgtgctttctcccagttgaagttgtctagcgaagatgagaacaatgtctgaattgtcaagttggttcttctctccaatgttatcatcagcagccttatccttagggtcgtcttcatgcatatcctcaagtatttcaagagtgttatcattagcatccttagaactgctttcttaggatttggcatcttgatgataagatcatattgattttgatctttatcttggtaaccattctcatggctagtcatctcatgtggatcattagaattccctaatttggtgttgggaccaataatatgaagaccagacattgttcgtgtgagttccatgattacttgaacgtaatatataagtggtcaccgtacttcattcaactctcaatgaaagcaccaaaatatttatcgagaattttgaaaactaattataaacgataagaactgtagaaatatttaattaaaaaagaaagagtaaaaagggacaaatagttttacgtggttggggcattaattagccttactccatgagttagtgttattcgttagttcttagcttgaaaagcctttaggaatacannnnatatatgttctcaagtttgcctaagaaagttttgtaagagaattcaaccctatatccctaggatttgatgggtatttatagtagtttaagattcacatttagtttccctttttcttctgttggggagtttatagtgaataacacacttggactgtctcgataagtccaccccacaaagtagaggatttgttgactaggcagatttgatttgcttgatttacaatttttaataaactcgttgattagcaacgagttgcacaattaagttaaaatcacgctaacacgcctaaactagtagggtgntacaatttggtatcagagccactaggttgtcttccaaagatcatcacgacatgtacaatcatcattagcaataagctcgactcacggtttagtaagtctttgttgctttactagtttattttattagtatgatataagaaaagcctgataggaagcatgttagtagcctgatagttgaatagacgcatgttttaatttctaaaataagcggtaattagtaaattattcttgatcgaaatctgaccaagctagctcttagtttagcaggctattcttttagaatggatctcaggaaaaacacgaggagccaaggtaactcggtcgtatctagtggcagttagggagttcagattccctcaaacatacgttgccaaggtagaggccttagaggcatggcacgccgcaggctgcctaggattgggaagataggttttcagcaatgcaagccaggatccttgatcaagatgaagaaatcaaatgcatgaggcagcagggtgctcttgcaatgcctgctccagagatgcaggtagctcctgtccctgctatgcaggcaatgccaattgctacagtgaatcaaatggaaccgttgtatgaaaggttccacaatctggcacctccagtctttttgggtggtcccgatgtgatgaaagttgagcagtggttgacagttattacaatcttactttatgggtgtcattggtaatgacagaatggcctatgccacattctagttcagggaggatgccctggtcttgtgggacatggtggccctgactcgacatgttactaccattacctgggaagagttccaacaatttttcaatgccaagtactacaacgaggcagttagaagtgaaaaaataaaagaatttacctagctgactcagaatgagaatatgacagttaccgaatacacaactcagtttaatcgattggctaggttggcctcgagaattttgcctaccgatttcagttagaaacaaaagtacgtggatggattgaatccaaaagtaaaacacaaccttatgattaccaccaatgataataccacctatactgacatggtgggaaaggcactatgagttgagggtgcagctgagtgcacctaggagtcccaaagggctcaggttgttggtggagcccctacttctcctacctctgcttatggtagtggtatagtgactcaaccattggccagattggaaaggcaccatctacacctcgtggctcaaatcagaacaagagattccgagggaaccatgctcgaggcaaccgtcagggtggtttcgaaacccgatatacttacccagattgtccaagttgtaagaagcatcatctgggtgagtgtagagggtgaggatgttttcgatatggttttcctggacactatgagagaaattgtccacagcttatgaaagaagaacgaaagatagtagtaaatcctgctctagcaagggtgtttgctcttactcaggctgatgcagaagtcagctcctcatgtgttacaggtaagatctcggtcaacaactcttacttctctatgttgtttgactatggggctactcattcctatgttgcggccaaaaattttgattaatagggtaaaccatatgatagttatgataaagggtttggaaccctacttcctgacagagaattagttatctctaaaaggtgggttaggtatatgtcaaacaaaattgaggatatcgagttgagtgctgatttggtagaattaggcttagcagatttcgacattatacttggaatggatatcctgtccaagtacttagctagtattgattgtaaatggaagatggtgatcttccaacctgagggttaggaaccatttttatttttgggataatttaagggatcccagattccagtgatctccttatttgacactagagatttattacaagatggatgcttagggtttctagcagtggtattggatagcacagggcctgagacaattcggccagaggatattagcgtggttcaggaatttttaaatgtttttcctaatgaagttctaggtttaccaccacagcaagaaatagatttcgttatcgatctaacagctagagtagaaccagttactaaggcaccttacataattgctctgctagaacttaaagaattaaaaattcagctttaggggatgcttgacctagggttttcacgacatagtgtgtcatccatgggagctcccgtgttatttgcttcgaagaaagatggatccctatgcgtgtgcattgattaccgggaactaaacaaattgactattaagaataagtaccctatacctaggatcgatgacttatttgattagcttcagagcaagacagttttttctaagtttgatctacgattaggctatcatcatttgagaatctgagaggaggacatttcaaagactacttttcgcactaggtttgggcatcatgaacttttagttatgtcctttggactaactaacactccagcagcttttatggacttgatgaatagggtattcaaggatttacttgatacatgtgttagattatttatcgacgaaatccttgtgtactctcaatcagaagtggagcatgagcaaaatctatgaatggttctataatgactacaagaatataaactaaatgccaagttcataaagtgcgagttttggctatgttaggtgtcttttctcgaacacattgttagtaaaggcggaatcaaggtcgatccgtcaggtattggccaagactaaaggtagttacagaagtcagaagtttttttggtttggctggttattatcgtcaattagttgagggattttctaagatctcaactcccttaacaaaaatctctaaaaagaatcagaggtttttgtggacagacaagtgctaagcaagcttctaagagatgaaaaaaagattgatcacagctccagtattagccccaccatctgatacagacaacttcgtggtttactgcgatgcatagggtttggggtgtgttttgatgcaggttgatcgggtcatcacttatgcctccgtcatttaagagaatatgaatagcgaaaccttactcatgatttaaaactctccgcagtagtctttgctttaaagatttggtggcatcacctctatcgagagaagtgtgagatttataccgacgacaagagcctcaaatatttctttactcagaaagatttcaatatgaggcagaaacgttggttggagttagttgaagattataactgagaaatcatttatatcctagaaaggccaatgtggggggagatgccctgagtagaaagggtcctgggcagataactagtatgatcaagatttcacctcaactagcagataacatggtcagattaggtattgagtttgatgtaggataacttcaaaatttgacattacaatctgttatattagacagaattaaagttgctcagttaattgatcgtgaactggtaaagatccgggaagagttttttctggtcaagctaaagattttacggtgtcaaataatgggatattgctgtataaaactagacttttgttctgggtagtgcggaacttagaaatgagattcttgaggaagctcatacaactccatattcactgcatcatagcactaccaagatgtatcaagatttaagacccttctactggtggtgcatgatgaagaaagatgtagtagaatctttatcccagtgtttaacttgtcaacaaattaaggttgaacattagagacctgtacggttattgtagccactgacactgtctgagtggaagtggaaagacgtcaccatagattttgtggttgggttacctaaaaccacgagaatgtacaattctattaaggttgtggtagattgatttacgaagtttgcacattctctattgctgaaaacaccatttacagtggatcaatacctagaattgtacgtgaaagaaatagtaagcttacatggagatctgaagtcaattatatcggatagacatccgaagttcccctcaaaatttatgcagagcctctaatgggccatgggtaccaaactgaagtttagtgcagcttcccatccttagacggattgacagtctaaaaggacaattcagaaaatggaagatatgttacgtgcctgtgtgttagattttgaaggctcttggagtaagtatctaccgctgattgaattttcatacaacaatagttatcagagtacaatagagatggctatgtaagagatgttgtatggtaggaagtgtagatctccaatttgttgcgatgaaactggagaaaggaaatacttaggttataaatcagtgcaacggaccaatgaggctatagaaaagatcatggccaaaatgcttgcctctcagagtaggtaaaagagttatgcagacccaaagcgcaaaaacatagaatttcatgtaggagatcatgtattcctatgagtgtctccaatgaaggggattaaaaatttcaggaagaaaggcaagttatgcccttggtttacaaggccttttgaaattctcgagaacattggattggtagcatattgtctacccttacctccaacactttcaacagttcacaacgtgtttcatgtcgctatgttacagaaatatgtttcagatcccactcaggtgctgagttatgagaaactagaacttgagtcgaacttatgatacaaagaacaaccagtttagattttagacagaaaaggtaaagtccttcagaaaaagaccatagctctggtaaggttctctggagaaacagtaaggtggaggaagtcacctgggagttagagtctgacatgagggctcaatatctagagttattcaagttagattttgaggacgaaatccttttgatgggggataattgtaaagatcgcttaatttttatattgaattcacagacaattagagcttaattatgagtttagattattaattatgatttatgaagttatggagatttatttgaattcaggttgtattagttatactatatatgaaatttcaagtttttcatgttttgtgctcatcaacaacggaacgtgacgtttggccaatagaatgacattttattatttttgtaatagtggggctacttagttagaaattaggaatgtcgggaatattcgatattttagaataaccaaaatagccctaggtgccaagtatgttttttaggtatgtgtaagggaaaaatcctcttttttccatttagttagtttatcctttagtgattttgatttatgttaattattcaaaacttgagttaatgttattatataggttttgccttatcacttagttagaaaattaaaaatcagaaaaactcaccttctctctcgatcctaaagagaactagtagcaaattagggttctttagttcttctcaaaggtttatagtaggattttagtgtttccatccaaggtaagcttcatagctttctcctctttatggtttctttagtttaaagataattttgcgcatgatttatgagagtttgggtactgtggtgttagaaggtgtttggttttgtattctaatgttaaattaaagttatttacgttgaattgagctaggtttgtggactatttttgtgtttgagaaagctttgagtttaaaaacttaagctttgctctttaacggtggattttgattctcgatctattgctttgttttattgcttggaatatgtttgttgtgacctaaataggtgttctggaggtttttgtgaagtatgggattgaattgaggtgtttaggaggtttttggtatttcctgaactgaactagtcgaccggttctgtggaaccagtaggaactggaatttcagttggtccacaagaaaccccacaaaaccggtcttccagttggggaactggtttgccaattgggacagttttgggaaccctattttttctcatttttgcgatatttagggtattgccatgttatctatcaatagggaaacttttagttnnnnnnnnnagtccccaaaaagtgatttagtgtgtctatgatcggttttacaaataatgttagggtcctgtaaatctctgagcaatagttccattcaggttggccagcacacctgaattcagaatcgaggtaagattagtataatgatatacatatgtgcttacatgtttagcatacatgtttattaagcctattagaatacatcgatagcggtatcagtatacgtagagttatattggatactaatagatgtatgttagcttggatactgatcgatactatcagattggtatgactagcgtacaaagtatagactgacattatggtcgacagtattatcgtacgaatgttctagactcagtacgatgtggacacggggatagggttttggttgggtgtatgggtgcctgattataattcaggttatattcatgttttgtattatgcttttcttactgagtctgtcgactcacagttctacgtttatgtgtaggtaaaggcaaggctaaag

SEQ ID NO: 162332 - DNA, 2756 bp, Cannabis sativa
ctctcatatgcataaaaacacaggacacaagtatatcgatatacaatcgaaatcagtctcatttcaaaatgaagtctggttcagcaatacataaaaacaaaatacagctcgagtatatttatgccccaccaatgggggccactaaatacatggacagagaggcttattcgtactaaaactcgtcctttattgattacgaactaagagttgactcacgcaactcccaaaagcttctttacatccttctgcaaaataggaaaagaaaatgcaagaataagaacaagaaaaccccagaaatctattacagattacttactttggtcaagtagaagctaattcagtataatgtttgttattgttattacctcaatgctgagaggtgaagttgtgggtgcataacggtcaacaacctttccctctttgtcaacaaggaatttggaaaaattccacttgatgccgtccccaaaaagaccacctttgcttgacttcaagtacttgtagattggagcagcattgtcaccattcacatccacctaaatttggggataacatacaaagttcaaatcttgtttgtttcgataactctgatgcagttaacaattcaaattctgtggacaggaaaagagaggaaagcaaaatcttaattctcgtggaacttgctgtaccttgttgaatatgggatattcagccttgaagcgggtgcacgcaaactctacgatctcttcattgcttcctggctcctgagctccaaactggttgcaggggaatgccagaatttccaatcctacgagttgaaaattatctattagacctcaaccgtgcattagagagaggatcatcttatggcagttgaaaagagacaaaaactagcaaacatcatctcaagggaagaattttactaaaacagtttaaattatagcatgagtgagagaaccaatttctgttgaaagcaattaaaaatgagagtaatataacagaggcaagacaaaccttggtccttgtatttctgatacaattggctcagctcagtgtagtttgaattggtcaagccactgcaccaaaaattataaaggaaccgtcattaagctaaatcagcaaacacactgacttttcataaatgtaaagcttccaccgaaaaaacagtcacccccatccaaattggctcttttttggatcttttctggtaacacactatggccctgtttggcaaagcttaagcaatttttttttttttttgaggagctagaatcctagcttcacaaaagagtgcttttttaacccaaacgggggcatatgtgtagtagtaatagaacaaataaaagatgattgtgaaaatcaaagccaatcaaagccgtaccattgagaagcaacattgacaatcagaaggacttttcccttgtagatgctgagatcaacatcatttcccttagcatcctgcagatgaaaaagagaaaaactacatgtttaacttgtgttcaaaaatgaaaaagaataagcaaacgacagtatatcacctgccacaaaactattaaaatgtaaagaagatttattagctgaataaattcaagaacaacccattaaagacaaaggagaaacaatctaaatgaactcaatgttgaagcagataacccaaacacagatcaagaaacaagcttacaacatgttcaaagttatgatctgaaaacagaatcataaaaattacttggctatagtttgagttggatctacttcagacaccataaaattctacatcacatatttttctaagccccatcaatttaactttcaagattaaagaaaaaacatttctcctttcttattattcaaatatgaaatctaaacaacaaaaagtactatcattgtcaaggttccaagaaagatgactgggagaactgcaatcacataggatctttaagttcataaacagcaattcacacacaatatatacataggtaactttttctaatgaaaataaccaatatattggaaattcctcctcaagaaaacaatatatatatatatataacttaaaaataaaaataaaaaaattaagcaaaccttaacagtgaaatcatggatagatgtggtactagattggctagccatggatcgatgaatggaagtatacctttcgttagagtcacaagaaggctaatatatataatgaaaatacagtttctgttccctgccgctcattttcctcatttatcattattaattaatttattattattttagcatatatccaataatataatatgacaattggcaagatatttttctgtcttcagaatttgttactaagaaaagaatatcaattatgtctattttttcttctctcttgttagttgtcatttatactacgtgcgatcgttattcgttcatgtgtgttagaaagtgttttttcaaagtaaattgtcgtttaaaatataaacatagcaattgacttttttttatatagtgaaaatgttgtcgttaatcaaagcattgtcgttttcaagaaaattgtcttgattttttttaaatactgtcgtttgatgatgctcaccccaaaacaaaataaattgatgtcgtttagtaaataagaagaaagagagaacagagagaaaatccgagaactgtttaaagtaataaattaaaaatcaaatgacaaaccttaacagtgaagtcgtgaacagatccggagtgggattggctagccattgaatgttccgatcgcgaagcgcaagagagattgctagaaaatgacgtcgctg

SEQ ID NO: 162333 - DNA, 3226 bp, Cannabis sativa
atggataaacctcgtcgacttcctcactgctcacacaaacaatcagaaaccaaaccagagagctctctgaaccagaatgggagccttaaagctcattctcttaagctcaacaaccgcacccactacttccactacatctctctgtctcctttctccatgtcccaccagaccctttcctttctctctccgcgctcttacacccccatttcttcacctccgtccacctctctttctttctacatctcttcctcgctgtacttctaagctggccgccgttgagtccaacaacgacggatatgacgactcagaagaagattttgaagaattggaagaagaagctgatggtgctgagcattctgagagtgagagtgacgccttgattgatgtcgaaagcctcgaaaaagaagctattgattttgttcgggaattttcttcctccttatctaaagagcttataattggtgcgttttgttgctctagtataacattgctctgtttgtgagtccaattccctcttgcatttggtttgggattgaacttttgttatgaattggtaaattggattttttttctgaccatgttcgtaatttgacctgaaaattatgaaatatggtaaaatgttcaatctttttggttcttttccttttccttttttgcttaaccaagaaaaaactgattaggttttttggtagcttttctgcttttgggatggttttctggtggattgcctttaaatattagtgtcaacgcatgtacaatgcaatctggtggattacttggtctcttagttctaaaatctggttaagtggttgtgtttatgactatacatagattattgtgctcatttcagaagaagatgtgaaaacggacagaaagagcaggagaaggcaaaagactgtaactaaaagtgtaagcaagtgtttttcattgttgtgacgttatattttgtggcaactattgttagagtttccgagctatgaagcctgaggcttggttatttcatattgttatctttctcggcttaaaattttaattgattgctgaaaataaactattttctatggtaatatgaaattattgaagtattattttttttttgctgggagaaattatagaagtattatttggacttttttctaacaaaccagtaaacatcatgttttagcaatatttgaagcctgtttgaaatctcgcagaatgcagtgagatctcatactttcttatggtttggtcgaaccaaaagggaaggttaaatttctatcaatccaattgttggattacaaaaggaattaagttgtctgtaatgtcattatgtttctatctctttattgtaagatagggactcttctattggattgaaaaaaaaaagagatagattctaggtttctattttctgaaatcgtaaatttccttcacagataccgaaccatcttcttccaaaagttgcaattgttggaaggccaaatgttggtaaatcagcattattcaatcgtcttgttggggtatttggtcatgaataagactctgcattttccttttcagtttatgtttaagtacttggaacttgccctaatgtagaagtcttttttctgatagttgacttcctttttgtcaataaggggaacagggctattgttgttgatgaacctggggttacgagagatcgtttatatggtagagctttttggggggactgtgaatttttggtcatcgacactggaggtgtgctcacagtttcaaaatcacaagctaatgttatggaagacttggatattacaacaactattggaatggatgggattccacttgcttccagggaggcagctattgccaggatgccatctatgattgaacaacaagcaactgcagcggtggaagaatcatctgtcattatatttgttgttgatggtcaggtatgaaaataaaaaagtaaaatttgatacctttcagtaaaaggatggatcaatacctcttttcacgtgtgaggatgttttaacctgatttatttttccttgattcccagtgacttcttagtaattttttgccctgaaggaaacatattttttttctttctatttattgctagtactatattagttatctctgccattatgatttggaaagtgaataaatccactgtacaaaattggtgatactgaaatcattggcaggcaggtttaacagcagctgatgaggaaattgctgattggttacgtagacacttctctgacaagtctattatacttgctgttaacaagtgtgaatcgccccgtaaaggggcattgcaagcaatggagttttggtccttagggtgcggtgaactcttttccttttccttgaaattattttgttccaattttgattctctggtatgcaatagtatatatttggagtgtcataaaatggttataatagtggtgtgtatccttttatttgtgtaaccaggtttacaccatatcctatatctgctgtttctggaactggcacaggagagcttctagatcttgtttgttcaggcctgataaagctaaaggttttccattccttttgattaattgcatgtctcgatttttcgtgaagtgatatgtttttctccctgcctaatatttttaatttttaatcttttatgtgatgtcgtgtgagctgcaagttatttgacttcatattatgtattgatcattgttagaaagactcttaaaaagggtttcatccaagcttaatctttatctttatacactatgtatatgctacttttttatttatttatttctaattaaaaattagaaggaatatttggctattattattaattttattttataatttcttataattaaaggattcttgtttgttcctaggatcaagaagaatatgctgaagaagaagagtatattcctgcaattgcaattgttggccgaccaaatgttggtaaaagtagtattttaaatgctttggttggagaagacaggactatcgttagcccagtcagcggcaccactcgtgatgccatagatactgaatatacaggaccgaatggcgaggtttggtttcccttcagtttatccgactgctttctgcttgttttccttttagtttgtcactgttagatattagttatatattagctgtaaaagaattagatatttagtagatatttagtctcctaactttgtatataaatatgtaccattctatgaaatagacatataattcgaatcactatttt

SEQ ID NO: 162334 - DNA, 2227 bp, Cannabis sativa
  modified_base (1205)..(1218): a, c, t, g, unknown or other
gggggggggggtggttgtgccatcaggattggtggtgaggtcggagtaaggttatgcttctaaattggtttgagagaatagagtaaagagaaatgatataatatgaggtaggtttgaaattttccttaatgaaatacttgattttttttcttctttaaatggaaagactcaccaccttgcacacataataaatataattttaaaataaatgtcataaaatattacactttcataaatgtaattgagttgtggataaaatcctattagctagatttaattagtaccaatgatgatagtttacatctacaaaagggagagggagtactcctatactgtggctacatcatatggccagcccaatccaatctattcgtcattggaaaaaatattgaagcagtcaacataagaaagaaaaaaagaaaatagaggaagagagagagagagagagagaaagtaaattttgtgtaaagtgtgagaaatttaagggttataaatctgttctgaaacaaccaatgatggcaaaaccccaataataatggttctcttgccctagtaataatccttcatacacccccacacccacaccaccaccatcaccccctctcttaaatagcaaatttgctttttgcagcaaatttgactctcatcctttatgaaaattttgagaaataataaataaaaataaaaaataaaattgtatatagaatggggtttaatgatttaaaggtgttaggggttgtttgttttcataaatgtgttatggcagtggtcaaggagatttgcatggccacagattacaggcattcatgaacacccatcatcatgtacattgcctataattacaattatgcagaaccacccatgtaggtaatggcccttcatttactcaaagaaagtgatatatatatattttttacataaatattgttctatattaaaaatatttatatgattgcatcacccccatagaatttgatttgacagcgtttgatggaagacacgtgaaggtttaagattttcataatttttagaccccatttttcatcaatgggtaagtttgtgatataattggttgggggcattagtttacgtgacccacaggtaatgagttggggtgatttattttaaccagctcaacaccatgacctcatcaacatacacaaaagcttttaatactgccccattttattattattattattatnnnnnnnnnnnnnnttattattattatttattttttctaatgatttcacataataatatcaattgcctgcatggctaatgatggattttttttcaattattatggttattaagtgcttcgaaccctacacgtgagcttaggggtttgataatttctttttaactttagggtcgtaatttactatattttgaggggaccacaaggtgaaaagagtgtcctctgttctccatcccaaattgttttacacactgatatttggctttggcttagggtttcaaatcaattcaactttaaagtctctgtattgggtttctttttcttaaatgattgcatgaaaggttgacgtggaatggaaccttgtttaatgcaaatactgcgtggtcagatcaagggcttaaataaatctcttttaatgtttcctatttaaataagacaaatgtatacactcttaaatcttattataatgcatccaactatatgtaaatactaattctcttagtgtatactgcaatgattaagaaagtaaagtaccaataggatcttatactttaaaaagggtatataagctattattgagataataacaatttcaaaaccaaatttttttctaagtgtaatcaatcacagccaactcacttatttacttaaggcattatagatgaattgattctcagaacttaatgcggctaatggtcggttaaagcaggtgaatgagtggaccaaaacttggaaaaaaaagctcaatttctaaacacaatcatttcatctcaaagggaatgcatgctcatgttaagtttggcaattttcggctctagtattataactagggcggctatactttgagaaatgtttcactggaaagagtacaaaatcatcaatgccattctcatatctatatttaatatcactgttaacaacatggattgtttgtacactcttaacattacattggtaactaaccccatttgctagaaatcttagatagatgtatatgtattatctatcatacatacaaagacacag

SEQ ID NO: 162335 - DNA, 1210 bp, Cannabis sativa
gatattaatgaactctatagaagatttatatacaaatcctgtggaaaaagtgtttctaaatttataccgtccgctatttcatgtatgattacgagtcgaaccaaaacaaaatattttttcttggtaggtgtgatccattggatatagatccaaattttcaattttttggattccttaattctttttttacccttcccggtggtatcaagatgccactgtggcgaaatatcttatccatctctacaagaaactggatctcacttactagtttcataagttttttattttgatattttggtaaaacttatttattttttttaaaaaaaattaaatctaatccaattgtaattagatatttaattttttgtaattgaattggactgatttagtataagtagattggtttcaatattgcctacctttaatgtaattgttatatttcaagataaatttttaacaaagagtatcttttaaggacacaatttgagagttaaaaattcaatttaggaggagaaaatacaaattgttctacttttcactatacttttattgtatatttgcattctaacaacatgtaattaaaaaataattagctcttttaaaaataatcgttattttttcaacaattctttccttgaagctcaccatagtcactcaccttcaatgacatggcaaggtatattatgggggtgtgatttgctaacagccggtcttcgttggaaaattggagagggtcgaacagttcgcattggttaagatctgtgggttcctaggcactcttccttcctccctttatgctacacaggtccagaatatggtgtggtagcaaatctaatcacagatgagcgctaatgggatatctctctgctacaacaatacttttctcctttggatgttgaaaattttttgtcactgccactaagtttttttcctactgctgatacactcatatggcaccaaactaacacgggtttttattcagtcaaaacaggatactatgtggcagaatcaatggagcatataaacgatacatcatcttcaacctcacaagaattatggtggaaatttttctgggctttacagctgccacaaaaggtgaaaatttttgcttggaaattgttccatgatgcctttcctgtagctacagctctgttcaggcaaaaagttattactgttggaagttattttactaggaacttagatctactca

SEQ ID NO: 162336 - DNA, 1319 bp, Cannabis sativa
  modified_base (1137)..(1141): a, c, t, g, unknown or other
tataagaaattgaaaaaaaaaatgttaattaatgtatttcatttacagattcattttgggagatctcatcttggagaaccgtggtaagaattgtgttgaattctatccttccttaattttcattgagatctagaactagggaaagaaaaagataattccctaaatatttagtgatcatttgatgattaatttttttctttttttttttaaagcaaaacctcttcacattttgttgctgatgatctttaattaattaacacagtattttttttttcttattgattacccaaaatgaactgatagtaccctaattaatgatcatgatttgtcaatctcattccatcattatgtatatatttattaccttacatgtggtatagttgtactcaattttgttaatatcatactgctagttctactacccaactcgaagaaccatccttgttcctatgttgagatgtgaggtaggttgagacatgtatcaagctagctagtttaataacagagaaaatgtataattaatttatcttctagtcagtcttaagtagaagactcattagtatatattgaatgagtagatagctagtgtagatattgaagttattgagtacaaatgttgagtatttggagaagatcatcacctttagtaactcccataaaggagctttggcattgtgaaagctgtagctaattaaggtcacttcatctgcattaccattaaatgtaatattcaatctttcaagtttctggaacaatatttcaacatatttcaaataaacacaatcagaaaatcttcttatcaagattgaaagccatcggataaatcagtatagtgtagttggaaaaacattattggtgaataagttatagaactcttttctaaagtcatcaaaatctatccggtaataacttggtaccatggcatgcaaaccattaatggaatgttaactttgtaatgtaaagattagaaccactgcatctgctatcaactctccctaattacatatttgatcttccattaatatatatatttatattcccgataatcatgacaacaatatgaaaagggtaaattggcataagtgtccaaagttttaagtttgtaagggcataaacctaatgtttatttttagcggnnnnngtactcaatgtttgtaaaactgtaaattttctctaatttcgtccgtacaaaccctgttattttcttaaacaggcgatgttgtttatgatctgtcacatacaaaccaaactcacacgtgcaactaggagttagttggagttagttggttgttcggtttttgacagttaattctgttaac

SEQ ID NO: 162337 - DNA, 3442 bp, Cannabis sativa
ctctctctctctctctagttctcatccatatgccactatctctagtgtgttgtgtgtgttgtattcttccctatctcaatcataatatctcatgagtttagtacacactgtgataattaaattatattcatccaaattgaatttaatagcccactctattcctgagtgttgagactggcttgaaagaccctgtgtgaactcttcaacaagttcttctagattggatgttcgattgtgtaatatgaaaagatagtgaggaaatcatgataggaaacaagaggtaaaaatatctaaactaatagttaggtttgcattatgtataattgtggtgagatacagggtttatggttcatatgtgattcaacaatttttttaatcaaagttttttttttattttattatcttccgctgcgaccctaatatgaaccctaaaaccaacaacccttttgtatatccttttaatgctttatccttaccttggagctttcctccctgataaggctctagacttggttgagtctttaggttgttggtagggtcattgtcatttaaagttacttcaaggtaagaaatagggagaacttcgttttccctcaattggagagagatagtaagggtgtgctttagtgaggctctaatctttctaggcagagacgattcatgcacaggaataggtgaggtcttcccaaggtcattttttgccccgagtctatgagcatactttccaagtatgttggtactcttgtattcgaattcgtgaagtgttctcccttagatgttttgaaagcacgtatctcaagaattgagacacacattccaagaaacaatcatgtatcaaagatttaagctctacaatgtaaggagaataaggaccaatcatgatggcgcgcagatcccaacgtgaacatatgagttgtgtccctccgttgatcgttattcgatccaatggtttagaaacaacttctcttttctataaatacctccataaaaactctttatttaattcacacacttatcttgtgggaagaaacacaaacattctcttttagactttgcataaagagttcgcagatttaagctcaattcttgttgagggcaccacttttgtaggtactaattttttcttaatcctttgcttttctcaataagcacagttagaaaaacattttgttctcacaatgtgttcgcgtgtttgcatggggttgcttaggcatgtgtcattttgcatggcattttttacttcataagtcctctttccatgtttcccctttacaaattgtcccctcaaggtggtgattaattacatgccatccctttaggctcataatttttgagaagtgaataggatagaagtaaatagtgtattgggcaacttttagctcactcatagatgtggttgtgaatctttcttgacttttcatttgcctcttggggtgtaggcctccgaaatttcttatgtcccctatggttagtggcacaattcctgaaggagtgattccaattgaacttttgtcattcgacttggaggatcaagtggaagatccttttgttgtatatcataggtagagggaagcacttattgctcacttagagcaattatgtgtgttgagggaacaactaaagcgtacacaagctagaatactctcccttgagtcatatggtccctgcctccatcgatgtcttaatgcaattagaacatcttcgatcctcacactagattcttaaagtgatgttggaggctttagaaaagtctattcctcctacaccattcactcctctagcgtctcctccttctctctagagttctctagtaagagaacatcaggcttagatgttgggtttccctcgtttctccacctgttaactagagactttcatagacttttctctgggcccacctttttccctgagcaacatgctggagttctcagtcttgccattcctggtttatctcgcaagagtcttgcacataaaatgaaaaatttaaaatgttgtgctcgtcctaacccttgggttagttatatccagatatgtcttcaaggactaagaggagaccacctacacttccagtggtggatcctgacattgcattacctcaggacaagattggtagcacgttgtctcttaggcatcttaaggagctaataaatgtatcctaaatatctgggccgactagggttatacctgcgcaaactgattagcgggcttttcttcctagtgatgtaacatttacctttagtgagcatgttctaaaaggggatatttcatgggttttcttaattattttggtatagctccattctagcttcatcccaacaactgttcaactctcgcttgtttctagatggcgcttagaggcacagctaagctagacctaacacctgaggaggttcattatgtctatcaccttttgcccaaaaacaattagtggggaactttctttctctagaaggcttcctctatgatgcttatggttcacagatccgtgtccaatgtgggcagctagggaagtaatttcttttttatttctagttcagatgacgtcgaacaacatctctttgtgattccatgtaaggttttactatatctttctctcctctccattttttttaatgtcgatgcatttgttcttctattctttatttctagaggttagggatgtacccaccttatcggtagatgacattactttagggttgtagaaacttttcgatctttagttaaataagcatctttgttactattttctcacacctgccaatttgaagaagcacagtcttatcccttagaatagcacattcactgcccatcatttaaataaaattccttccccgagcaaggtggatgacaaatcttcgactgttgactcccccaggaagaactcgggtttggatgctagcgtgacttcaatcgtggtcccttcttacaaggtggtgaagaataagagggcatgatgtccatctaacatgcgactaatccccatgacagacatcctttctgaggatggtggcgctaatcttccctaacacgagcaagtttaaggtcttcttcttgctcgttcatacactagattacacctgaaaaaaaatttagcacactaaaatgggattagaacctcaaaccagaaaataaattgcaaaatagttgataatacacaatttttagtttcaatccccggcaacgatgccaaaaacttgttgtgaaaattatgtacgcaagtatacgcagtcaaacaagtaataaaatgataagtaagatcgtctccacaggaattgcaaacaaagtttgatgtaaaaccaactaatcacaacttaaagtaagaggaaataacatgaaaatgattgagcgataattcaaaattaaaatgacagtaattaaacttgctaaaattaatgctactgttgctagaaaattgcttgaaaaaaaaatataatatggtaaa

SEQ ID NO: 162338 - DNA, 2902 bp, Cannabis sativa
agcgagtttttgtatacatatatacgcacaaaacaagactatatgtagtaactaataacactactacataacattggattaaaaatttaaaaaataaataaactaagaggttttgtattgtcaattcactacaagggtgtatgttcaataaaagttgaacatggtagagccttggttttattggttggcaactatttataacccatgtgttatatatgtgtgtttggacttagtgggcctgatcagaagttaatagtaattagatgggtcaattgagtcattgggctatgtgcagatgataagtagagaggcccattagtagtactgaattaaccgacaactgaagacacacaatatgggatgttaatgcccaattggtgtgtgacttgtgtgtatgtctttaagagatctcaattgacagctagttttatgttatatttggctatagcttaactgctgtagaccaggtcaggtcaggtgagctaacattaacaaacactaggaaaagaaaatccctcatatgcatatttctatttttcattggaagaaatatgtaggattacatttacatggtgtgttgtggacatgtacgattcatttttaatgggccctgtccaactaagaactgggcccagtttgttttaagtgatgagagcattttgtttgttgccaattcatggtcatctctctcagctgtctcaggtggcaaatatgctcgtctgaatctttgtcaatcacatttttcattacctgttttgagtaacaaattatgatcatgtgttaactaacatatcatattaatgcatttcttttgtgatatatatgatcatgtgttaattaacatatcatattaatgcatttgttttgtgataaatatgatcatgtgttttcagtaacaaattatgatcttgtgttaattaaaatatcatattaaagcatttgttttgtgataattatgatcatctgttttgagtaacaaatatgatcatgtgttaattaacatatcatattaatgcatttgtttttgataaatatgatcatgatatgatcatgtgttaattaacatatcatattaatgcatttgttttgtgataattatgatcatgtgttttgagtaacaaatatgatcatgtgttaattaacatatcatattaatgcatttgttttttgataaatatgatcatgatatgatcatgtgttaattaacatatcatattaatgcatttgttttgtgataactattgtagtacttgtattattaattaactaattgtttggtttacattttctagcattatggtccccacgtttttctcttatgtgttgcttaatttctttttttaatcggtaatcaaacatgactgagttatatattaggagtactgcgtactagtttgaagattattgatgaggtttttgtctggttaaatgtgatgctctaaccttatcatctcaacttttctaattaaatcatttctctacttcttaattagttgtcaatacaattgccttataatcatgttctaagccagcttataataattagtacataaattaaaaccataattttttcataatatacatctaacttgaaagactctgttcgtagtattaaacaatgataaagtttaagactatatacatttaccgacagtttggtgccatttttatgtttgttttctatttttgctactacgtaccaaattaaacaccaaccttttagtcttctaaattctataaacaattatgacatttaagcttaaagtccttgtattaggagagtcaaaaagagataaacccagatcaaactacccgacacagttgaaaatttgtttttaaaaaaaataaataaattcttttccaaagcaagaatctgattttatgatcaaagtgctcagtgtggtcagtgttctttgaatttttttgagttgatgatttcggtgccaacacgtttcaaaccaaacatgaaattgtgtcaggagtcataatgggcttagaggcccaaattcaaattgttagacaaatactagtctttctataaaattcgtcaacattacgaggtactttacaaataaatattttatataattaattaagaagtaaactattttgctttgtaaatttgattaaatgaggaacagaggaaggcctagatcaaggctagttactcagtagacacccttttaggttgcttcttcataatttggtttaactaagaagtggagaagagttactaaaatactaattaattaatgtatgagtagttagtaaccaattttgtactcatagaatttccaatgattttgaaaagtgactgaaaatcagtttctaaacaatgattttgaagagcaaggtattatttttgtttaatttaatttaagataataatttattttaaagaaaaactacataaagttatacaatctttttttttttaaaaaaaatccttttatattattttttttataaaatcataccaaacatagtatttatctaaataccaaaaccttatcatgaagttaaccttttatattaattgtaagaatatagttatattttaaaaacttatcttctcctcctttttctttttttttcatcaaataaaaataattttttttctgtattacttggatcttaaactttagtaggagggacgatggtgctctactagggtttaggtgatttctcagccaaggtgggacgtggaaaataaaataggaaaataaaatagaatacataggaattgagaaaaaataaaatcatattagaaccataaaataatgttaaacaatttccatctagactctaattaaatgtttagctactcatgttcattgtagcaaatttacacatattaatttaagaaaagagaagagaatagagaagaaaaaaatgctgaaaa

SEQ ID NO: 162339 - DNA, 1780 bp, Cannabis sativa
atatgcatgtgaagtgaagttagattttcttatattaaatataagtagtgataaagtgatattttacatattttttaatatatttttttacaatttttaggatgctttaagttttcactaaataaaaggggttatattactttttactaatttagtaaaaaatctcgaatgatttaaaaatacttaaggtgttacaaaatctttaaatattttttttttattttactttgaaatacatttgtaatcttctgggtatatatatataaaaaagtttaagaataatgaggtgatatctcacattttttcaatgcatttcttacaattttattttttaaaaaaatatgaaataattaacatcttatatttattttaggattctataaaaaaaaaaaaaaaaaggacatttaattagaataaaacttagatttcgcggtcattataaaagaggttcataggaatagacgtgagagcaagtcgccaaaattggttataggcaaacgcccaatcgaccacattatgagtcataaagttataatttctagcagtaataaaataaacaaccaataaaggaagagacgactctttcacaaaataaggaatagttctactttagaattcctttcaaccaagataaacttgtggtcgtagtccttcgccgcttcaagagccaaacaaacagcgacagcttcaccatgaagagcatcagaaaagtccagtttcaccgaatgaacccaaatcaccttgctctaggggcctctaccaacaactgcaatgcacatgtgctccccaccaactctaacatcacaatttaacttgatccattgagggggaggacaccaaatagcggggtaggggatcggggatggggaggggataagggaatctttataatctgcgtaagagtgagaaacatagttaatacactgattcacattatttattctattattatgaaccttgtcattccgcaccctccaaaccatatcgataataatagacgcataaaggaagacctcgtcttcattctctttaagtgaacttagatttacttacaaaaatatattatgtacaacaataaaatataaataaatatagaatatattcataatgtaaatgtagttaaattatagaataggtagtcaagttttatataaattgataataatatttaataataattaaaaaaaataataaaaattaaaataatgaataatagaaataaaaagattattcaattattaaaaaataattttgaaattataaaagagatcctaatttatatgttactaattaaaaatattaataactacatatagatatgaaattctcactttaaaaatatttaaaaaattaaaataattataaattaaattttttctttcaattaatataataaccatgtgaaaggcccttttgttaccttgttacctagttattattataatgaaaactttcaacatgtgtagtaatgaatattgataaaatcccaaaagcacaacatgatattgattaggactcacatattatttttaacatatatatgaaaattctactaaaaaacaaacggttttgacaattataactaatttctttaatatatatatataattatgtatgaggatataatagtggaaatttgatattatatgcttaaaattaatttatctattaaaaatatgttagcatattttgcatcatgtaaaatatactcacactatttttctcatccaattttacccttaaacaaataaaaactaaataaaaaccaaacatctctctc

SEQ ID NO: 162340 - DNA, 761 bp, Cannabis sativa
taaaagtgttatggatcataaactataatctaatttacaagcacaaacacacccgaaaaaagaagagcactataatttccaatgaattcatatacagaacggtagtgaccaatagcatgacagaacaagaaaagaaaaaatttccagtcccaaaagaacttaaacatgaaaaagaaaattaacccacatagggaaatagtgcagtggttgaatgaacagcctttgaaaattggacaaagcaaaaagaaaaaatccagtccaactcagtaactactaaccgagcttgagagagagaggggtccaacttacaagttttgaagaagagagaaagagagtgggagagggtgggacatggggcatgggaagaagagaagtaaaatgtgaaccacaaacagttcctgtggccccggagaggccaacgctcaccggacaagactggaatttattatgggaaggggtattttggtcattctatatatcagtccgatgagtcctacaatacaaaaattggtgacgtttagaatggatggatggatggtcctactgcaccggtactcttttttttttggtaaaggacaaaaatcccaatccactctggataaatcactcaaccatcttcatcttcatgtttggggattaagaaattaactattattaaattttttacactttaccttttaaattacatgtttataatattcataaaataattcaaaaataataaaaattacattaaaaaataattcaaacatcatcaaaat

SEQ ID NO: 162341 - DNA, 1240 bp, Cannabis sativa
aaaaaaaaaaaaaaaagaatagttatcagggaccacacagttcgaaggtcttcggcttcatcgtttgtcgacctcgattatgctactagtagtaagtaataatctaatcttaatttagccttacttaatttatgagaaccaaataataaataatcaaaaattaacaaaaacataccaaaatctataaaatcaattatagaaatgtatgatgttctaattttacattaaaaaacctttggagctttattttattgtcccgatgatgggggaatatgaaatggtacgatacaaattaggaccattacttagttagtaactaatttttttttattatttttaatttggccctttattaaattaaaaattattcttatagtgtccacatattaaaattataacaattatacttttaaaatataaattttattttaaaataaactatataaatttatttgatttatatgatgacaaacacaaatttaaatgtaaaccttaaataaataaattcttaacaattaattctcaccagtaatgggtattctccatataggttgcaaatgtgcaaaaatatttatattttcctacatgaatcttacttaataaggaaacctataaagctaggctaatgctctattgttgaggttcggacatttgaacaaatagttgtctaactattttaactgactacaagtgaataataacagttcaaccaagctgttatgatattactcgaagcctatataactgactctttagttagaagagaagttttgagaaagaaattaagaaccaaaatcagtctaagaattgttccatttcatcaaagaatcaataaagattcaaagccttagacttccttctgccgttgtctaaacccaagtttacttataacttgtggtagaacgtatgttaaatttgttaattttgattcttgttcataaatttttgtttagttttgtgttcttgttgctggttggttcttgtttgatattttcaggcatcaacaactacaattggctatttttatcggtcaaagggatggtcaactcttgcaactgtgggaatagaaaggcagaagttctttcctgtgggtttgccactgaagcataggaaccgactaaaatacttagggaaatttgattttctatacttacatatacttaatattttatccctaaactaacacatatcaccattgaaaatatatgaccactttatctaaaacccaaaaatacccctc

SEQ ID NO: 162342 - DNA, 2700 bp, Cannabis sativa
  modified_base (2648)..(2665): a, c, t, g, unknown or other
tttttttgaaaccgggatgcctttattcacattcagtactatgaaatgaatggttacatttcattgggactcattgaattacgagattcagtcccactactcgacaaacccatctccttaccaactcatgtgacgcagctacatgcctatatcttcaggattttaccatatcacaataattgggcaaaaccataatattatattttaaggtccctcacattccaactcatgtggaccattattattattattattataataaatatttctattttaaaaaaatatatttttctctgtcctcagctttttttttttttagctttatccttcacttacttcgttcaaagccaaaaacgtcatatgtatacgatcctcttaggactgtacggcaaaccggccaatactagacccttccggtgaccccagtaaaccaaaaaaaggagacaacttttttggttccaatactcgacatgggaaggacaccctgctgcaacgtccaaggtttgaagaaaggcgcgtggaccaccgaagaggaccagaaactctctgcttatattacccaacacggcgagggaggctggcgatccttgcctgagaaagctggtcggcgtttttattttggggttctaattctgacagtgtggttaataaaatgtgtgtgttaaaatgaactcattttaggaaatgggtattctggtttcaggtctttcgaggtgtggaaagagctgcagattgagatggactaattatctgaggcctggtattaagaggggagagttcactaatgaggaagaagagattattatgagacttcatgctgttttaggcaacaagtgagtgtttgatttttattttcttgatgtgagttggacttttactcacaatgttgcatatttttcattcgttttccctaactgttctacccatttcatagacttcattttcctcatttttgttcctacctttctgggcatactttatatataaatatcattttttttcttttgctgtttcatttagcatattatttatttaattgatctcactttctccagttaccgactttatttatttattcttttttttttgttcttcttttacttaactaatttccgagtaattgtagatggtcagccatagcgaaacagttaccaatgcgaacagacaacgaaatcaagaaccattggaatacgagactgaagagaatcgtagctgaaaagggcaaggataatttaatcactagagccgatattgaaaatcttgtagctaaaaatggtattggtaacaatgctgaaacagagaaaagtcctatgaagaatctcaacgtcgttgagtctaaagggtcaacttttaagctacttaatgatgttgcttctaagctcaaagcatctggttccattgtctcattaattaaccaacaagttgtgaagtgtaactccacagaggccaactctgtctcaagtcctactaacactactacaaccactagcaccaccgccaatactccagctaatttactcaacagggtcgccacaactctcaactcaccaaaatcaaattctcttggtgccattaaagcaatcttttccagaacattagaaggcagtacagttagtggtagtagtgacaacagtttctctgaggttggtatggggattgaagatactagtgatgagagaagtagtcctgaatctgaaaatgcagttcatgtttcaattccgttctcctcctcaaccaggttactcaacaaaatggcttctaaatttgctctaatgaatcatgttcaggcagtggttggtggcagcacccatatgtctaagcctccggttttggaaccaaatcatctggatgattggagccaagaaatctcccatttgggtggaatttccggtacttgtaaagacgaaactagtaaccaatttgacatggtcttcgaacctgatcatcaagatcatgaatttttgttggaagtaggttgtgaggatcggaaagacaaaggcaaagtttgtaatgaggatagtgagttgattagaaatctgtcaagggagactgattctaatgaacaagttttggtattcactagtaatagtagctcttcatatgaaggttctagtcatatcgaagtggtagtaagtgacttggaggctgcagataattgggaggactgtgttaactttgatgaattctttgatgctgcaactcttgagtaatttctagagtttctagtttcctgagaatttttcttttcttattttctttttctaaccttacgtctgtatattatatcaaatataataatccaatatgtatgagacacgaatcatacttctttgaatgaagatcgcgtataacagttcctgtcccatatgatatcttttctaatgaaatgctaaaagtgtggtgggtaggcattttttagtccatatttataaaatttaactcaaatagtagtacacaaactacaatttactctaaatttaccacattaaaactttatcaaatttgacacaaaaatatatagtataaatcaaattttactctacaataaatatcacttttattttatacttttatcactaattaatatatttaataactttttcagttttatttatatataatatatttagggtgactattcaatggtnnnnnnnnnnnnnnnnnnatatggttacatttttctttaacctgtaatagcag

SEQ ID NO: 162343 - DNA, 3893 bp, Cannabis sativa
  modified_base (3653)..(3659): a, c, t, g, unknown or other
aaaaaaaaaaaaaaaaacttcataccaacagagaatgacttgatagtgtagttttaagtttgacccttcttttacaattttactctgattaattttatttggtcttcgataaatttgaactgtacgtaagaaaatattcttattaccaaagattttcatttttcaccaaaattaatgtgcatgaaaaacaaatcaatacaatacaataatataactctaaaagagtatacattctaatccatattatagttttgcagcaaagcaaagaccagaattggcagtataaaactaacagcacagaaaattaagaacaaaatctatgaaacaaatttattcaaataccaaggaaacccttaagtgagtcatcatcaaggaaggattttgcgtcttcgtcttggggtttctcgccttacgtacattttctccatttcgtttagaggtcgactggaaccatcggctatgctaacaaacttccacccgccaccacctccacgcttaccacgtgaccccattttctccactgtgaaattccagccatttgaaggacgacgacggctgtacttgtgtcggaagacctcacctgccatctgtgtgtgtacaaatgcagcaatcacatcaaacaaagaagcataaagaaatgctgtgctggaattggctgtgccattcatcattttttgaaaaccgaatgcagctagaaattaaaaatacccaactcgaaattgttcatgtttgtgctctcttcagaaaatggagttcaaaagaaaaatgaatcattactgtaatgatatgtttaaatttgacatttacttaatttgtcaaggaacggtcaggaagaacttactttctttttgttgaagttcattttctggacgaattcttcataaagcatctcatcttctttttgtgagatctcataatggacttcatctaaatctctggtagtaccatcccaaccttctggcataactttaaagtctggtttgtatggaagtgacgccacatgaaattcccgatcatgtgagatgaagaatctgcaatattaagaaacagaaaaaatgtcagtacagtgtgaagaaaaatagtttgtgcacccaaagcctatggggttttcaagtcccttataagtatctcgatagaaatttcgatagcctcctgatcctgaaatactacagggttatgtaggaacctttgtgcattggagataaagtttacatacaatcaccagtaagccaacagggatttaaattataatttaagagctagaaagacgaaaaccctgctctttgaaacaaatatttgcttgggtagggtcagtactacctttaagacattccacgaggagcacagtgcatgtatctctattaactaacaggatagtatctatgtcaaaagaatactaaactcgaaaaccaaaagtgaagagcacgtaacagcttataacatgttttaatgtgatgaagatgatcgtaaccaactcaagacattaaaataaacctaaatttcagataaattataagcgaaggaagtaaggataagcaagattttaaaaaactaatattaactaaacatttcaatagttaaaaaaggctttctcaatctaaatactaactcaagaatcgagagtacaaaaccagataaaagtagttgcaacaaatagatttacataatcaatgatgaaataagaacatcaataatatcatcagttctacaataaaaaaaaaaaagacagataatgacaccactttgatattaaaaacaacagaaaatgatttatgtatataaataaaaaaaagagtgcaaaactcagttataattcccaaagatcaaatgtattggtagagaatctttgtttattactttatcttatgtatacatgcagacaaaccaaaccatcaaaattcttataattagctgcatgtaacaaaagatataattctcatgaaactttatcatgtattcaaccaatattttgaccagttataagattattatgaaaaagggagtaaacatgcattgctaataaagattctctaccaatacagttcagcaataagataaagtaataaacaaagatcaaatgttccttactcggggaaggcatcaagcaagagctcaacagaatcatccaaaggacgaccaagcttcttttcctcctcctcttcaagctccttgagccaaagaatggcatgaactctctgcctcataatcctataatcctttgccagtttctccactgtgtaaacttccggattttccttgtgcagtttatacatctcagccttctcggagtccttgagataagatcctctagcaccaggttcacgaacttgcttcaataagacagtcgtctcctgcatcctattaccccatccatccaaaactgccctacttctcttgttctctgctttccattcttctaagctatcatcaactttctgaatctcagtaatcactgtagagtgagacttatcactaccactagaacgatgacctgcaacctccccatcgaaatgatccttggtaattccagtagaccaagaagacactgaatcccaacccaaatcccctgatgtggtggaatcaccaaatgttccagctacagcctttccccattcacctccgctatcattttcaccatcaccgccccgagatgttgatgaaaagacacgagaggtcgcatatttattataaacttcactaccattcctcgactgatttacagcaccattttgaatcacatctttagttttctcattcaaaactctcaatgtggaagtgtttgcattaagtgaaatagaggacagacgggttataacacgctgcagattctgcattgctatagtatttcactcctagaattgactctgccactcaagaaattccgaaaaaaatcctgaaaatcataaacaaccctcatcaacatccaccagacaatctaaggtattaagctaaaccaacaaatatgaacatataagctgcaaacgaacacgcccaaatgcataacgagagccaaatgggtaattttccaaactaacaacctgaaaatgttaaattagcaaaagaactacattgagtttacactgtgattatggtgaaatagtgtatatttatgatcacaaaacgaccataatagtctttttaaggtcgcatagtgtaatttttggtagcttaaatttaatgactatttttacaaaaacactcaaaagggaaatgaacttcactatctaagattccaacccaaaatctctgatgggaaaagagtaaaattcatttgcacaatttcttagaaaaacaaataacatataatagaaatataattttattctcctccatttttccaaaaaccaatcttggttatttataatcaacaaataacactcttcaacatcaactcaaaaacacctacaattagttagataattcttcttcgcttttaagctccattgtcaataatcggatttaggaactaaaactaaaactaaagccaaggatatcaaaataaaaaattaagccaaaaaaagaagagaaaataatacattacatacataaatagggcgaagatatgaaagagataatggcggcggacctggagacggccgatggtggcagcagagaaagcttggaagagcgattgagagagagagagagagagnnnnnnngagagagagagagagagaaaggtaatagagttattttcacgtcgaaaggcgttggctggaagcggagccacggtgggtgtgcgtgcgccagagttagggtttgttgggctttggttgggcttgggctataagagtttcaagatggattagagatgggctttttttataaagatggattagagatgggaaatttacatggtatattaacttttgctatttttttataaaaatact

SEQ ID NO: 162344 - DNA, 2556 bp, Cannabis sativa
ggaggagtggctaccggagctggtggtggctggttgttgggtggtggagcagcgactggagttggtggtggctgagtattggtcggcggcgcggctgagggagttgtgggtgttggtggagcttgagccgcgggtgtagccgaaggagaacttgcaggagattgagccgagactgaagccacaatggctaaaagaaagccgattaagatgacatttttacgatccatgatgatgatgagattaatgtgcgcactctcttgcttaaagtgcgcactgagaaatagcttagagagatatgaggagagaagaagagtgagtgtggaggaaacagagaggaatgggacagattaaataggccaacttaataatgaaaatatgctaacgtggtatggtcttggcctttctcattattcattcattaattaattaatttaaaatgaagataaataattaattttttttaactgacttttccgtaataaaaaaataaaaaacagattagtaaagtttaatttttggatttgagttaaaatatgaatttaattaatgagatgtagaataaaggtatggttttgttactttagtctacatctaaataaacttataaactcaatcaccgacacaatacacttaaggttaagtaatacatatcaatcatattaaatatatggtaaagcctcttattattgatttatgatatataacttaattctcaagtgaataaaataaaagttgttagatcgagctgtatgtggaaaacattgtacgttttcaagtatcacatataagtaaccacgtacagtaaaatagtataaacagaagatttatttgaaaagggaatatagttttctttttttcctttcaaatgattagaattggttaggatgatcgaagtaagattatgatgagtggggtccgtaggccataagtggctagctggttttacatatggtatggtggatggaggctcatatgagttgtgatttgtaagctaagtttagtgaagagaagagatgaaataataagttgatttcggttggtatgttgtgtggaccctaactacatagggcctacgtgtcacgccctgataattgccttaacgaaaaatcttccccctctttctctctctctctcacctattttatatttttaacttaattaaaggccttcgaaatccactctataatcttgtgtgctgtaaaatcaagaatccaccactaaattatatgcaattctcgttagttttttctcaaaaaatatatatagagaaatgcttaagcaccatttaggtctaaattccttctactatttcaattaagtattaaatagaaattataactaaccaatcgtaatacaacatgtttaaaaatattaagtattaatgttactcaataaaaatcatacagagaagcaaaagtgcttaacgattgtaaagttacggtgggacataacaataatatgaaccaaatttccactatgagcctcacacactatctcccacaaactccttctactagcccccctcgacccaagggagcgacctaccattgaggaccaaaggtgtgcctccaattgcctccaacatcgacgaagggctagagacacacccgcaaaacatcatcaagtactcccaattcatgttagaggcgtttccacctacaagtttcaaaccacctatactcgaagttgtattcctctccaaaaaaggcaagatctcgcctctaggccgacaactgctttagccgagaaagataataaaatgaagagaaaaaaagttttgaaataatggttagaaatacaaaaagagttgcaactccgataagctagatgatcatgatcatttcattgttaattaatttcttataaaataatgtgaatcatcactctaattgtttaattttgtatttacactttattggattacattttcttcgtaaattaaatataaaaatattaaatcatatataaataagagcataaattattttactcattaacaattatatttgagatgaaatttaaaaaaaataaacattttaaaagaatattagataatactatcttacatggattaaataaaaatgttgaactacatataaaatatgaactactctgcttattagtaattggtaatttttttttgtttttgttatccattcaatgttagtatattgacaacaataccattataatgagatgattttaaattatgaaaactcgttgtgaaggaatttttctttagctgagtaatattattggtagagtatacaacattatacatcttatcttatactttgtaattgtggagtagattttttacatttgttttcttatctttttcacttaagtaggtatttcgacaaaataaacaagctcttttttttaaattaaactcttattaacaataattagagtttaatacatcaataaaaaaagatagaaaactatcaaaccaagctcgttcacaatccaccctaagtgcatgcacgactaattcatgaacgaagacatgaactagggatgcctcaggaaaactggatagtaaactagcaaaaa

SEQ ID NO: 162345 - DNA, 4268 bp, Cannabis sativa
ttttttttttttttttttcctatccaaggtgtttgcctaataaataaacatttatacatatttcttttccaaatgtagggcaaagctcgtcgattctgcacttgcgaccggaaagatttatgaaggagatggttttaagtatataaaggaatcttttgaaactaacacattgcatctcattgggttattgagtgatggtggagttcattccagacttgatcaagtgcaggtaggttttttcaaatggggacaaggccaagcttttctattttatcatggatttccttttaatagttaaattattgtctcctctcttctcttccattaactcttactctttctttttcttgcagttgcttcttaaaggagctagtgagaatggcgcaaaaagaattcgcctccacatacttactgatggtcgtgatgtcttggatggttcaagtgtgggatttgtggaaactattgaaaacgaccttgcaaaactacgtgaaaatggtgttgatgcacagattgcatctggtggtggtcgtatgtatgtcacaatggatcgatacgaggtatgatctatatatgtttacgtctgtctaattgcagtagtcagtactatgatcgtctttgttttgttactttgctatatattattcacggcttctgttttcatacatgatataaatctgtgttaaattgtataaggtgaatagtaaacataatatgatgtgtgtgtcttattctgcacttctctttccgtcatgtaaaattgcatagcactgctcagttttgttggtggaataatagtttatttgtttcataaattcaataattattgtttccaactttccattgaaatgtctacatgggtttttctagactaaacatgggaagggagttgacggcccttacggcatcaattttataagaatagttagaatgtgacattgtgccagtatttgaatttctttccaacaaagtatcttatgaaattcatatcattaagttaatatatacatggtcattcaatatttgtttagtaattaagtatatgctttccatgatcaatgcttgtcaataaatttgtagttttactctaaataccatgattgttgactgtatatttctctttattaatactaatcaacaaagtttttgctgatttgtcccttctctctgttaagctgcttgtatttgagccatggtattatacccattgttgtctagtctagtatgtatagtatgcatctggatcagttaattactgagctcattcagcgtggaaaactatctccatctaaacgggatggggatcatcatcatgtattttcttcttaaggacataaaaatgtcaatgttataagtactttcctgtttgaaagaatcgtaccttttgtagtcaaactccttattgatcaattgtttccactgacactaattttaatgaagttatttaccgtactcgtggtgatcaattatttgcagaatgattgggaagttgtgaagagagggtgggatgcccaagttcttggtgaagctccttacaaattcacaaatgctcttgaagctgtcaagaagttgagacaggagcccaacaccagtgaccagtacctgcccccttttgttattgttgatgcgagtggaaagcctgtaggtccaatagtggatggtgatgctgttgttactttcaacttccgagctgatcggatggttatgatcgcaaaggcacttgaatatgaagattttgacaaatttgatcgagttagagttcctaaaattcgttacgctggtatgcttcagtatgatggtgagctgcagcttccaagtcattaccttgtctctcctcctgaaatagacagaacatctggtgaatacctaacacacaatggtgttcgcacttttgcctgcaggttagcccatgtcatttaaatggtgtttattcacatatgttattttaaatttaattatttttacttcacatgccgcaggcatatttcactgtggttagatgactacttttagcctttcattcctaaagtatttttcaattatatttgataataaagggaaaacttccattatatcgtgatgtttttttttttgttagaaaatcaaatgcattctaatgcaggataactctatgtatctatgtccttgcttttacaatttcttaagttttttacaatgtttctcgtataatcttaccatggtgatgtgtctttttttgagtgtttaccaaccaaacatgggctagagttccaaatttgtttgtccttctgagccattctttctggactttttgtattgcttacctattttcttccatttttcccctgaacagtgagactgttaaattcgggcatgtcactttcttttggaatggaaaccgctcggggtattttaaccctgagatggaagaatatgttgaaatcccaagtgatagcggaatcacatttaatgtcaaaccattaatgaaggccgtagaaattgctgagaaggcaagggatgccatacttagccggaaattccaacaggtattctgtatgttgcaccttactcataacaaataatcttcagattgtacaattgtttattcagtaccttttttctcatgattcatcaggttcgtgtcaacttgccaaatggtgacatggtgggacatactggtgatattgaggctactgtggtggcttgcaaggctgctgatgaggctgttaaggtacattaactgcgagcctttactatttaaatatgttaaaaaagaattgtattgacaatttgattcgattgaaggctattctaaagatatataatctacatatttactgtaatttataaaatgtgacacacgtgattgcagattatcctcgatgcaatagagcaagttggtggaatttatgtcgtcactgcagatcacggaaatgctgaagacatggtgaagagaaataagtctgggaaacctcaacttgacaagaatggcaaaatccaaattcttacttctcacactcttgagcctgtaagttctataaattctttctgaagtttacaaaaagtaatttgtttttcattggcatatgaaaaatatatgtccacataaataattttgatgctgagtcatattatggtggaattgtcaaatcttttatcaagtaactccacccattgatttaatgaattgcaataattttgaaacttgttggattttttatatagtgaatgttaaaatagttgccgaagattataatgattatataaattcttttttcaggttccaattgcaattggaggtcccggactagcgccaggtgttaggttctgcaatgatgttcctagcggtgggctagccaatgttgctgcaaccgtcatgaatttgcatggatttgaggcacctagtgactatgagccaactttaattgaggtggttgataactaaaggctgcaaagaaagaacaagaatgactcgaggttttaataataattcgtctaaattttgactcaatttaaagccatacataggaggctgtggattatggttcaataagttgagtaaacttttattattgctgctatgatgttactttctcatagctgtgacagaacaaagatcaaatataatccgatttttgtgttcacatgattttgtcattcatggagttatatacaatgccaatgattgtatctacttttatgcaatttattttgggcttttttccttaatagattttttaggcctaaaatttacatttttatcttgttaaagaaaaataaactaaaaaagaaattaaaaattttattttaaaatatacggacggactgaaacaaaacaattctcatcttcctctctcttcttcctttgtttccagctgtaccaaagcttccatatctctatttttatttcaattcaggcacgattttaggtccaaaaaaatcgtataaatgagaaaggcacaatgaagatctcaacaacaaagcaaaataatcttgacaaatctaaaagtaaaaggtaaaccagaaaaaaaaaatgagattacaaggtggtgatatgacactttaaattttctctaagactattattttcttttcttcttaattctcttattttttttttttaaaaaaaattcatctttttaaaaaaaattcatcatcttaaaaaaaattcatcatcttcattaattatttcatagtgattacatgattaaaatctagagtaacatcactactcctgataacacgatcagcaactaaataggatgctcgagctaagaaatgagcaacactat

SEQ ID NO: 162346 - DNA, 3221 bp, Cannabis sativa
ttcagaataatcacaggagaattgtggaactggccagcctcccctatttgctagactcatgctcagtaacctctccactacacggctgagaagacatctcattgtgctgctgctgttgttgcatctgataaagattcagctggaccgtctgccggtgctgcatctggtacatttgttgatttattgaaagctgctgagccatgcaattcgagagatgagcttcaccgctaagctctgcagctgtaagctttagacgctggacttcagctctgagggcatcgtttaaagctgcaaaggcaaatagcactaatgataaagatcgctcaaaagccacaacattcacctacaatctcggaggcacaatacaaaatggtaccacgccattgaaagaatgaagattaatagattaaacaaaagtatgatattatataaggattagacagagccgtatagtgttccacaccacatccttactagacattatacttaatatgcatttggacaagggttatatgccataataatgtccaacaccagatccttactagaaaaacaacacccctacccgaccccccaccataaaaacaaaatatacatttacatgcaatgcaagatcaaaatctaacacaataataatttgcacccgcaacacaacattgctaaattctgcaacatgggcatataagaaacttgatacattgccccaaaaatgagaaactaagttacacttgtagcaacactttcatctacaaacctgaacaataaagtccctaggcagcatcatggaaataatacaaatttaaaaagtatgtttcatcaattgcaaagagaagaaaagaaaacattgtaccatctttcaactgtgcttgttgctccatagcttgaacacgaaatttcaactcactgttttgactcgtaagacccacagaatctctctgtatacatcaaaaaaaaaaaaaaaatcagcaaaacctaaccatataggtaatactataacctgaaaccccccagacactctacctgcaactttgtaacctgagcagacaaagtagtcgcttctgtctgcagggtttgaactttatgttccagttccgaaatataacgtgacctccgctcctttgaacgagcagctgattgtcgattagccaagatcctggtttaataaaagataaagaatgaaagagttttagctgatgatacatgtattgctaatgctaattcagaaatagctaaaaaagcatagtacctctttgctcgtttgggatctgataaagctatctcagtaagtttttcactttccataatctttttcagctcaaccgcattgaattcgccatttggaaactccataccaaacttagccgagttaccatcagccaaactgttaggtgattgcagaccagccccagtacccagtggaagaagcttcaatgattcatcatcaaattgcaaacttcccatataactatccatggaaagacttctatagtgcctggaagtaggcgcaatatctccaggagcagctctcttcactccttccctcttcccatttccgaaaccagaacttgaccccgaaatgctgtttggattcgcgttaatactactttccacttcattatcactgctttcacatccatttgtcttcgagccgcttgctctgctgtcaaaatccttatcctcagtaccaggagagttcactttgtcgatgttttccaagttcatatatgcactaaacaagtcatcggcaatctccccctcagatcttttactctccataccgttgccagtattgttaccattatccttactatgctcctgtttcaccaactgattctggttctctctaccagaaacagctccgtccagaactccccgactagaaatgggaatcaattgaggcgaagactgaatcatagcagaaaatcccaatagaatatcactactggaacgcctatgacccttccgaggaggaaggctctcacctgcccgaaacgcaccccctcggttaacaggggaagggagcgactgggaattggaattcacaacattttcctccatggtaacatcattcgaagctgggtcagacagtgaggaatgcgagggctcacgatgaggcgaagggcttagtgggggcaaggagtcaagcgaaaaaaacgaaggctgagacaaagacctgttatgagacggccctggactcgtattctgaggaggaggaggagtcgattgccagtttcccgatcgaacccctgtacccttcgaataaggcagtgaatgaatcatcggattattggggtgcgaagggggtataccaggtctcttactgctatcaggactcaagttaggcgataattgattcaaaggaagaatccccatttgagatgtcccaaaaccaaatgcagaattattaggccgttgcatagtttcactagtaccctccattttctatctccaaaaaagctaaaaccttcttaccaaaccaaaccaaaaaaaaaaaatccatattcaaaaatcaaaaccctaacataaaaacaaacaaacaacaacaataataataacagtaattgaaatgcacactgatttacctggcaagataaaccctagcaggagtaataaagttgtgatggaaatcgagtctcagtagtattgagtgtccgaacagagcaatgaaagtaaagaaaggaaaaaggcgaaaactttgttattgccgcagtggaaaattgtagttgtaatctggaactgtagctgttgatgtggttgtgggtatgggtttgttcagacataacacaatgtgtgtcgtaagtaatgatatatgtatgtatgtgtctatccatagtgtgtgtaattaggttaaatacctaccgcgtgaatatcaaagacgcggttttttttttcaattcttttttcctttatctccggctactattttcccatattttattatttaataatatattcaaaaaaaaataaaaaaaaacaaaataaaaactttgtcaccttcttctataaatgtattattaaaatattaaacgtatagagtaccttaagactttttttctttttatataattactataaatataaattataaaccacttgtaattagttaatgtttagtcaataaaagagaaatgaaccttttgaaaaggttaattagtaattttttttccgaactttgacatgtattaaatcgtgtcttctaaatttttttggctgttagaaat

SEQ ID NO: 162347 - DNA, 3388 bp, Cannabis sativa
aatcaaactcgatttgcagacaattgtggttgttccggttgaatcgcgaggagtagtacatttcggatctgttgagatggttagaagaacacttgtaataatttgattagtgtttgtgttgtgtgattgaactgttgtttgattaatcctatgttgttgttgtttttgttggttcagatatctgagagcttggattttgttaatgaaacaatgagggtttttcaagaaaccgaaaatgttgatgtgtttaacacattggaaaatgctcattgttatgaaaaagttgacaactttgatataaatggattgtttgcttctttattctcatcacaaaattcgagtagcgagttcattcctccaattttcggggaaaacaattgctctgtatctgatatggattgtgaaaagatgtcattttttaacaaaaaaaatgcaacttttcttgatgatcatgacttgttctgtaccgaatatcctactttggcttcgtcgaatcaagattctttcgtgtctcagcaacagcagcagcagcagcagcagcagcagcaactcgtgtgctcgggaaaagctaagagcttggagagttttcccgagaagttgttcgaggaatttgagccaatggatttcagaacagatttgttggggcaattggatgatctttcacagtggtttgcctcttcatcatcacctgatctgaatggtgataaggcaattcaacagataccaactgaatctactcaaagctatgttaaatctggtatcattcagggtgatgaaaatgagattatgatgccaagttctgcatcaggaaaatgcatttcggggttgaaatcttatccccgaaaagggttattctcagagctaggaattgaacaacttttggttggttcaaatagttcttctacatgtttgactaaatcaaatttggaagatgaatcattttcatcaccaattaaaaggaggaaaattcaaaacacaacaaaggaggttcctaaatcacaagttggtttatggattgatgatagttatagcatcattggtggaagtagtagcagcactgttctgtctcaatcgcagatggcgagtgaggagcctaaaaaggttattaggaagagggcgaggccgggggagagtactagaccgagacctaaggatcgtcaactaatccaagaccgaatcaaagagttaagaggcatcattcctagtggtggaaaggtacaatcttttgctgtcatttcgagattcaacagcatattagttttcgaaatttttattgacatctttcatgtttgctttgatgtaatgtaatgtaacagtgtagcattgattctttattggaccgaacgatcaagtacatgcttttcttgcaaggcgtgacaaaatacgctgacaagctcaagcaatccaataagcctaaagtaatgaacttttcacttaaaactcgattttcatttactagtacaagaaattaacaaactttaatgaaattcagttgatcaacaatgacaatggcgccattctaagagacaacaacaacaacatcagtagcactagtggtggtggtggtggtggtggtggagttacatgggctttcgaagttgggggtcaatcgatggcttgccctattatcgtcgaggaccttaatccaccgggccaaatgcttattgaagtaagtaaaactcgtagatttatgaacaccaaaacctaattacaggcttgatgactggtagctactaagtgtaatataaatctcacgaaaaacatcttaattagctcaaacttttctcaatgactaattatgttttgttgttctgtagatgctttgcgaggaacatggattgtttctcgagatagcagacatgattcgaggattcgggttaagtatattgaagggagtaatggaagtacgcgaaaataacaaaatatgggctcattttattgttgaggtaaaagctttttcaatcaatttgagatcaaatttatgtaaggctttttctagattggttttgatcttatgtttctttcattgtaggcgagtaatcacataacaagaatcgatgtattttggtcgctcgtacaacttcttcaacaaacaaatgctgcaaatgagattgattctactaagttaccaagtaatgttgttatgaatggaggaattcctctatttgacaattaccaaaaaccgaattttcctcctccaatttgcttaaccgaaacacttcactgatgaacaagtgctcgggttgtgtttatagatttaggcgagtatgaaaatggtgccttaagaagagagttttttgacaaagaaaaggccataccttgcaacagaaactaagtgttggttaagtttgtagactagaaaaagacattcaaagagaggagaagatgatcattttggcccacaaaatccttgcaagtaattctccattaattggagaaagaagaagtttgaagatttttggaggcattgtgatttaattctcttgatataaatatatatttttggtttattttttgttgaagattttgtttttgagttcattttaatgttctaacatgttaatatttagaaagtggtgataaattggttagtgatataggctaacaatatatataaatataatagctcattttctttcatggtgttgtttttatataataattattctaatatatatagtaaaacctttatttatttaagaatatactaagctaattttttttttttatgttttatttgtaattttatggcttaaagtttttgtttataaaattacgatttaaaagttttaaaattacaaaaatacaaatttttcataaaaattaaaaaaaaaaattaatgagaaatcaactttataataattataaataagctataaaataacaaaaaataatgaaaaaattaacatcgtaacaattataaatcaattaaaaaaaaatatcaaacactaattatattgaaatctgtatttttataaataaaaaagtcaaaccgtaaaaataaaaagttctctatgttaacaaatttttgtaaatttctttaaaatttttggtctattatgtaaaaaatttatatttcaacttagaggtaattataaataaacagaggtttgccctttttagtacatataacaataataataataaaaattcttaatacctattatttacaaaatatttatagattgtttgacacattgatttgctctttataattgggtaaatacattatagagatgatattatccatatattacatgtaattcaaatgtaaaataaaatttttaattttacaaaaataaagttataatatatatatttgaataagatgtaatcatttttataaggtatatttttttaatatgagacttaaaaaatgtataactaa

SEQ ID NO: 162348 - DNA, 4508 bp, Cannabis sativa
  modified_base (728)..(736): a, c, t, g, unknown or other
taaaatatattagatagctacattgattttatatggctataataaaataaaagtattgttaggtttcagtactacttaatattttttagacgtgattagtgatattttttaaaaattattatattaaattacatgtgattcaatacttagttggaccaatagtaatattgacacataaaaaggtactagacaccttttaaatatcaccacgtactactgataccaaataataatattcaaataaataatatagatataattttaagaggatttttttatttttacattcaaaatagtttttttttatagttttacaaaaaatctacatagcaacttaaattgcaattaaaattcacataacaacctatataaaaactactagagtaaccacttgaataactgcaaattaaaaaaaataatatataagataatttcattaattttaattattatttatttaattatgaatttgcagatataaacgagtgtgagagattttataatatatgcaaggaaaggcagtgtaaaaacgggccagggacatataactgctcttgtccccatggatatacttctacttctacactactcctcaacggtactgaaatattccgatgccatcctacctatcattttgtggcaaaactttctctcgccttaggtacgtaattatatataggcaactagcgtttaaactactttagaaattcaaaccgtaaatttaaaannnnnnnnnaaaaaataataatatataaaataatttcccatatatatagattacaatctaactcattaagaaaattatatagtactctctcattttgagtatgcttataatatatatgatgatgcatgtgtgttatgacttggtagtttaattgttttgtgatggttacaaaatactcatcatgattatttaacatgaaaggaatagatgaatattgaaataattattaaaatattattaatacttgcgattagtttgatcctcataaaatatgtctgttctacatttttgaattggtcttagaccatctacaatagaagataaaataaattgatctatatttggcataaaatatgattttgtaatatttttgtatcaacttttattattatgctccaatacataattatgtattttgatataaaatttaatatatcatttaatgctcatctaatactttacaaaaaatataaaataataacaataatataaagataaatataaatttaatagtaaagtaataatatttaaaaaaatcatatttaatgtaaattagcatgctaactaaactgtaataataaaatattaaaaattgtataatagtaaatataaaaatatagcatttattgtatattatgatgtaaatttaaatcacttttgattatatgatatttttgcatcataatttagaacactattagagtaaacttttaataaaataaattatattttgcatttgcataacttatttgcatctccattagatatgctcttaacaacacttaaattataaccaaccgaaaaaactatgcaggtatatgcacaggctttttgatactggttgtagggagctcttggatttattggggagccaaaaagagaaagcttatcttactcaaacaaaaattctttcaacaaaatggtgggtttttgttacaacaacaactcgtatcaaaccatttattaggcgcagagactgcagtagcaaaaattttcacagctaatgagcttgaaaaggccactaataacttcgatcaaagtagaattattggtcaaggaagctacggaacagtatacaaaggtgtattaacagataacaaaatgatagctatcaagaagtcaaaaattggggatcaaagccaaatcgaacaattcatcaatgaggtcattgtgcttactcaaatcaaccatcgaaatgtggtcaaattattgggatgttgtttggagacagaagttcctctattggtttatgagtttataacaaatggtacactttatgaacatttacataacactttaggccaacactcttcaatactatcatgggaaatgcgtctaaaaattgctatagaaactgcgggtgcaattgcctatttgcactcttcaacttcgatttcaatcatacatagagatattaagactgcaaatattttgatagatgacaattacatagcaaaagtatcagattttggagcttcgagactagttcctattgataaaacacaattaactactttagtacaagggacgttaggttatttagatccagaatattttcacactagtcagttgactgaaaagagcgatgtttatagttttggagtagttttggccgaactcttaactggagaaaaggcactttcatttgataggtcagaaaatgaacgaaacctagcgttgtacttcatttcttcgatggaagaagatgatttgcttcgaattctcgaccataatttgattactagtgttgaggataatatggaaaaaataaaagtgatggctaatgttgcgaaagggtgcttacgagtaagaggagaggaaaggcctacgatgaaggaagttgcgagtgagttagagggtttgatagagagggagttgcatccatggggagaagaagatctcaatgtagaagagactgaatatttgcttgaatcttcaggactatgtaatatgggtactactgaaatatttaatgtttgtaatatttatggtggtagttttagtaatataagtgtagcaaggatggaaagcttgagtaacgaaatttatttggagtcgtatggtgatggtcgataattataataattcatatgaatgtaggaattaaatatacttaaatagtaattaattaatgtgttatgattatatatgtttagatttttgttgtacagttactttagatttgttaaatgttaaggataataatattgactttatattgtgtttgtacatatatgtaacatcatgtctgattttattagagtggatacataagcatacagggttaatgggcggcaccattacaggtggatgcatttgagagaactttgcatgcaatcttgatcttctatcctctttacgttgtgcaagtgctacgtacatagagtggtttgctaattatcattttaccgttcatctttggaagagctcgtgatgcttcctcaggataaagcaaaaaatttagatcccttgctcacaccactagttttgcgcatgaccttgcatgaagtaattttaccaaactcaaagagtaattcctttagcttttcatcagtcacactattatatagatttttaagatagattcaatctttcattttttgaacaaaaatccccttgttcaaatttgcctttcaattccatctttcttttattttattttatgggccttcccaacatactacactttgtcctcaaacttctttccattaagagcatcaacagttcgagccgcatcaagcttttcaaagttaacaaatctaaaaccttttgattttcttttttcgtctctcataactactacactagtaacaactccatattcatttgtttaaatgattgagcagcctcttcactatcaatttgaataaaattatatcctttggactgatcccgaacatgatcagtagctattttgcttgacaaaagctttttggagattactgaaagagacataaccaaagagccctgcacacgcgaactgaaatgacctgaccaatttggctaaacatctcaacaagttgggtcaccaacatatagagacatactttaaaaaacctgataactaatcttactttatacataatcctatacaattaaggatgggcctataaaaacttttactaaattaatatcaattacaatctctcttttggtaaatttatcttttagtcgatttaaatttaatcaagatatttagtatagatgtgagtgtaaaaaatataatcaaaggctaaaggtttatatatcctttggtttttgtcaatattaacctaaaaatgatgtgggactaaaatttactttaattttcattaaaagaattatagttcacaaagttaacttttctaacaatttttaaattagatgagttctaattttggtataattttttttggaacaattttaatgctatttttgatggtgatgacaggaggatgagattatttagtgaattaaaaagatgaatggattgacaaatacacaaggagtaagagcatgtgaaattcttgttgcaaatcaagttatattactatttttttttagtgtggatgatgagttcaaacatggattacttaggtaattattggagagtgagttagtttatttgtgttttaggatttagtagtttaggggtactcattcaattaaatccgcatgttttgcttatagtgcattcgattcgcactgaatgcatattttatattatggatccaatccaatctatgttatagctcaaatttaatccaattcaatccacaaaagtacagattagatcggttat

SEQ ID NO: 162349 - DNA, 2978 bp, Cannabis sativa
ttatttaaataattaaatatgctttaaaataaaaggaatttaactattataagtaggcatgatttgagaaataagaatacttaatcttaacttaaattttcaaaatttagagagaaaaaggaaattattttttctctcatctattcttactcatgtattaagaactcaacaagaacaagcctatacgctttatcccaatagcccacactattctttgtgtgtgttcgaacgatttagaagacactggtttgagtccaattgtaatttcctcatcatctggactaagggatacaacatatgagaagttttgaggatacccttgtagacttcaagaggtattcattctaaacttactatttattattttgatttagtgtacatacatttggagtgggatatggtacaatgataattagatgatacaaaactcttttgctgcaaacctaatttagtaccataaaaaccaacacccagcttattttcctggttacaagaggtgggcgcccctccaagttggtaacaatgggctggatggctagaggaaagtagggaggaggcagaggcaggtcggagcgagcagagcaagactcccccttctgaggagctttggctggggattcctcccttaaagtacccagtggttttctcttaacaaattcctgtagtttggaagccgtatttgcaaagacacaaggcatataagttagaagatttaccctaaagagaagaatacaagtataagttggagaaatctttaccctccgccaacccaggaatatcatcccaaaaaaagctgccctgaaagccttcatcatttgaagaggactattcctcactttcctcactagcaatacgtttaccctttccctcatcagggagtgggcagacaggatgggcaagttctgttccctaaggccttataagtatgggaacctaccctaaggattcatcccacttaagccttttccgagcagccctctctcttttggtttccttcttcttctcagaaagcttatcaaaggggatattaacctcaagttccttccttttggtccctttcttcttcttaaaaatcttatcaaaggaacttgaaggcttgcccgcagaaggatagaggttgtacttgatgaagttctctttcgttgctaacttagaaatattttgttttgaggccggaaaagaaaggatatggttagttctatcttagctttatccctaagctttagggtgggtattggctggttaaatatgggagccctctgaaggggattaaatatatgtctgccctctttgttttgtatactcagatgggctggacgcaaccttctcccttcaagatcaggtggtatttcaatttgaaatcaaaccatgtgcagggccagatagggtacttctattttagccaactgggctatatttagttgggtgacacaaatgactctaacatgtcaaagattggcggctatgctagggatacttcatgttccaggatgcggagggtgtgcacagagtcaactgtgttgggtagatcctaaaatagctggctatatccttaaagtatgaatagagtggcagaatagctccttattttgcgtggggtccagaacacaccatccaactctcaagaggggcatgggcaaggtgctcctcacttgtcaggccagttggaagaccctgaccaaaattttagcctcaaggttcttggacctcgtagggataaatgtggacggagaagactcccaagtagcatccagctcatccctttgacgcaagggctctagagccgctagctcttccactacgtgatcaatcgtagcccaaaaaggcacactgtcttcattgagaggctccatggccttattgtagctccctaaggggttgtttgtgatgacatctgtaaagaccgcttagttttaatttagaattagcagataattagggtttaattatgaaattagattaataattttatggagatttatttgaattcaaggtgtattatatttgccatacatgaaattttatgttttttatgttttcgcatattgtgtgctcgacaatattagaatgcggcatttggctattaaaatcacattttagtattttaatagtagcaggacaaatacataaacgttgggaatattgggaatatttgaggcgttaggtttgactaaaatatccctaggtggctatgagacttttggtgtgagtaagggggcaaaatagtcttttctctagaattcttttgtcctttaatggattatattaagttagaatattttggttttatcttaaggaatttagtagataaacatttaagatttatcatttacttaaaatagaaattagacaaaaaaaagtcactttccctctccaagtctttctctttctcgacctcccttgcaaccagctgaagctgggatttttcagcttcaattcagagtgttctagctggtgttgctaggatttctaattcaattcaaggtaaccaagttccctttttcttctctttagattttcatggttttaagcttaggtgttcatgcatttttaaatattagggtactgttgttgtaagttttatttagatatgtttttaatgggtattttatggttaattaagttgatctaagtggttgttgttgcttagtgatgtgtttgagcaaagtttgaatttagagctcaaagctttgctctttaatggtgtttttagtttctaagtttattgattgatgttattgcttgaattttactcgttgtggcctatttaggaggcctggaaagtttggagacgtttggggttgatttgagttgtttagaaggaattttgtgttttttgcactgaactgaacgaccggtcggtccttagcaaactccacagaaccagaattctggttgggaaactggtctactggttggggaattttagggaaccctagtttttcctgtttttccaatatttagggtattgccatgtt

SEQ ID NO: 162350 - DNA, 3556 bp, Cannabis sativa
taataaatttgctgttgtttttaaacaaaaagaattaatgcaaaagagggtctcatgtgatataatgtaccacactgtatctatactcaaaaataagaaaaaacggaaaatgctatattacaagtaagaaccttcccatcccaatcccaacccccacccaccaaagaatctctctttttcccttgtacatgattcaatctaattaacaacaaattaataaaataaagggtatcaatatcatgtgatcattcttatttattattgacgagttttttgtaatcttgttccaatcattctcagctcaaatttcttgacaacaccagcaatgtctctcattgttgtgtcgagtttataagggttgttttcgaaattgatactactccaattaccaaggttcctgcagggctctcttcggttagctatggtgccgtggtaatggtagtacatgatccgtccctcggttttgtgtgtggtctttccagccaggttttgtgacatgtgaactcctgttgcatacaagttgcgaggctgcaccgcgtattttcggtccctccttattccttttcttacatctttatacacaagcttctcaaaaccccatttcctgcaatggtttttttgttcacatttacaactaatcaaaaacactttcacatgatgatatggccaaataagtcaaatggggtattttagttattattattacttaagcatataatcttgctaatcaagatatgtgtcttattatcaaacctaatagtcaacactgaattacgagaaggcaacatcaacacaatgatattataagtcactttctcattctattttctcattgttgttttggtcaaaataaattaattaaaggtttaaaaaatgactagttaccgttagtaacaatctaatcctagatattcttcattatgtctagatttacatcattttcttttgacatattttcaaatatggtatcattgtggatctaatttttctaaaccaaaaacaactctacattgtttacacacattaatgattgaataaggtaaaggttaaatactatatatcaacaaagaagaagttaatcaataccaaaagtcctaatcacatgaataaggaaattgtcacttttaaaaggaaaaaaaaattgaaatgaaacacaccccatttccagctgccatttgttagaaaatcaaagaaagaagaatctaatatatcatctaaaatcatttaagcatatgcatgtgtctgtcctactaataatacctccaaacacactcacacacataccaccaaaccacttgtgtccatctaaacacattttcaacctatcaaaagttttccaatcacatgaacaagaatatattatattataacagtgtggtttgaacccaagaacaacaacaatgagtgtaattaaactaacgatctaaagttaataaaaattgaatcttcaattccaccaaaccacttgtgtctatctaaacacattttccacctagcaaaaatttccaatcacatgaacaagaatatactataacaatgtgacaaaaatacccaacttggtttaaacacaaaaacaacaacaataagtgtaattccacaatctaaagttaataaaaattgaatcattaactcataataaaaaatcaatacctgtaagtttttccagcatcggcagagagacagagcttactactcataggcatctgttcaatagtgaattgattgtaatctgataaagattcaagaacagttttaatggtgttcttaggtggaataaacaaatactcatcaacatcaaagaagaacatccacttagccataaacttataccgatgcaaacaatcattcacaaccataaattgattatgataataaccatcaaatctctcctgatctcttatatcttgtaaagtcacataaccaagctcaatccatggcttcaaaacctccataacctcttcatgaaccccaccagcatcatgtataacaaaatgagatcttggcccaaataatctcacatgataagctaaccattctctaactctctgtggactcaagcttccgtacagtgaagacccacaatagaaataatcatatttaggttttgaactgaaaagggaagtgtccaaacttcctggagcttcagttaaggcttcaattctgtcggttacgttgaatttccggtcacctgcgccggaagttgaagcgtagaggactaattttccaccggaattatcaacattgatattctctgagaaagtacagttgaccaccacgactgtgtagactcttccgtaaccccaatctggaaggatcttgtacccaacagttgagataacggaggagggagaagaattctgcagccattgacactcgtaagttgggcttccgtaaacgtgaaggggtttcgaagctattgcaacaatggcgaaggtgttaagtcctcctctgtaagttcccatggtgatgaagttgtaagcagctgaaccgtaaggattgaatgcccttttcaaaaccccattagggagaagctgatcttgctctgttgccggcgccggcggcggagacggcggaggcggaggtggtgaaatcggagaagaagatgaagaattagaaacggtgtcgtttaacttagaagaagaattagaaacgacgtcgtttataataacataattattagaagaagaagaattagaaacgatgtcgttttgagaaacgttattaaaagaagaagtgtttgaaacgaggtcgttttgagtttgtgaagttgaagaagcaactctggagatacagacacggagatcggaggtggagatggtgaaacgagaaggaaggaactggagaagtgtagctatggagcagaggataagtaaagctgtgagaatgagtttaagctcagctgcgtaactccatactactttcaccaacactttcttgttctctctttctttcgccattgatgatgaagtgggtttcttcttctgtaaatggggttttcttcttctttcttctttctttctctgaagagagagaagaaagttgcagagaaatctctctttctctttctctctctaacagtacgaaacctctctctctctctctctttcttctctttctcagtctttttatgttgttatttttctctgtgtggggtccactcttttttcttactttccttttttattttcattttcatttttatttatttgtttatttaaaatttatcaataaaaaaaataccatgtgaatgtatgattactattgttcttatttgttttaggtaacttaaagtcaaaaaaaggtaatttgttgaaaatagtttttataagccttttctttgtaattttcgatttaaataaaaaaaaaagtaatttgtgaaaatacaatctttatccttcaataaaaattacatttatttgtttatttaaatttaaaataatttacggcgaaaatacttaaatttaactttcaattgtagataaatatttaaatttaatttttaacggcaatactatttaaattatatttttgaaacttcagtaggtacctaaccatt

SEQ ID NO: 162351 - DNA, 7035 bp, Cannabis sativa
tttttgtatttttactttagtatgtggaaggaaattctcctactgcgagctgccacaatatctacatgttttttgctggtctttgtcaacgtgacttgagaaaatgtttagtgtcaatctgagaaaaaaaaacaatgttaatatgacttgaggaatttaatggaattgagctggagacccacctaaaaggaatgtaatgcacactgaaaggatttaatttgtaatgaattcaattctaggcctagaagataagcttatgtaatacaatttgtcctgagtgctttgatttttattcttttgttatgtaattctattcttttttgttcatttaatcctaatttagattgtacccatcaattgcaggtgatagaagcacaggttgacatgcctattgttggagccataacattatacgtctctcttcttacatttactcttcgtgtgcatcccgatcgtcttgattatgttgatcaagtattggtatgttcgttacaatagcctatttgaataaagtcaattagggtaaaaatatataatacatcagaaacaaaataagtaatgactacaataagatcatccttataattactttcctagaatagtgatatggaagctgtacaagaatagtccctaataaataaaagattttcctacaaatacacttagagcacttgtaaataagtctgtctgaaacattgtatgtaccagtatttgttgctaaattgttttattaaatcctttcacagggagaatgtgtgaagaagctcattggaaaacctaagcttgatgacaatagagcaactaaacaagttgttgcacttctaagtgctccattagaaaaatatgatgatactgtcacagctttaacactttccaattatcctcgtgttatggactaccttgataatggaacgaataaagtcatggcgatggttatcattgaaagcataatgaaaaacaatacttgcatctccactgctgataaggtaagcttttctctatttgttctataatattaatttttttccttcaaagtatcacaaaaatggtctttgtaggttgaggtgttgttcgaattaattaaaggtctcatcaaggatctggacggaacttctgtagaagaggtgcacaatatatattgttactgctattgaatcttgcttttaccaattactgtataatgattttttctataattttgttcactggccttttcttctttatgtctgcctttggtttttttctgctatactatgatgcttatagcttgatgaggaggatttcaatgatgagcaaaatgctgttgctcgtctcatgcacatgctttataatgatgacccagaggagatgttaaaggtaagtagttaccttagaaaggaaaaagtatttctatttaactctcagcatactactcagtcttagttttgatctctcatagcattgttttttgatcatatattgacgatagatgatatgcactgtcaagaagcatatactgaatggagggccgactcgcctaccttttactattcctcctctcgtattttctgcactcagggtatgtatgctcctgttttacaactgactttgtattttgcttgcatgtacggtacaattattatggtttcttttaacgggtattcttacatattatttggggtattttatttgcaccctacaaaattacaccccaatagtaaaataaatagataaataaataattttaaaaatgtgctcttaatagtttttaaaattttctttttcacattcaataattattttaattttgtttcatatttctttatcctaataagatttcatatagttttttcttgtgttaatatgtaaaatatatttaattttttatatatgtattttttaataatgtgagaaggtagaaaaaattaaaaaaaaaatgttagtataaattgaaaatatgtatttttatattttatagaaaataaaaataataaaatgggagtgtctatataagtctttgagttgcaaataaaatatttctattattattgtaatttgtaatccttaactattagcctattcccattttcgaccatgaacttctaatgttttgtcatatacattttttgggtcgcatttgaccccataggccatagctataagctcacgttggctcttgaactttaaaatatccacatcatactccactaaaaaaaactgtgggtagaaaagagcattgaaaagaagaagaaaaaagaagcatgagacattcatgtggaaaattatatattgggtaaaaatcttctgatgtctttcaatgtaaaccatgtgtaaaagaaatctataatttgtttttttctttgtaataagaaattacgatttttttaatggagaaatcaacgaattaatatacaataaattatgtttttttttctttcttttagttgaaatcaaaattattattctttcacctttgcaatgaaacatgttgaaattgctacgtttaaagcttttccacatgtgtgcgtcccttttgtttgttttaaataatacaaagttataatacaatgaggatcataatttgtgccaaaatgagatttctaggtataaatcagggctttttaagtactacaaattttgatagatagagtaccctgtagcatgccaagatgagattttaggtataattagggcagaatgcctgactttctgttgtacatttattacaaaaagagcagcaaaaagggaaaatgagagaagaaaggttaaggtgttaaaatagagggggtatcattgtcttttctctatgctagatactaggggtgtacgtcggtcggtttacgttacattttatttaacccaatgtaaagatcgggttacaaaaatctagtagatacatgttttacactttttttctttctttaaagttgattttcagttagaagggcaattcataatgttgttaatggctttcagttggttaggcaattggaaggccaagatggagaggtagtgggggaagaattgccgacatcaccaaaaaaaatctttcagcttctaacccaggtgcctaatatcatataaaataatttgttgtgtgtgaatgtgcatatgcatatgtatatccttttctttttctaaaagatagagtatagccattcctttaattgatgttaagatgataaattatttatagagattgtttatgtaggttatatatttcctgatatataactcagtttttgaagataatttagtttaaattactgttagtcggtgactgtaaataattatgcctccctctacttcttctgcttcattgaattcttaagcattctatttggcattgccagtaaaaattcatgtacatatatgtcattgtgtttatttgtctttatgttttgtgtgcatacaataattctatctgcttactttcagattatcgagattctttcttctgttccatttcctgaattggcattaaggctatacctgcaatgtgctgaggtatgccatgcacatttttggtaaaactgtatcatggaattgattttgaattagtaaaggaaatttgacgatatacacattctaataggggcatttataaactatgccaactttaaagattattggtagaacatgcttctcctacaatcttggatgaagttatccctttaattcaaacaccctctctctctctaaacatccaatgtttctcagcatcacaaatttgaagcaaatccgatcaccgccacctcccatcaccattttttttattggaacaccattaaagtacctatggaagcacctgtgttttttttcttctttaatgattgaaaatccaatccaaagcttaaactcaagaaaatattccctcaatattctattttatggattttgataatttctctacaaggttttcatttctttttaatgattgaaatccactccaaaatttaaagccaaaaaatattcactttagacattgtttatggattttgcacatttctgtaatatatttttttggtttctttctcatttcttttcagatttgaaaacgtagttttgaatgaaacgatgccccaattcctatgaaaactttatttttgaggtcaaaatggtgtatcatacacctgcgatgcttcctggggtgaaaatgatggacctgtaatgcttcgttgaaagcttatttttgaggcaaaaagcgatgctcctgcgatgttacgacaatacattcatgaaaacttggttttcttgacgatggtcctacaaaaactttttggttttaaaaatcaagtttcttgtccttcattggagcattgtttttgtcttaaaatatcaagttgccaagggaatgtcgctgtggcatcgtcttgttcaaaattcaagtttcaagggaccatcgttgtagtatcgcagcgcatcgttttgatatgaaaaattatgttgtaatgggcagcatcgtgttattcaaatttctatggactttcagataaatgtgaacaaaactaataaaaatatgcaaagaagggttcaacatcattaataaaagaattatgggtgcttcaatggtggtgttgttagatcaggtttgcttcgaatcattaaggttaacatattttataaatatgacctattagaatgcatatatggtctaatttcccattagtaaccatgtcacataacatagaaactttagaactggaacttataatatctaagaattattgtaatttagagaaataaagctttctttccctatccgtttaatattgcattgcagctgagtcctacaatctctgtttttattgttgaatgaacaggcagctaatgactgtgatcttgaatccactgcttatgaatttttcactcaggcatttgtactgtacgaagaagaaattgcggtaattttaactatcttctaattgcatatgtccaattgattggtaagagacaggctcctgactagtaagtagtaataaatcttttaatgtcagtgaccattactcaaaactctttcttgtttctaggactctaaagcccaggtgaccgccatacatttaatgattggggctctccagaaaatgaatgtatttggaattgagaacagggatactttaacacacaaggcaactggggtaattattcttctttgatttttgtgctttttcaatagctgtttactcttcgaccttgactaattaattgtcctgtcatcagtattcagcaaagctgttgaaaaagccagatcagtgcagagctgtatacgcatgttcacatctattttgggttgatgatcaaggaggtattaaggacggagaaaggtacgcttttttggcaccttacttttctttctttaatcaattgaattcttcatttcattgtggttatgctcaaccattatgggcatatatttgcccaaacatgatacatatttatctttttctttcccaagtatcagtctgatattcacatgttttgtcgttacagggtcttgctttgccttaagcgggctttgaggattgcaaatgctgctcaacagatgaccaatgtcactcggggtagcagtggacctgtcactctgtttgttgagatactaaacaagtcagttttatgagtttgccattaattgaacctgtcacacacacacacacaaagatgctcataaatttgctatattatcgtaaataatgtaattctgattcaaatgtgacttcatcaggtacctctactattttgagaaaggtaatccccatgtcacgaatactgcaattcagggtctggtggaattaatcagaaatgaacttgaaagtgactctacaacccgaacctcagaccctttctttagcagcacattgcgctacattcagttccagaaacagaaaggcggagcaatgggtgagaaatttgcttctataaaggtttgaatactcttcagtcacatgtgaaatgcccaaaatgtttttttgacaagcacggtgtgattattgggtatcagaggggactttgattgggttggggtgatttcttgcattctttatacttctattggaaacttatgttattgtacagttctgacacctcctatacgtttcgatgtatttattttcttccatatagattcaattattgtgttctcttaaaagattgaactggatctcggaccatgtgaattgtgaaagttgggattaattccttgagctttaggtcgtcgttacgtaggaagcttgactatctccttaataaaattttggtccacatcccattgagaacagtgctacaggtgatcttatgccatgtaaattttcaatcttgaaaaagaaaaagaacaaaaatctagggattttaatgatatacgtaaactacctacaataataatgttttcatcaaattttttttacaataataatgttgcccaacttaacttcaataggaaatttgggttaccaatgcttaaatatatgtgatgcattgacttaaattaatctatccattaaacatataacataagaaaaatttcatttaccatacttaaaaaccttattacaaaaataaatctcttaattttttttataccatttaattctactaagagcaagttaggcacaactatgttgtgggaaaaagctgtaataaaaaatagttgtagtagaattgtggaaaaaagttcaatttttttgttttttctcacagtacatgcctaactcgttctgagtaggattaaatggtgtaaaaaaattaggagatttatttttgtaatagagaggttttttaaatatggtaaattaggatatttatttttgtaatagggaggttttttgtaatgagttgagcttctgggtgtttgataattataaattttacagtacaatgagttgtgaagaatctattataataatgataatattataattttgttcattataatcataaatatatatatataaaaaaaggtaaatgacgacataagtacttaaaattttatgtttgtaagcagcataaattcaatgtttatttttagcggtataagtactcaatgtttgtaaaactgtaatt

SEQ ID NO: 162352 - DNA, 1639 bp, Cannabis sativa
aaaaaaaaattaaaaaattttattagaaaaaataattatacataacttaaaaaaatatatttctaaaataaaattttaaaaaaataataaaattcatacaaaataatgtgagaaacaaatttcgaaaaaatatttaaagtgatttttaaaaattattttaagtttaatttttattttgagaggtgtaaatagaactcccctatcttttaaccaaattacatatttgaccttttggcgatattaggaaagggcccaactggagaattgacataacaaagttcagctaagcatggttggatgtccagtctgaagcatcctcttgatcatgtccatcccaaatgcagaatccgatgaactaatcaatttcagcaaagaaaaagaaaaaccaaattaagtgttagttataataaaacttcttctgtaatgtttgtttcaaactaaaatattgttacttttctttacatatacattacatatgtttttatttgacttttttttatttatttttctatacacacattttgatacaaaactatagattttatttctttcttaccatagatatacatgatcaagatgtggattggataaagataagataatccaacacatttcaatgggactatttttgtttatattttacttttttcattccactttaactaatccctgttacaccacacaaaaaccacttgagccaaacttaagtgacccatgtgacaaacaagtggtccatataatatcaagctagtttgtaatttaccaagaatgacaaacaattgattataaagtgaggtagagaaacaactagtcacctggggatagtgatttcataaggataagaaatcacaccctcgcgattcgggatagggggaacatgatccttcttctcattcacaaatttaattatttgaaacataacatcacgaagagatgcttcgagagctgcccttcgagcgcttctctcctccatggcgttctctactcatacattcaacaaaagtgaaaactgagtttaactgttcaagagtgaagatgttgaattctcaaattcaatgaaagaataattgtacctcctggctcgacaacttttgtacgacgagacttgctagaagtcgtcctttgaagctgggacacatttaagttaatgtaccactgttcccaatataggcgctctattttgtttgtgaaccaagaggcttgcttattcttcacttcataaaatgacaaacatatctgcacaaactttaacaagtgtctgaacaaactttaacctgatgagggaaccagtttgatgaaaagagcatcttttacgaacgtttatcacaatcattctagggtatgattttcgaattagaatatagcattagactacataatgactagagatcgcagacaaatggaaccacggcaagaagctatgatatcacaagtgtaataaattaacagattcctcagcattgttgagaaatgaaaataaacaccataaatttaaatacagtgtactttctggaaagtataaagaaaaaaacatatattttacatctttcgaagccaactcacaaactacattacgttgtttatttaaacagtctaaacgccacaaacctgactttttttgttggggtgtttctcaacc

SEQ ID NO: 162353 - DNA, 2524 bp, Cannabis sativa
tgcttcacaccatggccgttagggtcaaactgctcatcccatttgtctccccattttgtccaaccatcaccctctgagcgttctgcccatttgtctgtgtactttgtgctgccaccatgtccatcatacttctcaccccatctgcaaggaaataatgagcttaatgtttgaagaaaaagaaagcatgtattgacaacatcaattctattaacagttcgatcaatgcttatgatgaccaagaaaagaagaatgaagtctgatcaaatatttttcacgatgacaaccaaaaaacgaagaatgaggtcaaattaaagattttttatattaaaatcagtaaggaacatttataagaaagagagagtatttcaatttaagtatgagattcaatacctttcatgccagatatgagcatggccagcttcaagtggtgtgtttggatcaatactacaccatttatgagcccatttttcagcttccccagaagcattataacgttcccaccaattctcttgccactcatctccctggccattctttccccacttatctgcagtcttctcaatattcataagcccattctcctgcaaacaaatttaaacttttagtgtcaactaagtgtgcatgacaaaagtatatatccatacttttgatattaatattgaaagaagccaacagaaaaaagacacagaaaacaagtttagaattgctttgaagatgtagatggcccaaaaccagtctagtctgcagggagcacaaatgaatgcatcatatgcaacaagctcattagaggaagagaaggcaaccattcccaaacacgtagtgaccaagcatttccgtatacagattaagacaaataaaaacagatattgaaaagaaaagattaaagacaacccataaccaatatatgaatatgcaatacattgaaattttcagtttccactaacctgtcccatggattctctccagtattcacgccaaacattgccagttgcatcacgtcctgatttttctgaaccaagttccttgtatccaaaatcatctgaagcctcccagaacttctcttgccactgaacagtttggtcagcactaatgcctctgatcattgtccacctacaaagtacaccatcaggtcttctctcgagtcctgtctctttccaccacctcgaaccatctgtcctcactccgtagggtgatacctcatcgacattattaagagcatcggctacttctgcagcattcactgaagattggaaatcaatttctcgatcatcctgtgtagggctctcaagtattgattctgagtcttgcactttctgaacctccatcagtgactggagagggggtaaaggggcctgtcgaatgtttttgttgagtttactttctagtggaatggatagaatgtctatagagcgttctttctccatgactgggttgcctaaatttggattttctgaaggctttgttgctttttgtaattcaccactgacatccatactggcatcaccacccttagagggattccaggaccaaaaatctggacctgggattccattttttgaagcttctgattggggtacaattttggtccaactttgctttcctaaaatgttcaaattacaaaaatggcatgatgtattagtatccaccatccactacccaaacccataaacagaaaatgtaaattaaagaaaggcgtcacaaagccaaaacagttcacagaaatatagtaaaataaaagtggtcctgataatttacaagtatcgataaaaactgatgcaaaagtcatcaattcaagaagtgtcttattagtgggagttaatattcacgtgcttcttttgttatgcaaaattcatcaaggccaatgccacacttgtaaagaacctattgtaataacggggggtagcttgggagaatcacaatggcttaacatgccttcttccattcatgactctctagtgttaatgtcatgttcataagaaaatgatgatgcatcagagtccgtataccaaacttcacagagccacgagttcaaatagcacccataaattcaaatcattgaggcaaagatcaaaatcctaaatagagagaaccataacaacatccatcagaagtaacccagtaaaataactcttccttgactctataaaaaaaccctattcgattcaatcacctgattcacctccactcttctggtccaaaaaggcatacaattaactgaaaattgatttccgttatttgaaaagtctattacgtttctaaatatggttcttcaaaacatgatagacttttcaaataacggctttcgtcaaactatactttgtttaacattatattttgttatgttttgagattcgaaactaaaacattatactttgtttaccttttttagagctcttctttactcccccgccactaccaccgcggccgctcgaatccccagcacccgagcctggctcggccgacattccactctcctttagaacagagcgagccgccgcaattgctgccgcagcgcgatcgatca

SEQ ID NO: 162354 - DNA, 12566 bp, Cannabis sativa
aaagaaaaaaaatggaagaagaagatcgcatctattaataataatccaaaaatcattttcaagtgctacaccttaagaaaacaatcgtgtctgccattctatttttaatataatattgatacaccatcttaaaggataaattgtctacaagacctgcagaaatttttctataatatttctcttttctcacatcattttcgttctaatctttttttttttttttttgaaactaggatccccgcttagtcctacaatatttggggaccctgaaactatagcaatcgttatgcaggtacccaagagggactccaacctctcatgaatgaccatttgagctaccccacttgggtatattgattataatctaattaagcaggactccatcataaaaaggatgaatattctttttcggatagacataagggtatatctgaagctgttataatgcccttttttgaattgctcgaagtatatgtacaagacacaagtagacagcatctaacacattaaattatatttgtttattttcctcaacttcgacaatggttaaatctattgcactcttgtatctttcatccaaaatctatatgtataatttatcaaatttcgtttgttagaatgataaacattctcctttacaatatttaagctataacacaatatattgagttaattggttcaaagctaacctgtcacattttgcgtatacagcaagcatcatgcaatagcacataacactgggaaatattcctgaagtttttatctcttcaaagtgctccacactctcatcaacaagccctgcaaagcagtaaacacttaaaagtgcctcaagagttcgctcatcaggctcacatcttgtctttcccatttcaacatatgccttcactgcttcttcaaactgacctccttgcctaaaagattcaatgaggccattgaatgtatcgacattccttgcaactccagattcacccattctcataaaaattgcttcagactccttgtacagaccacctcgtgcaaatgcatgaactagtgtgttgtaagtttcaactgatggcttacttcctaattcattcattgtgttgaatgcaacaatagattctccatacaacgcagcttgcccatatgcctcaatgacccccgtataagctttggtactaggcactattcctttctcattcatgtgatttaaaattattttggcgtcctcatgaagccccccttttccacaagcagttattagtccctcatacgtctccatatttggttctacattctcctccaccatatcatgaaacaaagtcaccacctccttaaagtacccaccttcaccaaacacctgaataagaatgttataagtagctgcatctggctctgtattgctaattttcatttcaagaaaaagttccctaacatcctcatacctcccttgctttccatacaaattcaacaaaatactataagtgttagcatttggcatacaaccagccacttgcatctgtctaaaaacacccactgcctcctttatggactcagattgcgaataagcctgtaataacacattataagaggttatatcaggcaaattcccttcagactccatttccttgagcagctcagaaactttctcaagcttacccaaatttcgaaaagtctcaacaagacaagtatatgtggttatgtcaggaactattccaccttcattcatagtcctaaacaccatctcagcctcatcacctaaacctctactagcacaagcattaagtaaagtgttataagtgacaaggtcaggctgtattccttcatgcctcatctctgcaaatagacctaataatccttcccaatccaaacctcccctagcacaagcattaatcactgtgttataagtcaatatattaggcgacaccttatcgtttttcattccctcaagaagttgaagcgaggtttcatactgtccatttcggccataggcattgatcaaagccgtgtaggagaagacgctacggaccacgccctggcctggcatttcctcaaacacctcagctgccttatccagcaaaccttctcgacctagcaaactgatcatgatggtgtatatatgctcgtttggcttacaccatatctgtcgctgcatatacttgaagagcctaagcgatctctgccagtcgccgcgagctgcaaactccttgaacaccaaagcaaagtcgtttagcgaaagcttgttcttgaacatgtcaagacaccttgctatgctacctcgaggaggaaggctactgagtttgttgattagggtttcgacgtcatagctgtactttcccttctctaccgtcacggtcggattgccaagaacgacttctttcgccttcgcccttaccggaaataacctccggccaccggaagagaaaaaactccggtgaccagaaaagaacctcttgtgttcaaacaaatagagcgacttagtgagaaacgatacctggcggtgcgacttaccgtttagcttggcgactgcggcggggagaggtgaagcactcggaatggatactgaaggcgcgagggtcatctccgctatttggcttgcataaggtgagagaaatcgatttttcggatattttctgagtctataatccaaatttttgacggaaaatgtcacaaacttacaagagattatgcattttgaatgtatggcctcttctttgtctttttccctccttttgtcggtatttaaaaatcgaacgcaacaaaaactactttgtagattcaaactttctcttctgtgctgagctcaaaaattctgtgtctgattttctcggaaaattaagagtgaaaatatgggaagaaaaaaagaattgagagagtaactgagagtagcttttgaacaaagacacgtatgttgtggataacattacagagactcgagtctcgagtaggaagaagaacaccgtttcttattaatgggtcgggtcatccgttatttaccagaagcccgcgtaatatatttttgttcggcccctgaagtattttccctattttattttgacctctaaatttgtaaatttacacatattactacttgaacaagtattcattacatattgaaccctctttatatatatatatattgaattctaccatataatttagaatgaaatttttaatattctattcaataataatctctaatttattattacaaatttagacaattttaacttattataaataataaaaatttctaaattataattagttatataatttttaaatttcgaaagtatattctaaataaaaatatttacatgttaactcaaaaattcaataacaatatataaagctttagatgattgatgctacaaattaatgaaaggattgaattaacaattatgcagtaaagtaaaataaaagagacaaaattttacatggttcggtaattaaaattttctagttcacaagtcagtatgttttcggagtgtttaatgagtacatattttggcagagtattcatatatcaaattcgtcgtctcttttcctttcatttcactactatttataacagtagaatagtagttacctaagagtgtgggcagttgcagattgtggggttcgattccacattttatataactactcttatgctcatatttcgagtcataaatatggacatgacacttgaaagattggaaacaaatattgtggagaactcggtaataaatgaattgtctcggaagggatagttgattacgagcagtatcaacctcgcactatgcatttacaataagatagcgagacaagcaacgcttggcaagatgataacgatagaagtcttctcagatgtaatagatcaaaaatgtatcgctggaaatggtagataacgagttctttaagagcttgcaacttattgacccacatactcgtgagtatgttgaaagactaagagaaataagcataatacaacttatttcaaaagacgaagtctaagggttaccctagaaaggctaaagcgagaataaaacatcttaactatcatctcaaaaaatgctactagttatccttgagaaccgttgaaagattcgagtcataccttaaatgtgttacctcgataacaaaagactacctccagataagatcaaaagacggttaccatcagttattttattttatccacatgttgtaaacatgaagcatggaaattgtctatgtttcatgaatagttacctagacaagatcaaaaagaatatctatcataggaaaaacccctataaatagggacagaacctaagaaaaaatagttggataagtttttaagaagaaacaccgtgcgattaagtgaatattcatattaattcttctgtaatcaaagtatttcccaagaaagatttagaaataagaatgacttggggagtatgtagatttaactataaaaactttttgtgttctacatatatttattaattattagtattatttctttatttacaaggcttcatttattgttaatgaaatttcgagttaacaatttggtgcttccattgagagcctttataaaaaaaacttgaaaatacatctcaccattgtttcattatgttattctaattttttcctccttacatggtagtgcttacgtggacaaaattagtgccacgtggcagtacaattcaccaacgagaaggtcaaggcagtaccttaacaaacggagaccccgacactcaaatgggcatcaagtgatggactagcttccttacagaagctggccagccacccttggccagacctagggttggccagcctctcgactgcaccatggccagccaacttgctccctacaggggtttggccagccaagagaagctctgcagggttttcagtgcaattctacacgtggacaacatcatttgggttgtgaattgggccctaaaagcctaatagaatagttgaataatgtctatgttcaagggtatttcggtcttttataattaattaattgaatatacaaatatctagggtttcaagtataattgaggattttgggcttcctatataaaggctctaactttaacctaagaatctaagttcagtttaagcctgatactagtctccaagccctaagtccaagtctaataactctcctcttctttactccctctctcacacgcccatacaagctatctctacgcttgagatttgccaatctcgaattctacttagtacccttcagggtaatatatcagatcccacatatagtgatttgaatagtgtttaccctcggtattaatacagctaataggggagtaggtcattacccgctatcaaagggggtcaatcctctataacaaatctgtgtgttcattactttttcattctattcatttaacacgtggcaaacattagatccatacgaccccgctatcgattgatcactttttgaggtcaatagtttggtactttcatcaagagcctggatatcgtatctgatcaaatgtcattgttaatacgagaagaaccccagttgcaccatctgcatctttgggtctccctcaagacccatagactgcatatctaaatgcttaggttccacccacaactggaatccccatgaacactgtagatgtggtaaatcctatcctacaacaggcaccataagcccgcccatcacagctggccaaactgatatgagcatcctggtggatccaaatagcaagcccctgcctccaagggaagacacaccattggtgcctcccacagaaggaaggactcgtgggcaacagcccccaggaacaacaactaaatctcgtctctggtattatgctggagagacatgaccaagagttagcaagcatacgattggcaagccccatgtggacttagaaaaagtctcgagttatccagactcaaaggagctataggccaggccggcctaactgaagagccacacactactaattgcgatgtattcgctcagcaaagatgcaaattcttgaggtggatggatgaccaggattacatcctttgatctcaccaagcagaattagattgccacaattgaaaggtcagcgatctaataaggcagtttaactagagaacaagaggtcaggatctcatcaaagatccacttcaaggaagactcgttgatagattagggagggtctattgacatgctgaccaacctggttcttcgagaactaggacagatcttctcttgccaaaggaaggacagaactttcctcaaaggtctaacagcgagaatagccagatcctggcaactagcgacatggggggccagccagggatctttaactcagcagcaccccccattgttcagcctatggctggccagccaccagcaggagcacccttagccggccaaaagacagcactccctcctcgaggggagcgaggcacccaaatgtcaatcttcaaccaacaaggatcgggagcaggtggaaacacccaaaacggtaattcgagaagtgaaattgatcactttagacacctagattcactaaactctagcaattgatgtgatctacctcctgtcaacacacaaccaacatcagtcgaccaaggagtcgtgtgtggccagaccctgctctctacaggtttggccagccatgggagcattgcaggtggtcagaccctgccctttgcaggtttggccagccaaggacagcacccaagtgtaggtctggccaaccaaagccaacacccatacacgagaatggttggccagggtctgcaatttagcacaagtttggccaaccttcaccatacactctcctagagtatggccggctagcccctatctctctagaatctacaacccctctaaggaggttcattcagtcaagttcccacagtaacagatccttatgtgcaagcacagctggaccaactcagggacatgattcaaggcatagctggtccgaagcctttagatcctgaactagatcagtcaaggggatcaccattctcgacatacataaatactttgccctagcccaaattcaagatgttagtatggaagatgtatactagatgagaagactcgttggctcacatcaaatactttaagatgcaactcaatctccagaaggttattggtgatgtgcgatgtcgcatattcccggccactttatcgaaaatagctcaacaatagtacttcaaactcaccccaggaagattcaactcttgggctgagttctctcaagaattctacacacacttctcatcttcgagacttgtaccatcacagctagaagaccttatcaaagtcaaacaacgataaggagaacatttgaagaattacattcagaggttcatggctgaggctacaaaagtcaaaggcctcccaaaagaaggtcgatatacggccatactggggggaatactccaattgagtgaattctggaaagacatccggaggatctctaccaacaacatgaaggagttccttgatagagttgatggctttatcaaactcgaaaaagccatacgataggcccaaatagggcacgccaacaacaaacagtcacgagacatcctacagtctcatgacctattaggtgcacaggcagaaaccaataactctgcacaggcctctagtggaaaaacaagcgcaacatcaacagctctaggaggaataatggcaaaaatggtaagtttaacacttctcccatgccacagaagaataaggaagagaagtatacccacttcaccctcctgaccaagaaacctgaggccatcgtcatggccactcagggaacattcccctactgaaagccctttcctgttaaaagggagatgagcaagagggacatgttgaagttttatcggtatcacaacgattttggccatgacaccaatgagtgtcaaaatttgaagagggagattgaatacctcataaggtgtaacaatccccacctatgtcgttatgcgtagaacgaccaaacgcatgcacaaggtgtccaaaacggagatctaatgccactactaatggcatgacacctaggggttattcttggtggatcccacattacaggagagaccagcaaagctagagagttctatgctcggacactccatcacgagcctaaaagttatatcctagttgtcaaagataggggctctaagcaaccaaagcttatagagcccacaatctccttcaccaaagaagacgctactcaggttagtttcccgcacaatgacccctggtcattactgcacaaattaagaacatgaccgtagcaagatgcatggtggacaatggagcctcctccaaccttattttcaagtcaacatatgaaaagatagggctccagctcactgacctggcgccttacaatcaagtgatgtatggcttctttggccaaggcatcgcacctgtcgggtatatcaatacccctcacagttggagaaaatccaaccactagaactttgatggtgtagttcattgtgattgacattccttcagccttcaatgccatgataggccgaccgaccctcaatgatttgaaggtggtaatatccatctaccacttatgcctcaaatttccaataaggcatggggtggcatgtgtgaggggagaccaatagtctgcctgtcactattgcaacatgactctatccaaagccaagaaagagaatatgcccgccaagggcccagaagatgagcccagcaaaaagtaatgaagtccagcccaaagcagggacacagacatagatcatcgctttggggatcttagaagaatgtttcgagcctgtagaagagttagaagaagtggaagttgatcccacttttccaaaaagaagactgaagattaggaagggtttagcgtcataaattaaatcaatactgataagatttctaagggaaaacctggacctttttgcatggtcacatggagacatggttggaatcgacccctcagtgatgacccatgcactcaacatcgatccaagcatccaacctgttcaataaaaaagaaggttgatggataaagagcacacccaaacattcaaagagtaggtcgagaggctacgagcccacgaattcataacggaggcattctatacactattggtatcaaacccagtatcggtgcccaaagttaacaaaaagtggagagtgcatcgacttcaccaacttgaacaaagcatgtccaaaagcctacttcccgtttcccagaattgactagcttgtagatgcaacagttggccatgaaatcctaagtttcatggacgcatttaggttacaatcaaataaaaatgcatccactagattaggagcacactagcttcatgacaaatttaggcatgtactgctacaaagccatgcccttcgaactaaaaaatacaggggccacatatcaaaggctggtgaacatgatgttcaaagatctcatcaaccacaacatggaggtgtatgtggacggcatgcttgtcaagtctaaaaaggctgggggcatgtgaaggacttagatgaatgcttcaaaatccttcacaactacaacatgaagctcaaccccctcaaatgctctttcaatgtaggcttgggaaaattccttggcttcatagtcaatgctaggggaataaaagcaaacctagataagatccaagcccttatggacatgaagtcaccataattatcaaggaagtgcaaagcctaataggacgcattgctgcattaagcagatttgtgtccaaatctatagataaatgtgtacccttcttcaacattcttagaggtaacaaaaaatttgagttgacagaggaatgtgaaaatgcatttcaagagctgaagaaataatttgctcaaccacctatgttttctaaacccctagacaatgaagagctaggcgtgtacctaaaagtcatagagcatgttgtgagtgatgtcctcacaagagaagaagacggtgtacaacaccgtatatactacattagcaaaaggctaatcgacgccgaaagccggtacccactcatggagaaactgacttatagtctgctcttggcttctagaaagctgagaccttacttccaggcacacctcataaaggtgtacaccgatcaaccattgtagcaggttttgcagaaacctgaagcatcaggccgactactcaaatatgccattgagcttggccagttcgagatcacataccaaccaagaatagccataaagggtcaagcccttgcagacttcgtggttgagtgcacaaactcatctcttgaaatctctcatgacttaggagaaaatcaagacccagagaagaagtgagagcaagaacagcagcaaaatcctgaagaactaacatggaaactccacgttaatgaagctgcactcaccaattgtccggtgcaagcattgcccttataacacttggggtagcaactgcatggagcaatcaaatttggctttaaagcctcaaataatgaggttgactatgaaaccttaatagttggcctcaagctggcacatgaagtacgggctgaccacttggacatatttagtgattctcaactagttatgaatcaagttctaggtgaatacacagctcgaggtgaaaaaatggtggcctacttgagaaaaatcaaagacttactaagtcagctcaaaggctacacaatcaggcagatccccagggagcataatgctataacagatgcacttgcctgtctagaaagtagcaccattactgacaagcaaagttggtgcccatacagttcctagaggaacctaacattaccatccaagaaaaagtcaacatgttgctagatactccaacatggatgacacctattgcagcttacctacaaaccggagccttgccagaaggcaagaatgaagcaaacaagctaagaagaaaagctgctaggtatctaatcctagatggagtaatctacagacggagcttttccatggctctcttaaggtgtgtcaccaaagccaaagttgagcggctaatgatagaagtgcatgaaggcttctgcgataaccatactaggggcaaagcctatccaagaagatacttcgataggggtacttttggccaataacgatcgaggactcaatggactatgtcaaaaaatatgacaagtgctagagattctaaaaaattccaagagctccacccaacgagctcacgatgatgcagtcaccttggcccttcgcagtgtgggggatagacctgattagtcaactcccaaagggaaaagtaagggtagagtttgctatcgtcgcagtagactacttcaacaagtggacaaaagatgaacccctagcaaaaatcacctcccaaaaagtccttgactttgttgtgaaaaacatcatatgtcgattcggacttccccagaacattgtgtcagataatgggaagcagtttgatagtgacatgttcacggatttttacaataggtatggcatcatcaaaagcttctctattgtggcccatccttaagcaaattggcaggtagaagctatcaataaaaccttcaaggacaccttgaagaagcgccttaaggaagcaaaaggcaactagcctaaattgctcccagaggtcctatggttgcataggactaccaagaagatagccactaggaaaactccattcgctctagcttatggatatgaggcgatgttacctatagagctagtgtcaccatctcataagagaacaatctatgaccaacaaacaaacaacaccctactagcagagtcccttgacaaagtaaaaaaaagaagagatcaagccaacctaaagttataaactaccagcaaaaggtagcaaggcacttcaacaaacaattcaagaataggaaattattcataggagacctggtgctccgaagagtattcttgaacactaaagactcaacaacaggagtgttggggcctaattgggaaggctcctatcaagttacaaagataactagtatgggagcctacaagctggaaaggtacaacaagaacatggaacttgttctcctaccaagatactagaatggagagcaccttcgcaaatactatcagtcaccagcttacaaaacactactccaaagtagcaattctacctactcaatattagagtacaaaagagctagtgcccatggcctttttggtgtggtctcccaccgttcatcaacggtggcctctgctatgcaaggcaagcaagggtagctatttgacatctagaagctaaatctttgtaatgtaagcttataaattcaatatatgtgagttgcacaacagcaaagaccaatcaatgaataaaaataatgtttatgttctatttattgtgtttaaacaactttctcacaagattgacttcttaaagttactcttttagttccacatgcgtactatggatagcaccccaagaaagaacccagacaaggtttgagaaacttggtgaatagcaagtgactaagagacctgtttgaatggtcacttggggacacccatactatacaatgcatcaaactagcacaaagaacttatgtagagaaattgtaatgcttagaataagctactaaacctacctctaagtcgtgcgggcatactttgacttgacaaagta

SEQ ID NO: 162355 - DNA, 612 bp, Cannabis sativa
cgaggtaaagttctttgtttctaccactatctttctagtttttagttgaatgagattacgtttttaatatttgtcaaatttaataacgttttagcacgccattagagcatatccaatcaagtactaaaatagtagtgtatttaagcatagcaaaaaaatcaatttattcgaatcgggtcagagcttcaatcagacagatcacttatgatctgaaacattcggatgattgttagatctcggatctgatccaacttgctttgccttctttttcatttttattaatggaaaagcaaatggaagcagcagtatatgacgttacagagtcaggtaaatcaacactatttgattttttttttgtttttcccttctccattttcagtgccttgttctttcggttcatgaatttaaaaactttctgtaaatgtgaaagatattgatgttattgagcatttaatttaatttttattaatgactacgcatctcatactaaattattgaaattaattctttgattcaaacctagtttcatcaacgcttcttaaatggtaatagtatttggattttttttcataaatgtacaacaaaaacaacataattacaaaaaatgtgcaa

SEQ ID NO: 162356 - DNA, 3085 bp, Cannabis sativa
ttagccattttatcttccagaaagtcagagcaaacaacttttctcttttcttcaaagaaactctcttataatctccattgctaaagccatccgagcatattcagaaagctgcaaatgatgagtaagttgtctttcctctcctttatgtaatttcttttgaatacatgcaatattttttgatttttctattgtaaactttgtgttcttgaattattcttgactgatctaagagtagaagatattagagcttttaactttgactaagatatgctcatgtcttttgattctttaatttcttaccacattttgcttgaaattgtccaaattcacccattcgttggtttccaaagaatttatagatattcttcgtgattttaaacatttagatttgagaattccattttggaatgaaattccttctttttttatttgaatcgacccaatcggcatatcatatatgttttcctccttaattccccgtccagctctcacttttgtctccctcttttgtaggtgaaccctagtgagtactaggaaggtggtcatcatatcgaccaggatctccttcaactcctttatgagaatcatcttcggttaagtgcaaattcatcttcttctaatgaaaaccttttaaattctagttttgaagattggaaagtcagcagtgacccctcagaatccccaaatcccgtggtgcagcaccatcaatacccatactagatacgtggagaagggtataaccattttatctaggaattgaagaaaggttgtaggtgctatcttcctgcttcctggacgtatagggttcgatatggtgttgttgacacattaccagaatctcgaccaactccctctgccatgcatactgccgtagctgacgttgccatgaccgttgcgagacacacatctgaatcaaatcttccatccaaacgtagaatgatggcacaaaccaaaaaaaaaccacgaggaaggccttggcatctagcccgcactttattcggctatttgcaacaactggggtagaacaagctaggcctctaagtgaggatgctaaagttgttgaagtacttccctttggcggccacaatgaggctggagaacctgttttggtggcgggctaagactatgttaatgaggaacacacagaggctcaacctctaggcactaaaggtccaaagggtcctcggtgggtctcacccccatccgtgcttactttcaagagattcacgaatctctttgaagaagatctccttgggaaggtggaggccttccttcctaatcctgggcagctagcttcaaatcctagcagtggcatctaccatgttcaggtgctcatgctaagcatgatggaattctacttttgcatccatatttcaaggagatggtcaactattatcatatatgtccaacccaatttactcctaaaggcatagaatatctgactgtgttgttcgtgttgtacgctacataaggatggggtcagccatctgctcatgataccaaatggctgttcgatctgcaatcgagcccaaagtagaacaaatcagggtacttttgcttctcccaaaacgaatatcaccgggtgagtggtacaacggacaaggcagtgaccaagattggcaggttcgtcgaagactactactttgtcaaggacatgggtaccaacttgttacgaaaaattataaacaactgcgcaagtgcacataatcaagtaatactcacacatgtgaggtcgatcccacaaagaattatactgaataccactaaattagacttatatttctatttggtaaacaataatttttgttgaagataaaaacaaagaataaccagaaaataaaattaagtaatgaaaatatatttacttaacgataggaaattagagaagcggattctgttgatttacttacccaactgttaattctaattactattctctttcttaatgtgaatgacatattataaaaattaacttaattttttttagatcttttagattctaaatcacatgttatctaataatctctgaaataaaataacatataatcaacattaaacaataatctcaatgtaacttaggttatgcaaataaaatataacatcacattcatatctagtaaacaagtaaaagtactagtaatagaaacaaaacaaaaagtaataataatattaaaagtacaatttactataccaatttgaaatattatgttaatataagatagtataataataggataaaattgagccggttaccaaattttatcaaatttcatatccttacttcatggcacacatataaccctaagataccaaaagtgcacattctatatccatctaatggctaaatgatattgagatttcacatccttcaattcaaacatgattggccttatttattatatattacaaatttacaataccagcaaactttttggtgttggagtggattgtgttaggctgctaagtgggttgtacttttaattataacccttaaaatatgtatgtcattgtcacatcacgtacttgcttacccaatatatattttttaaaaaaattggaaaacttttatcatagcttacaattatttcttaaataatatgattacaacaaatacaatttttttaatgaagattaataatggtgcacacatatattttaaaatttttacggtaaaactgtttaaattttatcttttttaatacttaattataaaaaatgaaattttgaagataaaacctactgaaacctagattctattttgctcattacctttccattcaaaaattttacttaagtgacacagtaaactgcctacgtgtacacaaatgtacatatggtaaacttttagtgattcaagtaatattaattattaaaatattataaaatatataaaaaaaaatttaaaaaaaataaagaaaataaaacttttttcctttttcttttctttctctttctctttcttctcgaaagattaaaacccccccaacctaattgtgacaatcagtagtcccgtgatccgtaaaaagaaatgctgggtaagctgtgcaatcacacatcgccagggaaaggtcaagtgagatgattc

SEQ ID NO: 162357 - DNA, 3678 bp, Cannabis sativa
  modified_base (1683)..(1690): a, c, t, g, unknown or other
atttttgatggtgatgaacttgttatatatatggaatatgaatgaatatatgactcaaaccaaaaccaatgcatatataatataatccattgcacttgtacaccttcttctttttcacttttcatacaaccaacaatataattacaaacacatacacttcaattttaacacgcaagtaaaattaataatattttttttaaaaaaagaagaataagtcaaaagaaagaattgtatatatattgtttgtaagggtattttggggaatatggtattaccgtaccagaagagaagagaaataggtaaccgtagaagagagagctttgtaccttattctctccgataacgacacatgttttttttattttttatttttttttaataataaaaaaaagaaattcttgtgtttgaactttgaaaattggaattgaatttaataaaaataaataaataaataaataaaatgtggtggtcattgctgactttggaggttgtggtccccacgttgatgatcctagctggccccacctccttctccgtctccttctccaaaaatatcggccttgctttttttctttctttatttattgtttcattcctaaatatatactttttttttttctctctcttttgttaccttagtaacagaagagatcccagattttctttctcttgttttgtaacagggatgatgagatgaaggtcatctaatcttttcttattcttttcttgggtaagttttgtcaaagtttagttttttatttatatatatattttggggttggtgttattattataatggattattattattattaatgataatggaagatgtaatgatgggtgtttctttatttcattacttgagttgagtttgagttgagttgagttgagtgcactgtttttgtttgttagtttagcctttatatttaattaattaatattaattttgtttaagtttggggttattatttatctttgtggggatttttccaggctattacggaaggtggtggtattttgactttgaagccacaactttgtctttctgttttgagagaggaaggtgttgttgttgttggtggtggtggtggtggtgattgtaaagggtccaccataagaggaagagtgattagaagaacaagttgttgtcttcttgttgatggactatggttatggtagatatggatttaagaggattttccttttaatggaggtcactcttcccttttctttaacctcatctttaatgggtcttcttggtttcgaatggtttgctgactttttcgattgaaacaaaaacaaaatcccatttttctcagatttcctcatctttgatttcatttcatttttgttgttgatgggttttcacaactgcatgtcttcataaaacccattctgttgttccaaagccttctcttctcatcttcatcaacaacaagattcaattgaatctgcaaaagggtttttacaaaagaaaagtcttttgttgttgttgttgttgttgttgttttcaattatggatgaagagactacttcttggatcagaagagccaagttttctcacactgtttgtcatcgtttagattcttcaaaattggcttcaattccttttaccattcaccaagataggttctctggtttgaaatctagaccagccccagctcagcctcagcctcagcctcnnnnnnnncctcagcctcagcctcagcctcaagctcaggctcaggttcaggctcaggctccttctaatgagaaatcaattgcaagtagctctatatttcataccaaaaggctttcctataggaacaagcagagatctttatctcctaaccctgtgattaagctctcagagacatttagagaagctcaatcagaaaggaagagattctcaactccaactcctaggagatccgaatccgaaaggggaaggtttagagggaagttcttccatcacaacaaggattctcaatcgagatcttcgagtgcgaatgccagtcctcttaggcaattggcttcaatgatcaatgacaaatccaagaaccgaaaggattcgcattggtctaagtattttgatcccaatagtgggagagttactgctgtggaggctgttgatgaatggtgtgttgacttgtctaagttgtttctaggcaataagtttgctcatggagctcatagcagactctaccatggtatgtacaatggtgattctgtagcagtaaagatcatcagggtgcctgatgaagatgaaggtggagttttggcaactcgtttggagaagcagtttgttagtgaagtcactctcttatctcgactccaacatcgaaatgttatcaaggtacaaactttacattgaatttggctgtttctttatataaattgagtacccttttggtttgtattgctgaatttgttatctttatattgaaatttcgatgatgggacataaacagttcttagcagcatgtagaaagcctccggtttattgtgtcataactgagtacttatcagaaggttcactgagggcatatctacacaaactcgagtgcaaatctcttcccatggggagactcattcaaattgcattggatatagctcggggactcgaatacattcactcgcagggtatcatacatagagatctcaagcccgaaaatatccttattgatgaagagtctcacatgaaaatagctgatttcggtatagcctgcgaggaagcatactgtgatgctttaattgatgatcccgggacttatagatggatggcgccggagatgataaagcacaaatcttatgggcggaaagtggatgtttacagctttggtctcatcttatgggaattggtggcagggaccataccttatgaagaaatgaaccccattcaagcagcttttgctgtggtgaacaaggtaagtacaataaaacaatattaattggtgtcttttccatgttttaaaatgtttgtttgataatgacaatgtgtgttgtgttgtgtttcagaatttgaggcctgtgatccctggaaactgtccacctgcaatgaaagccttaattgagcaatgttggtgtttgcaatcagaaaagaggccagagttttggcaaatagtgaaagtacttgagcaatttgaggcttcatttgcccgtgatggaacattgaaacttgtcccaaaccagaatttccatgaccacaaaaagggtctcattcactggattcagaaacttggtcctgctcaatctcctaattctacatctactgcatcttcttcttctagttatactactgctactactactactacattacctgtgcctaaaccaaaattcagttgaatatatcatttaattgtgaaaatgttatatgacttgggcttttgtagtttgaccaggtcaattgtatgtaattaaagaaaaaagaaaaaagaggccttgttttctttcactgtgtgacattcaagtgagatttgtgaatgaagaatagattggcattggcattggttttgaattgtgttttattggtttagagtttagaacattctgataatatgatggggtggggaagaaatggaagatattttgttgggaatgatcacatgcacaagtggacctacatgttgtcttgttctcttcttttcttctctttcccttaaaattaaaactcttttctggtatttgttggtgtag

SEQ ID NO: 162358 - DNA, 2947 bp, Cannabis sativa
tttagattcttgtgtatatgttatgtgggttttttcgtagttaattgataaaatatcttagattcttaaacttggactttgatttgattacaattgagattttgacctgaaaccagatgagatttggaacttaatttgggagaattcgagaattgatgcccttgttgtttatctatgcttaagtttttggtcaaatgcattcttggaggtttatattaattgtgtacaactgattattagaaacaaagattgacttaggttgtcatgactcattgagtcattgtctattgttgttagaaaccgaatattgacttgaggtatctagctcattagtaggatcagcgaagctttgttgtcaaaaatccattctcatcattttttttttttgaaatatatttagattcttaattcagattgacattatttacgtatttattttaaaaaaaagttcagtgtgccaatcgcgaatcaattagtcctaaattggagccctaatttttctgaaatcgcacgaatgagacggcccttcatctttctgctgctgctgaagatcgtttattcttcgtgtacgggatgttttgccaatgaggaaacctctcttacctattcaaatcctaccaccttcgaacactatcgctcgcttttgcccgttatcaagtaagtagcagaaccgattcaattttttgctttaaatttttaaatttgttatttctgtatatttattttgattaatgcatttgcggtgttttgatcttcagcgagaaagatgtagcagtggcactagttatcgatgtcgatggagaaatgtatatgtgggactttaattcgaggaaagttgtatggtcatggtcctcgggatttcctatctatgctgcttatcagaattttaatgaaacgaatgcatccgagcctgtaattgagtacgctgatattgatgatgattggcagctatatttctatcgaagaaacccgttcacgaaagtggtacaccatttattttttttcatgaaaatatatgtttagttaggtttacttgtatttgtgtgtgtttggttgctgcccaagttgtgtttttcttctcagacaatcgagtctgcactgcattggtattttcatttctaaatcttatggttgcattatgagatttatgacgttttgtttgcttcagaaaccgtcaaaaactgtggaagactatattagaagtactccacatgtctcaaaagatggaggagtaacagtaggatcaaggagaagcaccgtttatcttgttgatgctaaatctggaaagttaattcggacgtataatttggcagatactccgtcagtattgagttttcagaatggggtggaaaatcaagttgtgttgacacaggatgcgaaagagttcatatcatctggggatgaagattctgaaacagttgaacaactcctttacatcacaagaacagactatgcattgcagcaccattctcctgtcactggaaaagttctgtggaatgtggcattttcagattttgatgctacttttaagtttcctaattcagggactgagttcggtgctaagtataaaggcgaattgcctcatgagattaagcctgtcatcctgcggattcgtgatcatagttggaagaagtctctttccttatatgacaaacgattttatggatttcctggtggtggacctctccctttgcctaatcttgattcagaacacagtcttgtcccggtacctttaggccaaatttcagtatcttccaaaagtactacaagtggacaattacttgcgctgccttctcctaacaatgaaaataatgggataaatgacagtggagttactgaaatgatcttcatgacccttacagctggaattgttgcaaggtttcctttacaatattttattccatttctgcctacacaaggttatggaaaatcgttattttattttgcctttttatttgccattggttttatctgttacggttatgtcaagtttaggaagcagaatgaactgaataagaagtttgaagaatttaaaacgcaagtccctgttcctaaaaagaagaaaactcgaagattgggaaataaaaagggtagtgacaataatgagaaaagcccacagtacaccaatgatattgatgactataaggctggacatgctgatgatgaaggaagtaaaaataacttcctgttgacatttactgatgccagcgatcgtattgatggacgtagaattgggaagttagttgtttccagtaaagaaattgctaagggtagtaatgggactgttgttctcgagggaatctatgacagtcgtcctgtagctgttaaacggcttgtgcagactcatcatgatgtggctttgaaggagattcagaatctaattgcttctgatcaacacccaaatgttgttcgttggtatggagtcgagtatgatcaagactttgtatatctttctctggagcgttgtatgtgcagcttaaatgacttgatttatatttgctccaagactttccaaagtcaagttattgccaatgatcaggatttagagcttgtagatgagtatactcttaacctatacagcattcagaaaaagaacaaggatgttgaattgtggaaggccaatggattcccttctcttcagttgttgaaattgctgaggtatctcttttcctatttgcaaatttactattattttgtgttttagagttattacgcttttgagtttctaatttaacatcattgaagaaggagagtagctcgaatggtcaagtatgtatgtggtttgcttccacaatatttgagatgtgagttcctctaggtacttaggtagcagttgttatagtttgtttttttattgggtaaatggcggcaaaacccccaatactttcgttttggtttcattaaacccccacaacccaaatttctgcgggtaaacctccaaaaccac

SEQ ID NO: 162359 - DNA, 1521 bp, Cannabis sativa
gaagctcaagccttaacaaaattaaattttctcccaaaacagacatatgatctgtaatgttcttccgccaaaagtttaaaaaagagcaaaaaggatatggaagctccagtcgtaacaaaattaacttttctcccaataacaaccatatgatctgtaatgttcttccaccaaaaatctaaaaagaacaaaaaggatatgtaaaaggagcatccgataagtgaagcacttgagcaatgcctgtcacttgaaactcatccatattcttgtgcattgcatgacgttgggagtgaacctctcatcgtcttacaagaaaaaagagccacattcaaacgatggatatctataggtgttttcaaaaatcgaaggcatagaggtcaatggtggtcggtcaaatcgcctggcagcggcggatgtgtggcttctctcttccctttcgacctttgctaaatcgtttcttcgactctctcgttacctttatataagagcaaaataatcgactgagatttaataaataagatataaaaaaatatcttaaatgagtagcttaaaataatataaataaataaataaagttttaaaaaataagtcacccattaatttctcataaattaaaaattctgttatagccatattttatatagaatagatatatgatacttataactaattttgtaataaaatactttacgggtttcatataactaataaaaatattcaaataatgttaatagtgttttgatatatcggagggtatttttggaatttcaaattcacagtacagaaacgagagagagaagaaagggcactgacactgtgctttagtatcgtcttcaaaaaaaatatttaaataataaaatattattttatgttaaataaaaatttaagctgataatttattttaataaaaatattattttttgtgtaaaattttgatattataatttatagagaatataaaattttagtatcatattttaaataatttaaagaaaatacataattctagtaccatactgtaatttttgaaattaattgagtatttattgtttaattaatatcattttaaattttaaaaatattgtttacctaaaaagttggcttgatgatgtggatattattttcgatatatggcaccattgacctcgtttctagctaccgatagtgagtaaaaaataaagcgattaaataagataaataaaataaagcaaaacattaaagtaaaatgaacaccagattttaaacaggttcagccccgtaagattagtaatagtctactccttttgtatttgtattgacttgagagaagaaataaagtgttcttcctctcgaaagctcttacaacggatctctgaattattttctctcttagatcactattctctcttgagtgtatttctagattaattctctccacccctccatattgagattatgtcactatttataagggcttaatacatgaagaatggtttcccttaatctataatgaataaaataagaaactacagtaattttataatt

SEQ ID NO: 162360 - DNA, 11635 bp, Cannabis sativa
gattctagttgtaagatatctaataaaaccgtcactggaattgagatctcattcaaagagaaagatatcaaatatttggagtttctttttatatattatatggatggatgctgccaaagggagtggtgatgccatatgcaaaaaggaagagactcatagaatggtagaggcaaataaacttttggttcgtaaacctcctacatggaggtgatgaagtcctatttgtaggacattatgcaatacaggttaggctgacatggacccattaaatgtttacatagtgttcaacccactaatggagtgattacattgtagcttattgaattggtttgggcacaaagcctaaggcccaaaggccaaatcagtaagtaaggcctactgtaccctagtgacttgccacacttgagccaccaattgatgtatgaggaatgttttatgtcgtagtgatctcaataatccctatattgatcacacttctttgccaaactcttctctaagaaaagacaaaggagacattctgtagatttggtaggatgatgtcagaacagtgccacgtcggaaacacgcccagaacacttgtggacccgagaagttctgtccctaggcaataccaataagagcttgccttaattgtatgtagcttaatgtcatgactcttgggcctgagcccgagaccatggtgagaagtggtctgcactaacgttctcggcctattgatgcttccttaaatggttgacttttaccgactataacttggttgaagctgacttagaccaattggatgaccttcctagactcaattaggcatttcgatcccggatccttcttcctgggagtgctgttcgcgtggcattgttttcagtgatgggtctacccttcttacagggcttcctcttgacggagatccacgtgtcatgactaaaggaaaactcgaacaacatataaaaaaaaaaaatacaagaattttttaaaataaatacaagaatatttggaataaataaataaatacacaagaatggtacaagaaatagttatgtagataatggttgtaaatgaaaaacccttttccacctcatacatccctagcaaacacaaaaaagggcttaaacgagttaagaccatcaattaccaaaactactcatctccaagacttgtacgacatatgcaagcaaataatacaagtacaagtgtcttgtcaaattgatgactagtaggacacagtagaagaagccaacttggggaaaggggggtatccaataaatgtgtaaatattatttatggtggtagccaagtcggcagcgagaagccaaaataaaataaaaaacagttgtttaccttgagccactcatcatatatagtacattttttcccctactgtagccattagccacatcttctagtcactttatatctaaaacaaaaaagcagtgagagggcgacagaattgggcatatggattgcggtagtcgtggactacattggtaccttccttttcataagtctaagaagctggatacggtagagcttttatttatgagcgctggttttgtgtgtggctctgttttcttatcccaaatataaaacaacccacaacttgtgactttttcttaaaacctatcatctaatatctacaccctgcaatatttgcattatctttaacaagaatgtcgagtgaggaaagaaacttgcctgaagtcccagaatggcctgagtttaaaattcctgaattgttgtccactgaaaccgtccggcaactgcatgctaccatcgaaaaagaatgggatgcccttcgaaggtcagcatgtcaaacggctgctggacgagcactgtggaaacatgtcactcatgaccctttggcagccttacttgctggagagacttacctaagaagccttcatgagaagataaagaaagactgtgccaacaatgcaagtgaaatctctggagttattcttgcagttagaactctctggttcgattcaaaacttgaagcagcccttcattccttacatggcacagaaacacaagttgttctccttggtgcaggtaaatgataaacaccaaattttacatatattaacagatagcataattgtactttcacatatcttaattagtagtacatcgacaatgtttacttaatttgtcaatcttgtttttcttctaaatgtataggaatggacgcaagagcatacaggttagattgcttgaaggaaagtgatgtgtatgaagttgatttacctgaagtagttcaaatgaaaaccactcttttgcaagcagcaatggaatccccaaatgaacaccaacatctgaaaataatggctaaatccttaaccagagtgtcagccgatatcaaaggtaacgattggttggaaaaacttgaaacatcagggtatgtgcctgagaagaacacggtgtggatattagagggtctcctttactaccttactcactcacaggcaatgcaggtactgaggataattgctgataagtgcacaatgaccaacacattccttttagcagattttatgaacaaaccctcaactacactttccaattccatcttctatttctatagtgactggcctgataatctcctgccatcacttggcttttctcgtgttaatctttcacaaattggtgacccagatgctcattttggactccttcataacccttcaaatttgttcaacaagctccgcagcttgcctcggtccatacacaccaatccagatggaacaccttgttgtcgcttgtatttagtgcaagcttctggttccccaaatcaaaccctagagccagcagagttaaggttaaatatctctacatagctccacatcctgctatagtcagtacaaatatacatgcaaagggataccttgctatcacttgaatcaggaggatgctttgatcgcccagttcagagtcccatatggtacgggtcaataactgttatattatagatgtgctagatcatagtaccatatgtgtaatctcccgattaaggcgtaggcataatgggcatatataatctttcgtagtcttgtgtaaggaattactattcccatttgaaagaccgggaagcaaatgtgcaatgttttcctcagaaattcaagtgtaaataacgctcattttataaacatttttttttattacctgtccttactagataatataacaggcagaaataagcagtcaattaatctcaatgcatagaaatagttccatgaaggttaatgtgggaagtcacgcttatcagattcagaagctctgaaccacttacttacgagctagctatggtgatcttataaaataaaatataataagcacaacgtgaagcagcattgcatacaagattatacgtcttcttcgaacaacgaaagccataagccctcaggcaagaaaggatgcaattctaattgaataaaacctagtaaacggaatttttacaacgactgaatctcaaaactgactactcaaaaaagtaaataactaaacaaaaaattagttttgcttttccttaaaacagtccatgaaatccagtcagtggtcagctagagccacacccctgggtcctagaaagttaacaacgcccaagtgcaggttttaactggttgacgaacataattagaaaaacatcactctgaaataggtacgactaaaacttgccttcatttcatcccatacacgaacattatatagtgaaatttgaaagtttagctgtgtttctaacttaatgtttcctgtccgacattgaatgatacaaggtacattttcgagttcaatgagtaacagggagataccaagcaatgaaacctccaccacttccttcagctcttcacaataacagtaccaaattaagaagttcagccattgtcaagaaatggtgaaaaataaggtaattcaaggtaaataacacaaacgagagttggaaaaaaaccaattgcatcaaagaaaacagcacatcatctgaatttcaagcatgatatccacaacaacttgtgtcaaatttcgaggcagtctttaactccttgttcaaatttgtcaaggaacgagatagcatttgtaagtgaatctgctatcctctgtctgcagtaaaatattacaacagagtcaatattgaaggagcctattcttacatttcaaaattagtttacagggaacaatgttgcacacctacaatataaatctaatcaaatatggagggaatataacaaatgcttaccagtcaaatagattgttatgggggaaacccatataaacactactcaaacagactgaattaataaatttgacggcaatcttattctacatgagaaatatcactatcaaaagactcaaaactgttcaactgtgtgcagtatgcactcaataaattgttctagacaaatttatcaagactcattgatgaaacagattcactcacttggtccaacttaaaactttataaacatgattgaaagcaagaaatacactctcagcatacattataaataagaaagaatctcgatatatgttgactgttcataagtgagagcagtaataactaataatgcttcagcactattccaaatagcaaaactttaaatcctaagaaaatttaacacggagaagaaaatttctatgttgaattcttaattatagttcttcaacaatttgggtaacacaacaaaaagttaaaaccattaagaagctggattttaatgagtttaattttatatattctcccacacatacatagaaaaactggtagacactcatactcggctcagaaaaataggaagaagatgaatagagaacttcattgatcagaaggaaaatagaacaaagtatgttgcgactgtgtagaagttagttacattcttttaggttgttgttagttggttaggctagctgttagttggttatgacagctatgtcataaaccactttctgttgtaactatttcctactgctcagttgtataaaatcccttgaggtatgattcattgaagtttatcgagaaagcttggaaactccacagagaaatcttttctctaaaaagttcaatctgcataatctcttctaaatgcaaagactaactatttataggccatggctaacaatacaactaactagcccaccaataggatacaaggaagcaaactgtacaacacatttaaaatagaatagcttggtcaatgtatttaataaaacagcacacatcaggacagacttctcaaacaccccagcacctaactaagcccaactctatgtcctaggtcgcctagagtgtgtgaatctaacataaacacacaataagaaaggtccaaaacaacacttttaacaagattactatattatgcttgttaaaatttgtgtcaaaggtttcttgtaatcttcttgagaaatttacctttcagatggaagttgtatatctgcttcatttgccacagtttgtagagaactgaaagatctgcaacattgaaagcaaaaaaaaaaattaaaaaggtaataacatgcaattatacacaacttgtatccaagaaaaacttgtttgtcctttaattctaaaatattatacacgaattaaaaaaaaaaaggcttctctaacaaaaaaaactatggtctgaggttcaatttagtgtattacatgattgcaactgcaacgtctaatagtgtgttatcacgcataattttggcaccttgaagcttagtgtctgatggaaaaaatttagacatttcttgtttaatatttattttgtagcttgaaaaattatgagggtatacaaagaaaaataatattcctttttcttttctctcctttttttgggaaaagttgcaaacattttaggggctgaaaatacttgggcattagagtagcagggcgtacccttcagtgttgcaacactgaaagaaaaggctactttaagcatgtttggcttaagcctcatacacctcttaagcgtcacaacatacgtgatgttagagaaaggtaactagttttgtgttttgtttgagaaggcaattttgaggcgcacctcaatttgagtgatggaaaacctaaggtacggcactgacatttcattttaattcaaacatttacttttatgttatgctttattatatttaatcattcattcttgataaatttaggtatctcataaatatttttaaattaaatatttaaggctttttgaggcttaaacctcattacaccatgaggcttactccttgcctcacaaagacaaatcaccttgacgcttaaaaacacatttctgaacattgatttagtgtgaaaaaattaccaatttttgaccaagcctataaaaaagaaaagggtggccgacttttgcacattttagagagagaaactacttcacgaaacctagagtgcgaataacaaattagagaatcaaaaccttaacgattggaggaatttttaccaagagttttcatcttctaaattctaaatcttttgttttcccttgtaaactatataatgatgatgtttaaaccagtatcctagaatcaaatattaaattgttcgttatattctatgctacttgtatctaataacctgatcactaattagattgattaggaaacctgaatgaacatgagaaaaggaattttctgttggccttgaatacaatgatgtatgatcactaaacaatcttggagttttacgtagtataagaatataattgtatggcatgcataacctttgtaagaacccatgcttattgagtttttctttagcatgatcttgataagagcatacatagttgattgagcaaaatagttttgcataaccatcatgaaaaaaaataaaaaaccatcgtgaaaggtttaagaattatttgtttatgctcgcttttatttttaattcacttatattgtttcaactattgggataagaatgagaaaacataatttttagtacatgacaaatttaagtgataatttatccataggacaatactctactttcactttattactttttacaataagcgtgcacttgggtatttttgtgagacatttatgcgaactagaatgttaaatcggttcctttggattcgaaaattgaacaaatgttgtgaggtttttttttttaagttttttttttttaaaaaaaaaaccaaaataaaggccacatttcataatttccaaagttaatgtcgctttaacaaacaaatatttaaaataaagtctgtcttggatccaaatctcaaaagaacttggcttataatgctaacccaagtataacttgaaaaaaagaattatcatttcttcttttcagtggctccaccaaatcgaggattttggcaagaaagaaatcaactacaacaaaatggttgaacaccatcaggtggagaatacaatataactaagagagtatgttgtgcccttaagacaaaaaatggattaaacacaatagcacgactcgaaactcacacaaaataaactagtttgaatttgggtcattgaaatgactcactcgtttaataaacgaatcacttttgggttgacccacctaaccagatttgggaataattgaaatctctcatgggaaaacaaccttggctagtctttaagaccacaaaaaccacctagattcccccctcctcaacgtgaaagataacttttaatgtcatgcaacacatgaaaacagatgcccatatgcagatcaaagtcacaatttttcaaagtcaagctccatccttgagaacattaaagaatcaagttggccaaattgatatagtttgttgaatacaagggctcaaaattatttgccaagtaacactgaggctaatcaaaagactattggaacaaagaaatgtaatgcaatctcaaggagtagtgggcaataattgcaacaagctagaaaaagaatattgaacatgaacaagggaaaaatgaagaaagaccaagtgagggataccacaatatgacacccaagcctaaacagagccctaattaccaccaccacctttcctcatggcttacaaaagaagaaatcgtggcaacaatactccaacttcttggaagtgtttaagaagccacatatcaacttcccgtttatcaatgctttagctcaaatgccaagttatgtacagttcatgaagatcatttaagcaaaaaaaaaaataagtgggcggagaatgaaatgatgatatagaatgagccatgcgacgcaattctacatagaagcttcctctagagcttaaatatccaagaacttgtcattcctggcacaataaaaaaatcaatcttttgatagagctttatgtaactatggaggaatataaatttgacaccttattcgatatatgagaagctagggtttggggaaatacaaccaatttctatcacactttaattggcagatcaatctgctttatccaaggggtgttcttgaggaggcgcttctaaaggttggttggattaatattgcaaacaaactttattgtgctagatatggagaataatcttgtgctgctggttttgtccagcttgttttgttttgttctgtttttgaataaaatcttccctttgttcaaaaaaaaaagatatggagaataatcaaatatgctaataattttgggtcaatcattcttagcaactcagaatgtagcaattcttgcacccaaccagtagtggcaactcaaaaatggaagtgacatgtgagaatgaaaaatttcacgtttttcatcaaagcccaaacttaatacttgtatgtaagtagatatggtggaggataaaagaagtcttgagcactcacttgataccattgagtgtaatgtctattcccctaaacctcaaagggttggcctagtggtaaagggtcttacctgggataagttattaggcgtcaatatttgaggccattgtggcagactcccactcgatgcatcaaggcccatgggataagtcaaggtgtgcgaagttggcctagacacccacagttaccaaagaaaaagtgataggatatcgtgtaaagcatatggggaggacaaacatggcctaattacaccatacatatatgattgtcagagagaacttcaatgacaagcatcaagaatttgaagaatgcaagagtccaactaattggtgattgatgatatcaaaggaagaacctagacattctcaatagtacgtcaagccaacgacgctaaataaggtgcttcttaggaggcaagccaaggtcttttctttagtttctttgttttcattgttttatgttttgataaaagaagcaagtctatttagctaccacgacaccaacaccttcacttaagcatcgcgacaccaaaacatgtcgtattcttacgtatcgcaatagcttctaatgtgtcgcaatagtgcgacacgttgtaaaattcctagttttccaagtcatgggctaagtgtcatgaccttatgtcacaatgttgtcttacttctataaagaagaaaaaaaaaggaataaagaatgaattgggtttaagaattcacttccttaacccccaaccaccataaacatctttgcccaacacctcttccgtttgagcactaccaataatcaccccaccattttcctagacccttgactcttatcttcggttacatgcctttatgcaattctccaaaaaccgcaacctctgtctaccacttgtatattcaaaaaagtaaaggattgggttgggttggctgggttgaatggtgtcccttgaacgtattgattatgagtttacataaatgttaactttcttttttgtcaaataaaaaaaaatgttaactttctttctttgttatgtctcatcctttatttcataatccaagagtagacccaaagtctaacgttacaagaaactagtgactgaaattgttaagtgtcactgacgcccccttagaaacaagtaactagtgagaaagatggcagattttttattatttgagtttctctctaggactatacttttactttattatttgttgttgtgataacacgatattgtgttgtttgaaactccacaccaacatcctacccacacagagtaattgtctaaattgctgatgaacaatcgcagtcaagatggaatgtctaagtaatcatattcatatcataatataaaaggcagtgaaaggctcagtagttagtaacaatgaggtcaataaagcgtatattaacagtcatatatagcatatattcagtagtatggcatatattaacagtcattaccttataaggtccgccaatatagcctcggcctctagcttaagaggatccttatcgcctaacaacgaggctgcattcttcactatcaaacgaaatgtgcaaacctgtgcatccatataaaattgaacttttcaataattcttcaaaaaaaattgtctttcaatttgaaaggcgtaaactgagtataactgcataattattctattgatacactttcatttttagaggaaaaaaaaaaaggcattataaaacgatatgaagatgacagtaaggaataacctccactcctgtattggcttgaaacgcaacaaacgaattcctctcttctataacgcaatctctggcagcagatctcaacagactctggatttcctccatgtccttttctgaataatccgaatccttagcatctgtcggaaacaaaacaaattaactctggtaagacacatacatgttacattataagaaagttacagaaacaaatacatatatccagtgtattccatatatgagtagagagaggtactgagtaagagataagcggaacggagactctctcgcgaggcatcgattggagctaatagaaacttagaggacttcttcttttgatccttcaaccaatcctttggtcctgctgcgtatggatcaatcatcatgaaattagggatttagcttaaacaacgcgagaaaatcagaaagaaaacagaaaattgaggaatttaaaaaaaaaaaaaaaaaactaacaaatgccgattgagaaagcggtggcaggtgcgggtgtactgagagaaggaagaagagccagaaatgagagggaagctaggtctctgcgagaaaatttggggagaggttgaagatgatgatggtgttggagtttgggagagaagaagagtaaagttgattttgaatttggagggaaagttgataaggcgggtctccactgttgtacttgtactaccatattcgtcattgatgatttttctttttttaatccagtgaagctttttttttttttgtattttctttttctttctcttttaatataataatatattatattttgcctactgccaccgctaactgccgcagtgttgctcagaatagaggtgttttggtttacggaactaatcacgtgcaggtcacgtgacgttatgagagtgtgggggagagtccaatggaatcttaaggacacagtggatttgatttgatgatgaaatttgtgttgtttatccatttatggagtaagcgggtaacgataagatgtctaccacaaccgaatacgcagtcaacctaaactcgaaatagacaaagatcacatgtggactgaaacggcagccacagcatctccaattttaaagggaaatttacatggtatactaacttttgttatttttttataaaaatacagccaggcggtattttttacttttt

SEQ ID NO: 162361 - DNA, 1566 bp, Cannabis sativa
  modified_base (1522)..(1533): a, c, t, g, unknown or other
ttttttttttttttttaatctttagcttctctcttgttttccctttcttttatttgtctttcttttcaattattattattattattattttgttttagaatctttgaggctcaccctcctcgattatgcgagcggtagaagaggagagagaaaataaaagagaagactattcctttctatttttgatttctaattattaaaccctttcaatatttacctcaatattctgatttattataattatttttttgaaaaagaagaaaagatgtgaccaatcaccaatatctaatacttttaacggaattttccttattaaaaagaactagtacataatattttaggaagttgtaattaagacatgttgacttgtaaaaaaatagaattggtaatcagtagtctaaaatataataatatttatttagtacccattactttaaaattatatttattttatattttagagtcaaatttaattaattatatttaaattgcatttactttatacaaattttaatgtcaaatttaattatctttataattatataggaaaaaataacacaaaaaatacaaaactaacttttattacaaatattccttcacacagttaaataaacttttgtaatttttttaatgttttatttactaataaacattttgcacatgcaataaggatttttgcccagctcccccactaaatccaactgtcattgaagctccattgtacaattttatttttttttgctttttttacttatatcaatttccatatcaatagttattacatgttccttttcttcttcatctccttttgtgaaagaacccagtgtttctaaatatgcaacaatgggtgtgaaattgttgagcaaaaaaggcaaagataaacgaattattgtggaagaatatgactctaacgaaaattttatttaaccagcaacaaaacatgaaggtcgtcctttgaagaaattgaagaggaacgaaggtgataaaagttctataccagaagttaagaagggaaagaagaatgtcgatgaaatacctaaggttttgttttagtttcttttctattttgccctaatttagaaattttgtctttattctttttagtgtttttacatgtgatttcggttctagggtttcatacattttatttgttttattgttatattagtggtaggttaactgatttagaatattgttcgatttaggttattttttagttttttcgtcataaatagttgttcattgttgtatttttttcattcattttagactttattttgtaatgagtattgtagatgcactcagttgaaacatttggcctttaaagttgacgagtcaataatcacctgcaaatctacagtcttaatcgggttcagtggtgagcagaagcactcgattggagaggtcaacttgcatgtttgggtagaaagagtaactctctaaaccaagttcatcgttgttgattgtccttcttcatataatgccatccttggtcgaccatggtgttggaatttattttacnnnnnnnnnnnntctactcacaagtatgttgtttaccaccctaaa

SEQ ID NO: 162362 - DNA, 971 bp, Cannabis sativa
taaagctgcatatcgagcaatggaaaatattacttgtgagttggtttggctattgtcattgctaaaagaattgtaaatcgagcataaaggacctgcctttatgtattgtgataacaaggatgctcaacatattttagcaaaccctgggtttcataagagaacgaaacatatcaaaattgactgtcttcttatcagagagaaggttaaagaaggcttgatcaaaactgttcatgtcggtaccaaagaacatgtagttgatatcatgaccaaggtacactttcctaaccagttcaaagcacttaaagacaagattagattagttgatatataccattcatcttgaaagggagtatcaagattgaattagttaggaagtgtgagtgttaattttcagatagttgttagagtgtcttttcagttagttttcgtaactaacttactatacactgagctatataagctccactcttgtacctttacattatgatcaattccaatcaatagagaatattgtatactatatttttctctcttttctttctgcaactaatattatcattgtatagtgtgctgatccacatttatacatctatttattttgtaagtagttttagtccaattgattgtttatatcggaggcctcttgaaggtggtctcaagctattttatttaaatttccaaaataatttggttgtatatataagacgttttgtttgtagtaactcatattctgactttatatatcttttagctagacaattaaattattggctagaagtttatctgcgtcgtcgacgatagttatttattgtacaacatttatttcaaaaagaatagaataatatgattttaaaattaaaataacttcaccataaatttatgctttattagatagatatggatagatttggatgagtatataatagaagattatgtatatactagcaaaaagctacgtgcgaggcacgtat

SEQ ID NO: 162363 - DNA, 1959 bp, Cannabis sativa
tgagaaattcatgggtcaatttttttattttttttaagttttctattaaaaataataattttttccaacaaattctcttaatcaatttatttagctatttaataataggatcatatttataaatttttggccgatttcagtgaatggcataacaaaattaaacacgactttatctccaaattcagatttcatcctctctccaaattcagatttgtgttctccaaacgtaaagttaacgtgccgtttataatttgaaaataaagtcttgcagccaatcccactcccaatccgatttcagtgaataacataacaaaaaatacgactttatctctaaattcagatttaaccctctctccaatttcagatttgtgttctccaaattcgagccattcgcttgcaaaaagttagtaattctggccccgccgccactattgactcaactcccttaaacgacgatcttattccaaacttcttctacaaccaagcaaaaatgtatgttctttacatcattcttcagttttaatcgttgagcggtcttaactttttttcttgagagaaatttgaaactgtcaaatatacgagagaatttcttgtatggagaatcataaacttggttttgggagtgttttgaacaattgggaggagaaaaaattaatctctaaaggggtctttgtagggtcatcaataactctaattggccatcgtcctcggcaacaacaatcgttgtcgaccccctcaatcgtccattctccaactctgccccagctgtatttgcagtatatatacatatataatttatttattgaataatttttaatatgtgggtagctccttcattcactccctcatcagtcactctgtaatctctctcaattattcataatttaatcgcaggaaatttttgctttcctttatttagagttttcatttattaacttaatgggacaagttcttgaagtcagattgtgacgcctttgtatttagaagaggtaaattcagttaacaagtttatgcctattcatcttaaaaaagtttttcagctcagtttagtttagtttaaaaattccatatcctataattcaaagtaattgttcaaaatgtaacatcaaatagtctaaatacacgtggtcttgaagatgcaccaataaaatatgactgcaggtagaggagtggaagttttagagaacaagtcatttgaagatgatgtatttgggaaaggctggtatacatgtaaagtatatcatctacaaagataagttaaggatagacattacatattcaaagatttgatattggctaaaattggcatgtgaaattagtctagcacatgcttaatatcattcattctaggaaaattcatgattgttgtagctggaattgataataagtaaggaattaattctctggtgctatatgtgtgatttttatatatgactaagatattcactataaaattaaaattatttggcaaggaaaagttgatgtcattaatgaattatatattagttgatgtcaagtgaacaatgctgttttaatctcttttcctttgttttctaatcttattgttaactttgttttcagctgttaaactttttttttaataaaagtttgctaattaattccactgttgggactgtatctccacaaattatctgttgttttatttataccatattgcttcaaagacagtgtaacgaagttttcatttgagtctcttatgtttgtactctcattccagtaaggtttctacttggtttactacttttgaaccaattgatgctcttatcatgcaagaggatgcttggaatgcataccttgaataactaataactaataatattttttcatcaataattaattatattacttttaaataaagtaaaaaatacctaacataaaatttaatgtacgtgtctcgcacgtaattttttactagtatatatatatgcaactatattg

SEQ ID NO: 162364 - DNA, 4685 bp, Cannabis sativa
gaaaaagaaaaaactagagagtatgtagggttttccatagtagggtccattgtgtgtaagtatatgtagtaaaagagttaaaccctattatatatgagtaatgctaaaaggtaaagtgtgagccttggaaaatgtttgtaccttactaacctctcctattaaggagctcgttcttcttaaattgaggagttataaagttcaattaggacagttcctctctccgattggtgatcggagaataacattcgatacaatttcttattggtctcttagttcggtttagtgctttccgtcgatctcttagactgctaaaatagttgtgtataggtatctgaaagtgttattctgttaaggtcacttttaattgtattgcttatagtatttattttagattgaactagttaaatactaagaatttaaatagaaaagataaagagtattgtaagtaactttatcttgtaaaaatgttgtttgcgatcaacaaattttttctgatttaccaaaaaaaaaaaagaataaacatattttaatttaaaaattatcacaaaatacttttaggtttcatttaaattcaaggtaatgaaaatgaacgtaatctgcattgaatgttcgttatatatagtgatataataaatttttttatatattttaaattttattttattatatattcttattaatttttgtattttcattccttcccaccaaattaacgtagtttcataaaaaataataatatgggaattgtgaatagggaaaaggtttgatggatggagtgggagagagaggggatggacacatcttaactatgactttggagcttaatatctatttgaaaagaacatgtgaaaccaccactatcccacaaaacaagcacacctctcactatagacactatatatatatacctctaatctatttaattaattctctgtggaacgtcactacttttacttgtgcaaccacctcaacgacaacaacaacaacaacaacaacaacaacaaaaacattaacatatgtatatattgtatggggtcggagatactgagctatcattcatggtcccatcgacgaagaaagatatcatgataaatatatatatatatatatatattcctaaatagcatgatatgtaccttcattttctaattcaacttcttgtctataaataactatgaaactcatctatacatctcatttttctaattgcaattcaactagatagctaaccaattgtattgggtccaaaaataatttttgggcccaaattatcgaggtcggtcttaaagtatatataaggcttaaagaaaattttttttgcaatatttcttttgtgtagtggtgaatttttttaaaacttacgagttttaagattcaatcctttatatgtttacacattaaatatttctgaaaaaaagtttaaaagttgaaagttggaaattgatgtgatgacttcttaacctaaaataacaatctctactactaaactaaaaactatttcgttatattttttttatttaatattttatcgatctacataattataattatttttttgcaattttggagccctaaacgtttgggaccccaaagcgtacagttgactcaccgcatcccatggtcaaccctacttattataagaatacatattggtatcttaaaaattattgatgaaatatgtgcattttcaaaagattttttctattaatttgagcccgtgtaagccctaagcgcgtacctaactcgccttagcttacaccaacctagtatattgttggtgtcataataagtcaattaattaattggtcatttaaactataaggctttatttgaatttggattttaattggtcaatttatagtaggaaaaaaaaatggataattacatcacatactgaaatttttaagtatattttacttttatactgtggggatggaattttttcaaaaatactgtgtaagttatatacaattaatgtactgtgttaagttttcactgttgttctacaattgttttttagttgttctactattgtttttaattgttctgttttgtgttccactattattttataaaaatacagtatttttaaaaagatttctgtgtgacagtatttttgtaaaaatcaacttaaatttcagttattttgtaagtttcctaaaaaaatattataaaatttgatacaagacctttttcaataaaactatactattttaattattaaagtttcaatttttctaaaaatagaattcttaattcatattgattcaatcctttgtatgtcattctttttccctcttattaaaatcaaagatccaaacaaggcctaaatatttgatatattttaattttgaatgaatataaaaatgttacttactttaatgatgaatattttattaatttatacaaatgatcaatgataggtacacttaattaagcacacgtttaatacaatttatatattctagcggctgctaaattaattattgcataaaaatataataaaattttaataagtttttttttttcttatatactaataaaacagtgattttcaaaatttattttttactttttttattatatttttcaactttttcttttgtccaatgattttcttatacaataactactgaaccttttgatatttgatatgagagattagacaaagaaattcgtagatcaacaaagtcttttctattttatatttatgtaatatatatataaatattcctctatagatctactaattgttataaatatatttatatatataatgaaaagtatagtttaccatttagttgtttgatttttttgttgcatgagatgaacatatcgtcccctttaaaagggtttggcccaaggggatatcatatcaaaattcgtaaagtatgattgcctaaaggggaacacttattagagttatatatatataaatatttatatatatacttatcaattcattaacaagtggttgatgagagagagagagagaattgcgtaaaggaagtaaactgttgttaacttcactccaataattaatttagataaaccctaataatatttggaacacaatataaattcaatgaaggttattgataaaaaaaaacatacatatatacatatctatatattattgaatatttacatttttaatgtaattatacaatagttacccggttttgagattggatagatcttaaaaatataaaaattatgagacttttattttttaaaaaaatcattgaaatatgtatatttttaaagaaaaaatattttttggtcctttaggttgggtgggccctaactaggcatggcctaattcaccttagcccatactcgggtttgatgcttatatctttttatgaccttctataacaggttactaactggtaaaatttttattattagactcaaaataattataattagttatatacttaaaataaattaattttttaattaaaatatttaataaaacatttttcacaactattgtttataaatattttttatttttatttataagaaaataaattaaatcaggttagtagcatgttataggtaatttattaattatttgtatttaatttttaaattaatcacaatagttaacaataatccaaccagtaaaataaatataaccgtcgtgattatatatttgatgcaattattaaaacctcctcaatataataagattacattttgtgagtagtaaatagaagaaaacaaatcaaacatttataagattattaaggtattgctgttttgactttaattaaatggattttaggatggaaatcaaataaataaattaatttctagttattctattttctaatattttgattgaatcaatattctatatatataatatatttaaatcataccaaatatagcattataccaaaacatattatagggttaacttatggcttggaacgtagttaagtgtaatataaattaagaattaaagtttatgaaaatttaaacattcaggcaaatatatatacacattaaaaattgaaatattttctattatttttattcttatcataaaaaatttccttactaaaatttaagcttttgatcaatgacgcatcattggtggaatctgccaaaaaattatattaggagccaaattaatacatattagaaaaaattaatgaaaatttatttaatttttttacttgtagcttaaaaaatatcaaaggcgacactctcctgcaccccaagtttaattattgggtaattaaataccaatttgaattctgtattttgtaaaagttatcaattagactctttgttttgttaaatgacaaaacaaaccctctattttctaaaatagtacaaatatcactctgaactgattttttgtcagaataaaatttgataattatcctatttaaagatgttatgaaaaaattatttatattttctgtatctgttcgtgttaggaattgttttcaaatatattaaaaaaaaaagttgtcaaaatttatataagtttagggttttaattttactattttaaaaaataaaaagtacattttgtcatttaacaaaacagatggtccaattagtaacttttgtaaaacacatagttcaaaatagtatttactcttaattttttaatattcacatttattattttttttattacctttaaagtgtattcgaaagct

SEQ ID NO: 162365 - DNA, 1170 bp, Cannabis sativa
tgaattttaataaaaatatgaagagatttgatgctacctctatggttttcgatcaatggtttactcaaaatttgatttttcaactatattaattgatggttttcgaaaccagatatattttaccgaaatatttttagtgagtcataataaattttcactcaattatttgtttaacataatttgaactcatcaaattttactactaattaaattatttgttatatctttatttttttgtaaggatttttttatcattattagctaatatttttcataatataacaatgacaaattttgtcattttttttctattggtgatagttttttattatgtttgccaaatattttaatatgtaagcattttttattttaatacaactcattgattcatgttttatttttattttttgaactgatcactcgtactgattcatgtttcaaagattattttaaagaaaagtactaattaataaaataatgttagaaagtaaaaataatgaagaatataacatgaatcgatgaacaatttcgatccaacattattttaaatatataattataattttaaaaatcttattgctattaattaatttaattattataatcaaaagaaaagatggaagaggcattcatcagccttgccagttaaaaataattaatttatttttaaaattaataaataatttattattaactgaggcatgacaacacacgaataattaaatagtaaatataattattttatagcaatttggctgatgatgtcattatgtcaaaattatatgacatcataataatgacgtcataaattcatgtcaacatctatttcgaggctctaaatatagctatcttgtctgtacaagtttgtttttgctatttatttatttattatttttttgggacgaatgatctaagaatcaaaattacaaaaatatcattttattaattgtaattggtatttttaaaaaatgaaaattaaagaatgagaatgagattttgatatgacatggtaggcactaaagatatttctttttgttttacaaattttagatcaataaaaaaatacttgaattaattgaactagatttttttttaatgggaatggataatttattagcaaaccaaatccgcaattacaaaagatttaagagtactaggaagagtactctc

SEQ ID NO: 162366 - DNA, 2073 bp, Cannabis sativa
aattaattaattagtcctaattatgtataactaatttataaactaaattaattaatgtgttaataactacttatatgaaatgacaaatattataatattacacttgaaatcaactatagaatatacacgtatatattgtaaattattggatatgatcatatatgatgattcagaatcatgatgaaattaaaaaaaaatatatataattaatacagaatggtcactgtcgtttgacatgatgatgatgatgatattgataaatacatgaagatagatagatataagaagggagtgatgtattgatttgtatatatatatacatagttctatactatagggttagtttacagttggctatgcatgttatttctgaatattttgtccccattgtcccacacaatataacatcacataacacaatttcattgaaatttcgtggaaagagctataatatatatatatacacatatctatatcatatttcacataaataataattctcaaaatctctcatgatcataaaataaaatcatcttttgatcttcctctctttgctccttaatttcttatagtacatgaatatatatatatgacatattttgtgatatatgagtttgatcatcatgtgttgaagtagtactataaatatatataataattaacgtatgaataatttctttatatagtttcacatatataataatttattaataagttctgactaatgtgttgctgtgtacggagataataaagctaactagggccacgggggccagaattaaagtttcattaagaaaaagattaaaattaattaatgtgattagttacaaaaaatataagacaaaataaaacagctctgtcagtttttgccaagtcaatatatatatcattatatattattatatgaatcgtatatataaagtgtgatcgtataaatatttatacaccactcatatatatactaccacttatatataatgaagtaataatgtacatacaaatatatataattgataacccatgcattaaaatgaaccatatataaatatttaaaatatattacacgtactcatataataattttccaataatgctatatatactacaaaataaaaatatatattaaaacagacttatatggatctgagtttaaatatatatatatatataagtatatatatgaggcattaggcatgtataggggttgtactttacaaaaaactactcaatggtaccttcacctgaagctgtctcccttcagatcttcttcaaagtgctcaagaataatatatacaatacaaaagcctttattttaatttaatcgaaaccataccatatatatacacaaatatatatatatatatatataatatattgaaagaagaggagaagagtatggaacatcatgtacttgtgatgataaagtctcttattacacaaatagacatctccatcacccacacgcatatgtatagtttctaatctgttatgtctctttgcaactgcttattctaaaataaatactcatcatttttgtaacattcgtatataccatatgtataatataatttatatatatataatattttgtcaacaaattttaccaatacaattataaaatgctattagatatatattattaaataattcagtttaaatttaaaacacatattaaaatacgatatatttttggagaaaaaaaaaagtaatctggaattttttaaatagcaagtagtaaaaatacaagtattatgataaaaaataaattgttttttttttaagtttgggctagagtggccgaatggtcttgagcaacggcccaacccgacccgctccacccttaactcggccttgatgaaagtttaatcatatcattagaaaattatatattgctaatatgtagaaagtttataatgtatataaaatttggccaattaattttaaaatagaattaaatttattgttatatatataattttaatttatcggatatactataagggctcgtttggaacgccgtattaagtttgtattgtattgtattgtattatattgaattgtattttatgcaat

SEQ ID NO: 162367 - DNA, 2676 bp, Cannabis sativa
tttttattttttttaataaaaagattgactaattttcatggatgttagattttggagataagatgaatgaagttcggtctcaaaaccaattgaaaatgggaggagtagctcatatatatcacaatttatttctacacattagcaatgtgagactaactcttaataatggtatatggaaaaattttaaattattttttattatatgatatatagtatatattatagttatattagatattttgtttattttcagaaaattaattctgaataatttataatattatcgaaaatagaattcaaatactcaattagacacgtgtctatatattttattttacatgcatttaacagattatttctaggcaccataaattatttaattttttttttgaaaaatgaacaaaatacttatatattacaactataatatacaacgtcatatgagaaaaattagacgtcttaaattacgaaaaatttaatttttgtttccacttaaaaagctcaaccatatgtaaatatagagaaatactaaaagacatcagtggtatttagtacctatactgttattggtcaaattaagtattgagtctcatataatttaatgcaataacttttaagaagtatcgctaagtaattgcaagtcaacacatttaaaaggtgttaggcacactaatggtgtccagtaacaatgatcaggctcgaccctaagtataagtgagctaggtctagcctgtatctaaggtcgcctaagagcccaaaaaatatttcccccttgtaaaattatacatatttttatttattaattttataatatcatattatttctaaataaaggtgtaaaaataaactttttttttttatgattacactaaatttgaggaccgaccctaagaataatgctcatatgtggagtaataatccaagaggcaaaaaggaatttaatcgaaatttctgtgagattataaaccaccgaaagatgatgatgggatgccactgttatcttgatatatatatataatattaaatatatataattatagttagtgtggtagtgaatagtaaatagtgatgaaatattgacccaaaaaaaaaaaaaatagtgatgaaagtgaaaagtgtgtgtagtgttaacttacttgaaaaagctatggaaacatatataacaattataagcagcaaaaaatatataaatatatatatatatagtatatattggaaacaaaactatggatataatataatataatatattttatatatatatatattgagtagatgtcaagtttaaattaaatgacctaaagttatataaatatgtatatatttataacttgtaataagagtaaaattaaagcctaccatcaccatgcaacaccgtccttttacgtaagacactgcttagaaactttgctgtacatatatatatattatatataatatcaaatgttatacaaccgtgtatatatatatatatatatatatatatcttctacatattaatatattgtttattttgaaaaatatagtgaatttcatctcttctatatatatatataagtacttaattataaatattatgtaagaatattgttattagttaccagtgatcatttaacgacgaaaagaaaagagcgagtggagtcattttgccctctcaactttattacaaaataatttgatgttaataattttttgaatattttgttttatgcctccacaaaattaatatgttttatttacgctagctcttatacatttcaatttttatactcataaaattcatatttttttagtttatcatcatgtttttttttttatttttattcctataaaattgatatttttttttataattcttttaccaattttttttttgcccccactagaatatgtggctggcgtagtgcataacaacaccacttagaggtagcgcgctttgtgatattggttaacaatactctataaaaattattatattaaattatataaatctcgatatatacttaattataccgattatatataatattatatcttgaagaatattaaacactagtactgatatctattaccatttctaaaaaaaatacaaagaatagtaactaattaatcaccacagaaaagatctagctactatatttaattacaagtgcaatattatatagagaaattagtgacttaattaattatatagtacaacaattaattatagattatgtactacttaattaccttttatatttcttgataattgcctattaattcgtttaataaaaaaacatataaattgatgtgtatggaaattaaatgaggaaaattctcaatatatatataactcactatatatatattatatccccacctacaacatcaccacttcctcatgtctgatttttgttatattgatttgacttaagagacatcactatatatatttatataggaattaggaaacttaattaacaatctcttgactcactaacaaagtaagttaaaggattttcattaatcaagataaatggcatagaaatgatactcaatgactagattcacactgttaaacattgaaatagtgtaaggactcactaaaaagatttatcgaatgaagtccgaatagaacgaaagaactccaaaaccactgctttaggacagagatcagtgcaatcttgacatttc

SEQ ID NO: 162368 - DNA, 2230 bp, Cannabis sativa
ggcggtgttggcctttgcgcctttgtcctagccacagaaccgataggcccctctaggcgtggcgtagcaggaatgtccactttctacttcttctcaactgggatagccttactttccctcatagcttacgttttcccaacatggcgtgctctttatattgcttcctccattccttccctcatttttctagttttagtcatccctttcatatcagaatccccaaggtggtacttagtgagaggaaaagtcaacgaagctatgacgatcatgaactcaatagctaagtcaaatggaaaggaactaccagaaggaataactctaggattagatgatgaatcaaacactaaaagtatatcagaaagtgttaaccccacttcgaataacggagtatctggttctttagtcgacgttgttcgatctcctgtaactagagttcgtctatttttggctgtagccataaatttcctctgttctgtcgtttactatggcttgagcttaaatgttgtgaacttagatactaatctctacatgaccgtggttctaaacgccgtagccgagatgccagcttttacgatcacagccattttgttggacaagttcgggaggaagccattggcaatagggacactctggtttagtggattgttctgctttttagggagtttggtgagaaatgacgtcgttggggtgtggaaagtgttaagaatgatatgtggagtgttgggaatttttgggatggcagggacatataatcttttgttcatctacacggctgagcttttccccactgttgttaggaatgcagcgcttgggtgtgcaactcaggcttcacagatgggtgcgattttggcaccgtttgttgtcgttttgggaggtgcattgccgtttgtggtgtttgccatatgtgggattgttggggggattcatgcgttttatcttccggagacgttgaataagccattatacgacaccatggatgggatggagagtggagaaaaagatcgtgatcttttaattagtgtttgaaaatgaagaggttatcgtcttgttttatacatcataagttttttttaataaatcaatatatttatttatgtagaagtttcttattaaatgtgtagcttttttttttctttatttctatggatggaaattctacctgtagggatgagttccatgcaacaaataacttagggtgggcaattttttaaaactttaggaagggcgtagatgaaaaataaaattttaggtggacttaagtataaaataattatttaataaattaaaaaaaaaaaaagaaaattgtcattttttagggtgggcaattgcactccctcactatagtgtaggtctgtcattgatcccatgcatacccgatcttattaggatggagattccccacttaaatggggaatagagcgagaatggtggtaatttctcatctctgagtgtcaaatggggtaggactaacatagcacttttcgcccaaaagagaccttgattaattttatttattttgttatagtatttttcttaataaatatttttctttatgaacttttattacttatcagtattttttagacaattttattttattttaaatattctctcgtattttaaattattattattattaagataaatactatttatctagtttttcggcaactaagtattttcttagagcttaagaaagtgatgtcagaataaatagcaaaataacaaataagaaatttttacgtggttatttagtccacgagtccattgtatctctatttgtataaataattcccagtcgatgagcctaataaaaataaatgttatccgtatttttgtaatcatgacacgtggattttaatcaagaaaggttaaggagtcactagctgaccaatttcctccatggatgctccaggaatataaaggcaccaacttcgtgggaagagttttcccaaagtggagttcctcggttgcgagccgcacgaagggtattcgcgagccaaagtctccctctgttccaggagatgaagccctctactcccgcgagaagcatggattgtcgagaagggccaaggcattctgagatacgctaaaccgagttatgcctttagcctgcggaagcctcacccatacgtgtcaagctatggacctggtgagcaagtttttttaggtacaacatcaaaggttgcctcccaggacactgttacgaaaattattaaatactacgcaa

SEQ ID NO: 162369 - DNA, 2967 bp, Cannabis sativa
  modified_base (2806)..(2827): a, c, t, g, unknown or other
tttcaccaaaactagaaaaaccctcatttatttccaaatcctagtctcaattagagaccaagtccaacacattataaatagtagcagtagctaattcaggatacccaatctttcaggagtttaaaactgattattacaactcaaattcacatatttatatattcttaaaactaactacttaacagaataaaattcctaacagaaacctaacaaactcaaacagaaacataacaacactaataactataaaactactaagacaactcagctaagtaaaacaacatagcttagcttagttagtgattcctcttgtcgtgcctcacgtaagttgatagttaacataacttgacattttcgtgcagcactacatatggcttgtgctaatggatatcttgacatcgtggaatacctaatcagtaaaagagtggtgagattcttgccttaccaacattcattgtatttttttatttttcatgtggctatttgttgagttgatataaatggccgttttagtcagatttcttgaagcctttaatttgctgcctatcatttttttatggttcttgaactctgttgtattagactctagatcctctgtgtaaaagcatggtactgtccttaggtttccaataaaagttcatattgattgtttattgaaatttgaaattcaaatatttttatttttttcatattgggagaggagggtttcaacttaggaccttctctttgtgaggagagttgtgaaaccactagactatgcttatgaccacttaaaactcaaatattaagaaccaacttacttttacaattaagttataaaagaaaaggcatgaaagcaggaattatatttctgattattgcaaactaaatttacttcggtttattgttggagataaagaaattctgcaacacaatggactccaatttattttctttcacatgttcagaaactcataaatagtgtctttttccttttctatagttttttttaatggttatattcttcttttaagcaggaactcaatcctactaatgcggagaacaacacacctttacactgggcttgccttaatgggcatgttgaggtattaataaaattaatgtacaatcttttttttttatgctattctcaagttccattgaccaaatttcttccttttatacaggtggttaagaaattgatcttggctggagctagcgtaagtgcacttaataggtaagttttttttttcttttttttttttaaagagctcttgtggcaagttaaaatgttaatttggttggtatagttctattatttttttttgttgttgtaatttaatgaagtttatttatggtaattattgttatgggttatgtgtgcagctatgaaagaaccccaatggatgaagcagtgagtaatggtaagatggatgttattgatgccatcaatactgcggttgcacaactagaacttgctggcatcagtgtatcctaatcatgtatagatgtatgtgttcacttcaatcacaagttttgttcgaactaatgagagagctagtaatgccattagactattatttgttggaaagtttttagactaatgtctagtattctaaatagagaatacgccttggaaagaaaatagtgaatatgtacttatttaatacgtgtgttttacaaaatacacctaaaattatctttcctttggatttggtatgatatcatattttggattatttactataattattcaaaaaaaaaagtgtagtattgcaagctcatattcttagaaaaattcacaaaacttgctggtgctttctccctacctgagtgcacacgcccctgggctccaatcccgtcaagcacgtcacggctgttggctccaccatggatgccaatggtctctctccctcaagaaataaccatccaaaactaccatataatacaaaagattaccattcttcaatcacaaagatcataacatactcaatactacaataacatcaaatatattgcaataaaatgaagacaactcaagtataaggtgaagatcatctttctcactagggcaactaattgaaatttgagaaaataaccttgaaattgtctccaaagatttaaggtgagaatttgggtgatcttctatatttaatgaatgagcctgctttgaaattgtctgcattgggctcaccctcaaagtatatgctttagcatgaatcacacaaaggtggattgatacaatagaaacttttggtaaaatgcctaacctaggagataaattacgttacttacccgttttaaggattggcaactcactcattcagtgacatgttgcttgttgcttagggtatatgaacaaatttcaggttacatgtttcttaagtatttcactccaattctaaaattaaatgctctaattccattgattgagattaagggcaccccctatttagggggttcactagagtttgaaagccttgatcatacttttattctttctctcgctctaaaagttcagcttttatccaaaaaaaaaaaaaatgattgatcaagattgcttaattttatcatttccttagacttacgtaattactttattatagtaaaagtaattacaccaagacttgaacactttttactagaccacaatattttattattgtaaaagtaattacatcccatatatcattttagtaaaagaaaaaaaatattagataatgctagaaaatatgggagttaaaaataactaaataaataacaataatttatggcataaatacttaagttgaactcccagtcgtaaataaatacctaagtttaattnnnnnnnnnnnnnnnnnnnnnnttataattctggaacttttgtaggtacctagctgttaagtattatacgtgttaatttctaattggtgcaagtcatcaaattttaattttttttttaaaataatttaaatataccaataaaaaatgacacgtggataatga

SEQ ID NO: 162370 - DNA, 844 bp, Cannabis sativa
  modified_base (477)..(493): a, c, t, g, unknown or other
ttaattggatacattagagctttattatgttaaatgagatattgtgagagtccactttagttactattccattttgtcaaggtctcgtctattttaaaaggcttcaaaactctgtgtaaaggtcatttcaagtttcatgagcatcaattatacatgttattagataaattatatacctggtccatgatttttaagatatattcaaggtcagtatagtttcaacgagatccagtctaggaattgaaaaacattattatctcgggtataattttcacaacgcagctcatgtttttttaatatattacacagtaaacatccaatttaatatattagagccttgtttatgttcgatgagatacagtaaaagttcactctagtttcaattcaatttcgtcaagatcacgtctactttcaagagcttagaatctctcttcgtttttacaatgtagttttcattttcttttttttttttaaaannnnnnnnnnnnnnnnnatatatatataaattttattttaaccccatgataggctttgtctaaagccaataagatatattagagctaaacttatttatgttcgatgagaaactttcaagatccattttattttctattcgattttgtcaaggtcatgtctacttttaagaacttcgagtctctttttattttcacaatgtagctcgtgtttcttttttaaaaaatttattttatttcctccccatgatagaccttagaaacaagaagagaattggaagaaaaggcggttgcgtttttgctgcttgctcctgacgcagaagaaaaaaagaaaaatgaagaaaaagaagaaaaaagaaaagagagagaga

SEQ ID NO: 162371 - DNA, 2926 bp, Cannabis sativa
ccccccccccccggcctcctctagcttaacacggatgcggcgtgtctgcacatcaatcataaagcaggttttggaggagtgattcataacagcgaaggaggagtagtggcagtaatagcgttgcctcatagtggaggaggagatgcaacaattcttgtagcaaagtctatactcacatctctacagtggtgccttcaagaatgttttcccatccatcaaatcaaaaatgactacaaaatgatcactggcgccttgaaaaccaacaaagaagatttctccctctttggacacctaatcaagcagattcgtttgactttatcacacctcaatgcctcaatctcccacgttaagtgtacgactaacacctttgcgcacgaaatggcaaagttagttttgaggttagatgaagttgatatttgaattggtaatcttgtttctcttcttttcccttgagggaattcctcccttaaaaaaaatcaaccattcgattaaatattttaaaaataatggttaaggttgaactgcgaaagaagttccgcttttgtactaaaagagaataaatgggtgccgtattttcttcaatcttagcaaatttaagatgtcatccatttcttaccgttaattgccaatattgattgcttatgtgtacatttttgtacacacgttacatattaagattggtccacataatatttttatttaaaaattgtaaataattaattttaaaattaaaatatataaattaattattttaaaaatcaaataaaaataaaattaattaatttaacttatacaaaaataataaaaatccaaaaaatttccacatcttcttcaaacccaccacctaggagcatcacccaccaccattaccaccaaaacttgttttcaatattcaaattataccacaaaaaaatcacatcaaatttaaacaaaaaaatcagatctcaaacaacaaatttagatctaaaaccttccaaccatttgagataaaaagtactcaaaataaaaacaaacccataatcaatgtcagatttcaaacacaaaaaaaatgggcagatcgtgaagagtcaaactccataaacggagacgtcaaagctattggtttcttagatttcctcttgtcaagaagaggagtttcttcaacgacaattggatgatcttcaacaagttaaatattagaatcaacattgacacctgttgtacccatctaagaataaatataaaaacaaataggggaggaaacataaagttagtgttaatacaaaaagtgttgagcaacttaacaaaaacggtaaaataaccatacctcaacacaaacaccatgaccatcggtaggctcaacattttcagaaagtggaacctggttaccagaatcaccaccaattccctctgaagacatctatttttatagctcaaaaaaatattttgaaaaaatctaaacaatcacaactattaaacaaccaaaaaatatcaaacaatcaacattaccataatctcaactgctttcacactcgactgagcagtagcctcaacatctatttgagtggctctatcattgaaatcaagaaaactcttgataaagaaaaaagacaaacaaaaaaaaaagggaaaaaaaagttattttttttaaaaaagagttaaaaaaactaagagacaactacaaaaaaaactaaaaaacaatataaaaatagtaagaaaaaataagaagatcaacattaaatgaaaacactataatttataatatggcgatcacaaaaacataaagaatacgagtatgaatattagtggtaaattaatacaaaaaaaaagactataaaatataaaaggacataacaacaacatagaagtacaaatccattaactaaatgaacttacaacaaaataaaacatacaaagtaactaaaacacagttacattgtctaattatctaccttcttctcactattagtgcattcattatcacttcccttattatcttttcctttggactcgaaatcttcattatcatcatcatccttctcctctccgtcactaccctcctcctcttcatcacctttaccttcatccacctgcaacatctttttcttcattgtcatctgcttcttcaatgtcatctgaatcaatatcttctttattatcacttccaccatcatcattggaagagtcactccctttgtcctgcaataaaagtataataaaaaaatagatacagacaactaaaaataaactagaaaacaaccataaaaaactaacataccttagcaatagaatgagcaaaaacagtttaaaactgtgtctgcattgaagccatttgagcagcaaagaaaacaaactgtgtagaaacaaactctttcaactcaaccaaatcagaagaaatcttatgttgggaagtatgcaacaaatcaatattcatctccaaaccatcaaactttttagaaaaaccatcaagcttgacagaaatgtcactctcaaccaaagaaggttgttccggaacaagaatactcttgtaagaattgtaatcagtatcaaacttgaaactgctcattttcaaagctttaaactcagcagcagtgggtttcatatttgattgttgcagttgagaaaaacaacaagaaaagaaaaaaaatcaataagagtgtgtatttaaaataaaaaacaacaacaaaacaactaataaaaaaccaaaaaataacaaacaaaaataccttgtctttggagacatcaaaaatagtagtcttcaaaattttgaaaatcggctggctggtacaagtccactgaataattcttggaatacgagaattttccttttggcaatacttaccattcatgtacttacaatactcataatatcagacttgaaatacatgaggacaaccaatcaaagtgtaaaaaacactgagcctctttcctaaactcttcgcctttc

SEQ ID NO: 162372 - DNA, 1756 bp, Cannabis sativa
ggttaaagagaagcatagtaagctccatttacttcttacgagcaggtttgtttactcaaacagtttggtgacattgaatttcagagagtatcgaatggaacaatgttatagtagcaaaattcatgtgggatctttttataaagagaaccgtaagctccattttacttcttgggagcagtttgtttacccaagcagtttggtggcattgactttctagagaatacggaatagaaaggttgtattagaaagattcatgtgggatctttctatgaagtaagatcttctttagtaaaatgggtgcacagtatttacttacaagatcaagactattagtcatattcattggagaccgatgttaattggtactggaggaagttggttaaccttcgaaagatgttttctatggtgaatactcataatgtaaggagtaatgggaagtttaaggctagtaagctttatcagagtcttcttcatcatgagcatgtgagttacaataagattgtttggtgtagacttagtgtttaagcgtaagtttattttttgacaaacagtgaatgaacttactaaagataaacttctgctttgcaacatccatttgaatttaattttatccctttttgtaagcatgttctagtcattctcgaattattctttaattgtagtttttttcaaagagtaatacaaggtgttcttcttgattaaaaaaaaaataaaaaacacgaaatttatttttttattattatcaaaatagaaagttcaaaaaaatatttagtataaacaaaaaatctacggtacctcacatgaaatttgatacgaatctaaattatttaattaggtttaaacttaaataatttttgctggtatttataaaaatattaatctagtcaaatattatgattcatacaaacatgttttcacactaatgcaagatatgcataaatcgatcaatacttatccttatattaattaaaaagtgaggtataaatcttcacgtaatttatattttaaatatatgtttatatgattgattgcatggcgtatatatatgtatatattaacgtttgagtttctataacctaatgcaaatttaaataatggctataataattcattaccatttttagtaatttcatcaaaaagtaaatataaattaagttgttcaaacattatacattaatttaattaaaagggacactattgtctcttcttctcaaatattatctcaaattatatatatttatttaattacgtgggccaaattgcatttattaaattctaaagcgttaaaataataataaattaaattaataattaaaaagaaagtggaatttgtcaaacaaaatacataacacgccaaaattatataaatgagccgtttttccttgagagaaattatgactttttttattatgaaaattatattttaaaacactaacaacaataattaaaataaaaaaacagaatctccaattttaaaaatgtatttttatttttttattgcaatcctaaatctttttgtcttatatgaatgtgagttgtatctttgttttaaacaaagggtcaatttttgtaaagaaaaaattacaaaataggtcataaatttgaaaaaaattataaaaatattttaatacagaaaatttattatttttactttgaacttttttatttacaaaaatactttttcagtaaaaataataaattatttttttaatgttttataatttatttataattgtattatagttgtcatgagatt

SEQ ID NO: 162373 - DNA, 1891 bp, Cannabis sativa
gaagacaggcctctacaaaacagcagttcttactttttctagcttagcattcagctgttgtattttcttttctgctacatatgctcggagtcccaatccatattttctcttattttgcttatctatgtcagtctggagtctttcaacctggaatgaggagtagaacccttgttaaacatgaaaaggtgtaaattgtaataatagaagcttatttatagaaaactaacctgcttctcaagctcgtctacttgttgatctgacttactcatatattccttcccatatgaagattcctatcattcataacataaacaataattaaaaggttacaaaaaggattttcattgtcttttatatagaaacagtaagatgttacattacacgtttatattaattagtccctcctagagtttcgacctcagaactcatagttacagcaacaccctgcaactacttgagctagagtcaagtgaaaaggatcaactttttacttagaaacatcaaaggtaacaaatttttaacatattgctatctctacacaatttacttagcgaaaagaatgacaaaacttataaatagaaaatagaaagacaacagacatgtatcttttaaaatatttctcagattcttcccacaaacatgaatttaattacaataattcttgaatagtttctacagatataaccttaaatttaaaattgaaaaagattctcctacatgaataatgaggccttacctgaagcaactttatctcgatttgtaacaacgaaatgttatccgatttatcctgaattatcttctgcatttctttaatacttttatcttttttgcttaactgatggtttctctcatcaatgctcaattctaacaataaaagacaaggaagatctgagaagtgtccttcaactaaacataaccagtggattgagaaacatcatatcatgtattactttaacttactaccaaattgaattacaaactagtcatggtgaaccaaagaagcaaaagccaatgaaactcaaaacacaaatcatacatcttaaagagtaatgtgaaaatgaaaataataataataatgttaatattaataataataaagcccatagaaatgaaaaggttgtttcgataaaaaataaaaaaaatcattttgaaaaaaaaaaaaaaaaactaggatttgtaatttttttcaatatgagttttgagaaattatttttaaaattaaaataatgtacctaactcttaatttacacaagattttttgcaatgatatcaaaaacattttaaaaagcacctttcattaaaaaaaaatcttatcaactggagaagaatattcataatccttctcttgcttcacgttaaataacaaaactcaacgtctcttacttccgattttccacacaccatcgcaagaatccagaagttaacaaaaaataatgaataatacaagaacaattcaaaatttccatacactccgtacatttgtaaaaaaaattcttttcaaaaccaagaaaacataatgattacctagcgaggcaatcttggacttgagcagctcgagttcgactagaagagaggaatgttgaacatctggtgcagatacagggttctctggaagcgatggctgttctagagttatggcgaatgttagggccaagaacatgcagaagagcaaggactcagaggccgtcattggagaaaactgtagggtcagttatgaggggagaagaagtgtttttgtgttttaaatgggtttcaaagggagggaacgacaatcgaggtttttctattcgttttgaaatttgctttttcaaataaaaaaaaattacactatacaccatttttatattgtcatcttttatttttactctattttttaaactctattattttt

SEQ ID NO: 162374 - DNA, 2361 bp, Cannabis sativa
aaggaaaatatatatattttttttcgaacaagaggaaacttttattgaaaaaccaagcaaattacaaacaagaaaagtagcaacagctagtcgctgcctgcaccagcagcaactgcaaacaaaaaaccactaccagccttcaactacatttagaatatacctatcctttttggtaactttaaggtgcccaaggctcaaaactctacatttaacaatctttctaatctctaagctaatgcttctagctgagctacacacaaccaaagatacattgattcctattcttccaaataaagtacacagcagcagaaaaaaatagcattaatgacttgactcttcaaatctcttgtcgattgcaaacaccattgctgaagatccaagaaggaactcggccattgaatagtacccacccagcaactaatttccccatatattttccttgagaatatgcaattcaagaacagtgataatgctatgcagaatctgtctcacaaacaggacagagcagaaggataggcaagaaggaaaatatttgctttaatgtaagttttgaataaataagtaggtgggagatgaactatgaatatgataccatttcagagttatgatgggttggaaatggtctgaaattagaggtttactatatatatatatgatcaatcacacacgttttactaaatcctaattggtattggaatatgagtatatgagaaaggaaaatgaataagaatgaaatatagggatgccatttattgtattggaaaaatattataacaataagcaggaataagaattggttgtgcggttgtggttcgtgaccatcttggtatatgcttagcttctacggcaacacttcgatttcgggttcgttatcacctctgggggcggaagcaatagttgttcttcagttcttcagggcctcctctgttcgaggttggggttcagaatattgagtgaacgtgtatatgctcttttgaacaagaatttttatcttagtttagtactgtcttgatagattttttctctattaagagtgtctaatttcatttattgtaaatacaatatcgctaagttagttttaatctctagaatagatatggtgtggtagctgtctgtccctaactttttaatcaactttcatgctcgaaattatatgtctaaatattttttttatagaatgtttttgttatgattacaatatcttctttgtaaatttttaaatagtagacattagtttactatatatgttcaaaaaattttaaatttacttttggcacttcaaattattagaaaattttcaaaaagtttacaggaatgatgttgtaactataaaaaatattttgacatatattttcgagcacataggttgattgagagattgtaataggaagttaatagtagcactatgcgacaattgccttgaaaatctcatttgctaaaaaaaaaacaaagaatcaaagtaataggagggtaaattagtctattaaccatcttcaaaatatgagagatgttaaaaagtaccagtaatacttagcatcgttctatgtgttaatatcactattaattcaactaagtatcaagtctcatatagtttaatgtaataacttttagggagtattattatccaattacaagatgacatgtctagatgtattagacaccactaatgctcaatagcaataatgctcgaaatatgtactatgagttccatcttcaaatctttttttttcctctaaaaaacaaacaattaatactatgaatttagtaagtttgctatagagttccaattcaacttaaaaaaatacccttgacccaagtagtatgaatcatgttaatgtactctactatttagccaagatgaatgaatttgagaaaaaggggattgcatctctatactacattttaagagttctaaaagattttctttttttttttattattattattacaaaaatgtgattcggtatcttcatccaaacaaatatccaacttattacaaatttaccaaatatatggacgacatggtgaagaccgaccaccataaccataagtgttagtcaaatcatgaattggttgtgatacatattctatcatatatatatatatatatatatatatatatatactcaagtgatgtgtatccaacaaagcaagaattaatacatattactctacctaaaaatatattgaaaacaaaaataatatgtacacactacacataaatatgatacacatacatgtaacaagttatttttgataagtgagactcatcttaaatataaagacaattagttgaaaggaaaattactccatatactatttttttttttcaaatttacggtttggatttctaaaatggtt

SEQ ID NO: 162375 - DNA, 1809 bp, Cannabis sativa
gctctcctcagggagggggtgtagtgctctggccagccaggggtactcctatatgtgactagctggctaaagatttgtttatgggggctattgttgagcctgcgatccctggccagccccccatgccgctggttgctgggatctgtctattctgaccattgcacttgtgttggaaggcctatgctccttcatgcaagagaaggtttgtcctagttcgtgaagaaccaggtttgttagatttttgatagaccctccctgatctattaactagtcttccttggagtggatctctgatgagaacctggggtcttccattagttctctgattgaacatccttatcaggtcactagcttccctggttatgtgatccagctcaacttggtgagatcaaagaatgtactattggtcatgcacccacctcaggaatttttgctctgctgagtgaatacatcgcaatcagcagtgcgggcttggtcagttaggccagtttgccagatggcctctctaagtctggccaacttaagatcttctcccaagtccacatggggcacaccaattgcaaggtcaccaatacctagtcatgtctctctagcgtagtgctagagatgagatccaattgttgctcctaggggctactctccaaggatccttacttcattaggaggtgctagcggagggtcctccccaaaaaaaagggcatgccattcagatccacctggatgctcatgtcactctaaccaggtgtagtgataagatttgaggtgcctgctgtggtggcaggatagactaaatctgtagtgttcatgggaattccagtcgtggctggaaaatggatatcaagatctacagtcaaggggtcttgaggaagacctgatgatgcagatggtgcagccggagttctcctcgtgttaaccatggcgtttgatcagttatgatactaactccctttcaatgaaagcaccaaactattgacctcaaaaattagctgactgacagtggggttgtattaaactaattcttgccatgtgttacacaattagaactcaaaagtaaatgaacaaaaggattttatagattagttagagagtaataacctactctccttttagttgtattgatattgagagataacaatattcagatcactataggtgggatctggtatagctctcttaaggttacaaagtaggaatcaaagatggaaaatctcaagttttgagagatgttatagtgggcgttagagagagagagagtggagtgagttattagacataaaatgaggcttaaacttagggtttttaggcttaagttaaggatttttatataggagagcttaaacactagtttacaaataaaataagtagacatttacatattaaattaattaaatacaaaagactaaaatgccctttcaacatagatcttttttatttactttgttgggttggtacggcccaattcccagtctagcttgtagtcaacgtgtaaggctattcactagaatcctaataggtctaatcctagtcggccaggcacctgcaacaagttggctgctcgaccttgtgctatccagacatagggtcgtccaggggtagccagccagcccccttgagtgtcaggacccctgttggctaaggtgttgaatcgacctccttatttgtgagttgtagtgccacgtagtgctaatgttgtccacgtaagcatggcacgtcaggtgggcaaaaatggagataacaataagatagtgttgttgggttttatgccctaaataaaactctttacaatttgattagttatcaatataagaa

SEQ ID NO: 162376 - DNA, 2636 bp, Cannabis sativa
agatggaacctgcagtcaaccttgggggagagacctagaggctttaccatgaaattggagggtatgagatttggagagcgaggaccaataaatcactccacactatgaagtatttctgtgatgaaaggggtgttttgtgtaggtactttgctttttgtcatgatggccaacagtacaagtacttcccttgagtgcatagggaagagttgaacctgagcaatcagttaaactctcttcgcacttgtgaccttttggaagactattttgaggggaatagtcatgataatgctctggacgaatgctctcgcagaaaacagcctaaagatgactcagtcctcatacaggagaatccccagcacagccttcacgaccccatggttaggaggctatagccaaaccctgatcgacgaatatttttgatcgacttgggaaatagaaagacctgtgtgactccctaaacaagaaacaattggtggaaaagggagcttctagcggtgatcccatcaaccgggtagctgaagttccaactcggtcgccaccacctgtggaatcaatatggccaagtttgattcctcagctgctcttgtgaaaaggatcacaactcctaagttgttagagtttgaattggctcaagagcaacgctcaccgctctcagatcgaatctaagccttagagattcctcctaagtttaagaatcctaattggcacgagtacaatgggaaagaagacccgttgtctcacatccactactttgaagttcagaccaatcttcaaggggtgtgagatgcacgcccggtgtagaatctcttccacgctgataggcctagatcagcggtggtaccttaatctcgttcctagatctatcaattcttggaaagagcttgtggacacttttggaagtcaatttgctccatgtagacaatgatagatcaaacccaatgatttgaatgaagtaagaagatgataaatccctcaaggattacatccaacggttcttcgaggcagctgctaagaccaaaatacttaacgaggacgtgagggttatggcactagtagctgggctcaaggagatgagtcctctatggtaagaccttcgtctcaaagaagttttcaccatgaatgacttcctggatagagttgatggctttatcaaactcgaagaagttgtttatcaagccaatgactcaaaaaaaaaaaagaagaaattataagaatcccctacccctaacacagacacacatggggctgtgggaatggagggaagacaggggaaaagacaaaacaatggtggtaaataggacaacttctctggcagaaagaaagccaaaattgggaataggcccaaaaaggactatgagcctcaatttacaacctactctattctcttggccccaagagatgaaatctatgtggcaacttcgtcaacagtgttgtaccgcaagcctcttcccttcaaagagtcagggaagagaaacatgaacaaattctatcgctaccacaaaaattacggtcacgacatgaatgagtgtaaacaattatgagatgagataaagtttttgatttaacaaaagcatgctaccctccagcagtatgtgaggccaaaagcgctagtaggaggcaatgctcctctccagcctacaataatggcatgacagcttgatgtggtagttggaggtccgcacattgtcggtacctcaaggaaagctctggaatggtatgcaagatctctacgacatgagccaaggataaaggtgttagaggttgcgtagaggcctcaaaaatctctacattttgagtgtgatccaatcacatttggataatccgactcggaccatgtctgctcttcacggtacaaatagtcaacatgatggtggctagaatgatgattgacgacagagcatcattaaaaaatttgtcaaacaaaccctggagcgaatgagtttttccttaaaagacctggagccatgcaatcaactcatgtatgacttcagtgaagatggaatggctccctgttgtaagatcaaactgccactgaccgtcagcactgccctgaggcagaataccattacaacaactttcatagtggtcgacaccaagtctccgtacaatgtgatgatcagaaggcctaccctatacaacctctgaaccatctcttccatctaccatatgtctgtcaagttcccgatagcagcttacattgttcaactcattggtaaccaaaaagctacccacaattgctaccacaccccactgacactcccaaagaagacctccttaaataaatttattttattaaatttaacttaaatgcaatttaatattttcttattaaaattaactcattcattctttagttatttttttaatataaatatttattttgccccataaactttggtatcaataaggtcgtgcccccggagtttataaagttcatcattcatatttatctttgaaaaacttagtttttgcaaatgccaataatatatacaaaagtataaaaatgtatacgcctgcagaagcaggatgtaattatgttactgcagagaatagttttgcagcgataaaacagaacagacagaatataaaaataattacagaaaattaaatcacttgacacaagagatttgtacgtg

SEQ ID NO: 162377 - DNA, 2527 bp, Cannabis sativa
tttttgaacttttattattgttaaagtctaatgatcatcaatggaatgaagcggaaattgaaagggcattccggtcatttttggcaccgggaagatcaagttgtgcggcgggtgaaggtaacatggttagggctagtattccactggctgcggccgcaactccgcccactacgaatgctggcaagttacttcctccgaatagggcatcccatggcccgcttaaaaccgacactaacatctgtattaacaataataataatagaaattaatattattagtaattaaatcactaattaattatgtatggaattatattgtgtgaaaaaaaaaattgttagtatttgagaaatattttatgaaagtgaagtacatatttgagtttttttaaaaacattactcattaataaattaatgttctagttaattacctgtggtacaacaattgcaagattcagtactcctaatgaaagccctgaaacaaaataaaataaaataaatattaattataaattaattaatatatataggataataaaattcaatatgtattatatgtataaatatataagaaaattaagtatataaatataccttggccagcaccagaagtgctggaaaatatggaggccaatgcgaaagggatactgtaagtaacctatacataaaaagaacaaaatattaatattaataatgaataaattaatttaattaaatcaaatttatttatttattttatattattaaatgtcactttcatttcaattctcaaattttgagattgacaatttattttatcttcatatcaaattgatacctaagacgttacgtacgaatatagtaaagaggtggacttgaatcacgagacttacataataataataataataattaattaattaattaataatgaccaacaaagaccaaatatttatttattattaaaaaaacagctgacattctaatttaagtaaataatcaaaatcaagaaatttattacacgactaactatgacattaattaattcattaattaatttaaatgatattatataataattgttgaccatttttcaacatgcatctttcattcaaaccttgttttattttatcttcttttggtaataaatatttattattttttcatgtgagtacaaaataattaaagttgtttttgactaataattgaatctcattatcaataaaaacgtggtttttatttaatttgcacttttaacttttcctacaaacactcatcactctcaaagtgccgaaattttctctttgaattaataaaaaaacacacacacacttaaaaataggtaatttctaagaacatgactaataattgaaaattaagtgtttttttaaataattataaaacattaaaaatagtattatttatttgagtgactacaatacagacacttaaaaacaggtaattagtgggaaattagattctttttttttatttataaatagttataattatcattttttctcttaattacaacaagaaaatagattattatttttttgctacaaaaaaaatatttagttgttcattaactatatacataatttcttttacttaaaatggctataaaaatacacttcataatatgtaattattagagtaaaataagtaatgaaaatagacttttttttggtttattttcacgttttaataattttattttatataaaaatatatacttttaataacattaattttttttaattaatttcttcttatttatattcttaaaaaatatacatattaaaaaaataaataatattttaaattttataaaaaaaaattatatgagattttgttaaaaaataataaaaataaatattaaaatttaaaaaaaataatataaaaaattttaaaaaaatattaagaagcaaattgcaaataaaagttacttttttttccttaaataattacacaaaaatatttattaaaagaatccaacttttttaaaaaatcaatacatgaaatattaataattacacataataatataattgttaataataataattaaggacttaccgcaagaggaatacccaaaacagcaaagagtgacaaagcgccagctttaacagcaggaggcggagctaacggcgtttgaggcaagccattccgactattctcagccaacttagtaattaacaccgtcataaccaaacaaacggcgagtaagaaattaaccaaaccccataacctcttggccccacctaacacccgagccagtggctcaaccccaagagacatcgcacccaaaaccaccgagttcagcatcagacccagcgcccccgctcgaaccccaagatcgtactctttacccttcccaacctcacctccgtacacctctttacccatccaatcagtatcgaaaagcagaaacggaaaccacgcgatccagttcaaactcgtaaccagtaacaaaacccacatcggcttcttcagctccttgaaagccccaacaatgttgctgaaaaatggcgccgacctctccccgtct

SEQ ID NO: 162378 - DNA, 2805 bp, Cannabis sativa
caatcttcaagaagaagacaattctagaaagagaaataaaacttaccagtggaatgaagacaatagagagagaggtaaagaaagaagtgaagagtagagcagtaatcgagaaatgctagtcgcaatcggaatccatgggttcttctgagaatgcagttgagtgataaaagagagtcaaataaccaattggccttcgtctctgactctatctcagatttcaactctccctcttctccaacccaagaaccacagtttaagcagaagagagagaaacaaacaccgatcttttttatttgcgactatttcgctttcagtcccttaattttctttttttaattttgtttaatcacgctaatgatgttcctcataacggcaatttgaaagacgacgtcgttttcgttgtaattacatgtaaggcgccagctgaagtccacaccacttgacactccactctacacacacacttctttctctttttctctacctttgcttttaagttttaattttatcatatcctctataaataaactttaaataacataaaataaaataaaagtaataatgtttttttaaaggcattgatccaattaaaaccactctagtgcaattttttaaggaaaaaaaaaacaaacactagtgtttctagctaacattttggtagggtcgtatggtcctattaatataagcttacttgtatctattctataattttacaagctctataattatttttctaacttgttaatcatcgttctataaatttgtcggcaacaattaatatggataatgaccccttaattatctttgcttttttctttcctaaataactacctacataggcaagtaaaacaatataacattgttttcttttctcaaaataaataaataaaaaaaaaaaacattcttttgtttttcttttttccgtgtgccgacatttttccaatgaagacaaattaaatgttttatcattaactatatttaattttcttccttgttaccaaatcaatcaaattttagtcttctttttttattaccacgcaaaaagaaagaaaaaaagaacaaaagcaaaacaatataaaattttaagaggaaataaaaaataaaaaaataaaattatgtcagcatatacctaattctaaacccactacattcaaaatattgatgtagtaaaggtaaaatattgttattgggtaccagtaatatctaataccattacatatgttgtcttgcaattggctaccaatatgcttaaacaattatgatattaaattatatagaaccaatacttaattgaaacaataacaatacctattaaattatatggaaccttcttttttgataatcaaactctggtgcaggtgctttttgaacaatattctcctcattggatgcttcattacactttcaacaaggtcatctcaatggctgagaataggagtgcggtactggtgtgttggactcctcgaattaataatatggcagcccatgctcttgcgagatgggatttgtctcatgtttgtaatggtttgcttcggttttgagaagtgagtccccatgtgctcactaaacttctaatttcggtttaataaagttatgtttttcagcaaccaaaaaaaataaaaataaaataataacaatacctatttctcaaagataaaacataaacatttcaattggctagtgccaaatgatacacaataagtaaactaaagtggtgtccacatcatgtgacaagtcgatacgcaaaccacaattcaaatcaaaatttgttttaattaatctaccaataagtgaagtgtgtgagcaactgatattagagaatccaataaatatatttatatacgttgtaattgtatataaaagaaattagagcataatccctaaatcttaaaagtaaaaaatcgactttaattaaagcttaaactaataaatttttcttcattgtattagacaataaacatattacactaattacattttactactcagagtcagaactgtaatgatactataaaaatgttgtccatcaggtggttacagttttaagtgtaaatgacactttactggcaacccttcactattacatatatccatatcacttattgaatcatatactttgtggatttctactgctatagattctgccacatttgatttgtcttgctttcaagatttaatttcaaaagttgttatatcaagatttaatttggtttatattttttattttttttttatttatttaaagttgttatttctcatattaagagaagtaccaataaaactgctaaggtgacaaaacatactacagagctggatatggtaattaattttggtctgggaatttttccattctcattttataaaggaacaatgttgatttataataacaatgttcattttatctgttagtttaggtcttattgtttaaactatacaaagagaggaaattaatacaattaaaaacaaaaccattttctctccatggtctttctctttaataataaaagcacatgaaggaagttttactgttacagctattttggactacattttctctatagatttgagtcataattagtgttcataattcttgattcttatggtatgtaaataaatgaataagttaaaatcaagggatacaagattgacgattgtacctccctccacaatacaattactttcctccctttccttcatgttcaccttcaccttcacaatttacaagattatttagggaaacttacaaaaaatactagaatttaggttaatttttacaaaaatactgtcacacagaaattttttcaa

SEQ ID NO: 162379 - DNA, 2528 bp, Cannabis sativa
  modified_base (1620)..(1626): a, c, t, g, unknown or other
  modified_base (2176)..(2178): a, c, t, g, unknown or other
tacattctacaattttccaaaaagcatatgccgactaaaaaagataccaaatttgtaaaacaatgggaatgggcttggccagtattccccaaaaacacatataaaagccctctaaaccccaaatctaaaacaacaagaaagaaagtaactcaaaaagatccttcctttattgatattttcagtttagagagagaaagtagagagagaaagtaatgacaaaaccagatgaagaacaaacccaccaccctcgttacagagtcggctacgcattcgaacccaaaaaagttaacacctttatcataccatccttcatcaacttagcaaacctaaatggaatcgacctcgtacaaatcgaacccacaaaacccttactcgaccaagccccatttcactgcataatccacaaaatctacggccaagattggaaacaacaactcacagatttcaaatccaaatacccaaacacagtaatcgtcgacccacctgaaaaaatccaacctttacacaaccgtgtcacaatgctcgaatccgtaacccgaatccgaataacccaacaacccgaaatcaaaatccgaatcccaaatcaaaaagtaatcgaaaaagacgaaactttagaagaaatcggtttaaaatatccggtcatagccaaacccttgttagccaacggcggcgcgtcgtctcacgagatgtgggtcgttctaaacagcaaagggtttgagcgcgtgaaggatcagacgccgttactggttcaagaatacgtgaatcacaacgaggttgttttcaaaatctacgtcatcggagaacacgtggagtgcgtgaaacgccggtcgttggcggatattcacgtgacggcggaggaggacggcggcgatggtggtggagagtggaatggggtttcgattctgccgttttctcagatatcgaattcggctacggtggaacatgagagtgagaaggttgatgaagctgtaatgccggcgccggagctggtgacggagatcggaaaggagctgagaagggaattagggcttcgattgtttaattttgatgtgatcagagtgagtggagaagagaatagttatgctgtgattgatatcaattattttcctggatttgcaaaattaccacattttgaacaaatctttacagattttattcttggtatttgcaaaaatgccacaattgattaattgcaaatcatttgcaattaataataatatatatgtatgattatgtataataagtattttcattcttgttatgagttatgaatgaagggagtttttattgtaataataatgaaattgtaatttgttgggatattttgtgtaattttcttatttgcatggtaataatgtaaggttatgtgtttctaagaaaatgagtttaataatttatatataaatatatttgtatctttttatttgaattctctatattattattgtcccaccttggaatgaggaatgaaggtattattattctaacaatgcaactagatagtttttaagtattaaggtactattcaatatcatacataatacatattaaagtgagaaattttgaaagtggtgcctatcatttaaatttttaaggtatcatattattattattattatnnnnnnnattattattattattataaaatatcactaatatcataatttcatatttttactcgtctaagtattaagttttatataattttatttaataaatttttaaaaatattgtcaattaatcataaagtattattgatgtcttataacaatattctaatgacattactcgataaattacatacataaatagtagtatatcatgatgtggcatattgtaagtgattattgtgtttttatattatttatttaattaaaatatgagagatttgatactgattacactaataataatattatatgcttcttagcatttttcaattaataattattcataataaatatggtgttaaatactttagtgtaactaatagcaatgcaactatatattaattattaaagagaaatgctaaacttatggtgtctagtaatagtaatagacatcattgatattttataataatcattattaaaataagagtaataatttgtttttttttttttggaattatgacacttagggcttatttgttacgccgtataagggtcgtattgtnnnaaataataaataatactatatttggataaaataatgtattgtattaattattacgataataatttttaatacaatgtatgctgtattatttaatacataacaaatgatatgtattagcttgtattataatatttataaaggatttaggatacccagaccccgaccccgaccccaacccaaagccagacccgaacctgaacccgaacctcgacactgacccgaacccggacctaggacctgggaccctgacacgtagttggtgttggggtcaagtgtattgaaaatatattataactttacacgatcaattaatacaagtcaataccaaacattgtattgtattaaataat

SEQ ID NO: 162380 - DNA, 5226 bp, Cannabis sativa
acatgttgtatatgccatgaccctatactcagcttcagtagatgatgtagagacaacatgttgctttttactcttccaggatatcaaagagccttcaagaaaaatgaaaaaaaatcagtggttgatcttctggtatcagggcaagcaccccaatttgcgttagtgtaggctctgagttagaattttgatgctgcagggaaaaataacccctatcctaaatagtgcttcacatattgaagaaccctttcagaaactttcatgtgtctagcctttggagtaaccaaaaacgggctcaacttattgataaaaaaggataaatatggccttgtaatagttaaatactacaactttccaactatccttctgtacagtttaggtgatcaaccaatctatctttttcatattggcttaacttcaaattagcttccataggggtagtaactggtttgtatcccaaatggccaagaacttattacaattgcagagcataatgtctctgtgatatgaagattccctaggcagatttagtaacttccaaacctaagaaatatttaagtctccctagatctttaagttgaaacctgctttcaatctaactttaagtgcctccatctcagccaagttgttacttgccaaaataacatcatccacatagataagaaggatgatgaaactagctccattgtgtctcataaacaatatgtgatctgtagctgaatgatggaagccttcattaattaaaacactagaaaatttggcaaactattgccttgatgcttgcttcaatccatataaagatttcttgagcttgcatactgtatttggcggaatctccccttaggactataccttgtagatagagtcatatacacatcttcataaacatctccatgcaaaaaggcattatttacatcaagttgatgaagatgtcatccattggttgctgcaagtgcaagaacaagcttgactgtgacaagtttagtgacaggagcaaaggtatctatgtagtcaacacctacttgttgattataacttttagccacaagtcttgctttgaaccttttgatagaaccatcagcattgtatttaattttatagacccatctacatcgaatggcatgatgttcagtgggcaaagtaactactatccaagtgtggttcttttcaagggcatcaatctcattatccatggcattatcccactcaagtatgccttgagcttggttgaaaaattctggttcacagtgactaaatatggccaatacagttgctcgaaaagtaggagacaatctgctgtagttaataacctaagaaataggataaggagtaacattggaggaatcctacaacacatcattagagttatcttgagcaagaaaacaatgataatcctgcaagtatgaaggcttgtgagaagctttaactggtctggtgtgagaggaataaacaggtctagagacttcattattctatgaggaagatgcaggaacataatttttagtatgctgagtctcaacagtagagaaatcaataattgatttagaaaagaaattatgatattcatcagaaagaggatcattataatgaaaagggaagatagtttaataaaataaacatctctagaacgaaaaaattctgatagaattaagatccaataatttgtaggccttcataccagtaggataacctatgaaaagacaaggtgcaactcttggagaaaatttggatctattgacaaacaaagtggaagcatatgcaagacaactaaaggctctcaagttgttgtaatttggtggcttggacttaaaacttggaagggggagacattttgcaagtttagtgttggtgttctatttatcaagtaagcaatagtagacacacaaatatttattcaagtacactaaaggaatatatgactgaattaagagggctcgagcaaaatttaacaaatgttgatgcttcctctcaacatctgagttttgttgaggtatatggatgcaagaatgataatggattattccaagcttattgaataattccaaaaaatgtaattttgtagcattgtcagatctaatggatttaatagtcttttggtattatgttttgataagctgaataaagttaggaataacagtttgtgatttggctttgttttcgataaaatgcacccaagtatacctacaatgatcatcaacaatagtaacaaaatacttatgtcctcctatagtaagtgtattgaatgaccctcatttatctatgtgaatgagattaaaacattccttagcaaattatagtttgaaacaaaagacaatttttttttttttttttgtttagcatgatgaaaaatagaacaatgaaatttgggacaagattaattttggaattgtaattttttcttcaatgaatgaagtttgatacaagaggggtgccccaatctgtaatgccaaataatatcattgtttatttttgaatcaaaaaacaaagaaagaatataaggactagatttttcaacatgtaactctaagtaaaataatttttcgtgtcttttagctatcccaatctaccacatgtgtcttcaaattgtcctcaataacacaatgatcagaatgaaaagtgaagacacaggctcttgattcaagtaaagatgtaacagaaagaagattaagatgaaaatctagaacatgtaacacatctttaagaatgagatttgaggaaagaacccatgttccaagataaaagacttcaacagtattcccattaggcaaattaacaccaaaaatacttgtatcaacataagtattttgaaacaaagacaagttatgacacacatggtgagtagcaccagtgtcaagaatccaagaaaaagaatttttggaaaaagttttaatagaaaattgtgacactgaaggttgattgggttgcacagtgctcaattgttcaccacttttttgagacagcatgttcatcagcctttgtcattgagcaaaagtaaccatgacatcttgctcaatattcttgccatctccatttgttttcccattattttgtgtatcatggaggccattttccacgtgaaacaattgaagcaatgggaatcaaagaagcacttagttgggtcaaaacaaccaattgggaaagtgttataattgagagtgacagtatgctcgcggtcaaggcaattcattctactcagttaatgtcttctgtgtttggcttagttgttaatgattgtagaaatttactattctctctttacgatgttcatttacattttcttagacgatcagcaaatcgtgctacccactttgttgctaggcacgcacgaattttatctagtcgtagcattttgggatctttcatttcttctgatcttcagactattttgtattcagaatgctatattaatgaagttgcaatttcatataaaaaaaagattggcatgaggtgctttgtcagggcctggtgcatttctattgggaaatttcccataaaacttgtgtcccaccggtaatcgtgaagtctatagtatttattaatgatatgtccttgaatactacagttgtgacaaataggttttggcttatgaggctaaacactcccaaaaaattgacctaagttagatgatattggaggagcagccttatcattctcagtgtgattaaaagtaattcctctctatctttcttcttgtaaaactgaagcaaaagctttgttgatgttaggaaagagatcttgcatcaagatttgggattgagcactgccataagattcattcagaccaatcaagaattcaaaagcttgatcctcatcttgatattcttgaatggttttcatagtaccacaagtacaaaaaggttgtggtctaaattcttgaataaagtcccaaagaaatttcaaacaagtgaaatatgtagtgacataatttgatccctgaacaagagcttgcatagatcatttttcctcgaacacccttggtgcattcttttggtgatatccttcctgaagttcagaccagattttttgtagtattatccaaatacatcacactgtcagcaatttcactggaaataacattcagaatacatcaccaagatgttacacttaaaccagacatcataagctttgtcatcaccttctagttcatgtaatcgaccatcaacaaatttaatcttgtttcttgcagtaagagccactatgatggacctcctccaagaactgtaattcttgcaactagtcaaaatctttggaataagattgacatcaaactaatctcaattagaaatctagtaaggacttcgacgatcttcaccaggtggtcgatcattaggttctaacacagagaacttatttgtagtttgagattcatctccttgatttgctgaacttcgagtatgggttccaccacgagccataattgtaagtagcaacgatcaagaatttatagaaattgagattgagcacacaaaaaacgtggctctaataccatattaaaaaacagagtataagatagaagaaagaaagaaggagaggtaaagagaatgaaatgcattaatgaagcaatgagtgagccttatatagctcaagttcaaaacaagtacaccaactgagttagttataaagttaggacagctcacaacctccctaacttacaaaactaatactgaaactaactaacaaccgatatactaactgaccaactaactccctactcttaatataggtagtttatgatataagtatttaaattattggtctaattcaaaataaaaaaaatataatggagaaaattttcttttgtttttggtaagcaagaaatatgattgtaccaaaaaaacttttacaatcaccaatcaaacaaaactcccaaaaaggaataaaaaacagagcagctctagaatcctttacaagtataactatcaaccaatctttgtctctacttgtaatttttacatttataatctctttaactctttgggacacatcaaattaatttttttttttatctttatagtcagttctaactactgtactttctcacaagacttcatttcgaactctctaaatttgatagagagctgcactcactatcaaaaacaaactttttctcaacttggacatcccttttccatgggctaaccacctgaacaaagtttcaacatttacagaaagtgcagtctgttgggttttatgccctaaataaaacatatttcaatataatcagattta

SEQ ID NO: 162381 - DNA, 2674 bp, Cannabis sativa
tgacctatagagaggaaccattgaagaaggtgatccagtaatgtggttttggaagattggagagctaaacatgttttttagctttagatcacctctgtaacctgtagctagaatcacaatatccgttttcaatggctgagattctccttcaatgatcaaaccttctttacagaagctaatgctttgagatttcttaatgacaatgcttccttgttccacttttttgaagaagttttcgggtagcatagatactctacatgaggaaatgtcttgaaaaaagctgttttgaggtaccataccatactttttcaatggaagtttccatctaagatagctctcagcaaattttgagattccccatctctgaaaaataaaaaagaatgaaaaaaacagaaacatcagaatagaattgttagtagttgattgtttttattttgttgggatgctttagttcaattggcagtgattattaagttaccaagggtgaaagtaaagtggccagtatgcttagaaggaatgtttctccaggcttgtgaaccaaaagctccgaaaatcgattaaagtagaggagaccaaaatgcagaccccataaactggcactagggagaagccagtgggaagtcctatgaatcataatgcagggatattcaactcctgtttatacaaaataaaaataaaaaaggaaaatttaggacatagattagccaaccattatgagatttgaaagtttaaactatgagaattatcaaatgaaaaaggcttaggtagaagtagaacagaattcttaacacacttcaaatgtgtaatgtagtattcaaacacaatcagacctgtccttgaagcatcagtaattttaaattctcaatcaattaaatttattaagagtgtgttgtaacacttttttgttttttttaattaaattagagaaaatattttcaaaaattatgttataaaattgttttcacttttaaatttaaaaaattagaactaaaatttgaaaaaaaaaaaatcgctttcaagtttttttttaaatggattgtttatagtctatttgtattgtctttcatcaatattttggaccccaaccccaaccttggacccgacactggacttggactcagattccaaacttgactccggaccaggactcgaccccgaacccaaactcgagccccgcccaacccgtcagactcaaacctacttttctaacaccagtttcttattcctcacttaaataaaaacaaaaaacaaaataaaatttacaaaatagacttttgtcttttgtttttaaaattaaaaacaaaaataattatagaacatattttggtttttcaaaaacaaaaattttactttcacatttgtgatttaaaaattacacaataaaagtgttatcaaacgttgttttgaaaaaaattaaaggtgttaatggaataaaaatgatgaagataatcatcataattaccatttgtctttgcacattctgctgctatgtccactgcagatttttgagaaccaacaatagtaactcttttttttctgatcatttcaatacccttgtcactatccatagcagagtaatccatggaatgcatcactttaccactgaacacctcaggtccttgatttggagggaactctgggatgtttggtactccactgaatctcccaatacaaaggattacaaacttaaattgatagacctgaccaataagagaaaaaaaaataataagacagacagtttaaaagcaagttttggagatgactttgtattttaatgagaacacttttcacatgttaatttcatatgtacctcagttgagcaagttttggtgtcctgtaccacaacatgccatttccctttggactgaaatggcttgcctgttccaccccacaaatcccaactctccatctcttcataggattctccattgacataatccaaactaaggacttttgagttgaactttatgtaaggaaaaagattaaagtgtttagcataagattgaatatactccaacacttgattgtgcctaggaaaaacgtcttctactgaagaaggccaaggaaaatctgagaactggtaagattctttagcattttggagcctggtggactctatagtgtgattccaaagccctccaacactttcttctgcttcaaacacaatcggattaaacctcttttctaaaacatatttgcaggcagcaaggccacttgttcctgctcctataatggctatatttctttccattttttgtaatgaaaacatatgctttggtgaagagacaataattgccttataatatatattgaggaactattatggccccgaccaacacccccggtccccctaatagtgtatagataacaattgctatattgataaaagactttttggaggctaaatattttcaagtgctatttcgcttacatttaactttttaagttcaaattttagtagtaaaattctccaaactattgaactaatagaaaatttaaagtattatccaattaactatcactatagactatttatatatacactcttgtatacatgacacgtttatattattatttaaaataatatttttaaataataatattaggtgtacatataaatggggtaagtaccattttggactctgtattttgcaaaagttacagattggaccct

SEQ ID NO: 162382 - DNA, 788 bp, Cannabis sativa
gagtaataatttatacttaccaaattacatacattttttcaaaaaaaaaaaaagttaattacagcataattagtgctaatgaatcaatgataattcatcaataattagtaacaaattgattttttttggactaattcatacaaatagtatgtggctacatattgttaatgtgattataattaattgataaattaataagttttatatatacaatatatttttaattttatcacttgggtttatgtattaatttaacaccctttgctaattacataagataattcgaatatttgaggagccaatataaatgtacgtacattactattaattgataaaagtgttaaataaattaacaatatgaaattaataagatcaaagaattattattattattactactattattgttagttattatcattattattgttttgatagttgtttttctcgtttatgttgtgtgatttgtttattcattttttctaaactaacttttttttcttttgcaaaataatcaccacttttttattttttaagggttatttacttatttatttattataaaaattacttttgacgtatataatgttaatttatttaaacaataatatcatcatcatcgacgtgcatatccattagtgtagattctataactttttttttttttcaggtaatattctataactttaatttcatactttttgatcaattatatatatatatatgttttctttttcgaatatattatacattcattattgagattatttcatatatacacaaaaaca

SEQ ID NO: 162383 - DNA, 4867 bp, Cannabis sativa
cccgccggtattaataggggttctgccggtattaataaacggtcagaatcccctcactcatactggcggaacccaccggcaataatccgccggtattagtcttttcaaaatttgggcggtcaaaatcccgcccaaactattagaggcggattttccgccggtaataataaagttcggccgaaaatactaaattaataaatatttaattaatttttaattattcaaaagtaataccggcggaatgctttttccgccggtaataactctattaataccggcagtttggatccgccggtacggagtaaaaatgtggtagtgtggcgaccgcagcggagtcccttttggctgttactgtgccaaagtgtcaagttaagggttgccacgtttcgctggtgaatgctaaggattaccaccggaggcacaaggtgtgtgagatacactctaaggctctgaaggtgatggtttcagggttagagcaacgcttttgtcagcattgcagcaggtacgttaattagtattattgggtctatctcttagtttctctagctaatacgttatttggatttaattaattaatgaggaagaactactgtctactgttaatacgagctttatgtgaacaggtttcatgtagtgtctgaatttgaagagtctaagaggagttgtaagaggagattagcaggccacaatgaacgaagaagaaagagctctcatgattctattgctagacactcgtcccatcatggtacgctttattattacttcaatttttattctttttttttttttaaagaacttcaatttttatttttactatatatattttgtttgtttagagtaactccattaatatctttatgtgttctttatttattcaattgtgattaccaattgtctattagatgcttattttaaaaaaaaataatataataccaattgtacatatatgcatacggacctcaaagaaaagggaattcaaactatcatggccaagtcagagtcagacatatgcatgccaaacattttctgttgtcttctgttttgtaaatgatactaattttgatgtcacttcttctccaagagtttttagttttaaatatttaataggtttcctcagattaatattgcaaattgtactccatagtttcatgaatttattctgcaactttgtttatagattttatttatatgatcctatgtgtacatgagcaaattaaattacctaagaaaaagtcatttctttatacaataaaataagcactcggctgatcgtttgtatatagtacttacactactacctactaattagggtaagtatatacagaggctggaaacaaataaggatactaggtagtatagtaattacagtacattacatatatcgattggattccttcatgattttaaaaactgtagcaacttcatacaatttactttttttttgtgattttaaagggaaaagtagtcaaattatagtttgttctgcatttggcagttttgatgattttataattggccattatttaggacaactgcttacaattctcacacaccaatccttgttataaattaaaagcctgaaaactataagaatatttataatgacattgtatagattggatttccttcatgatttaagaaactgtagaaacttgatacaatttacttttttggtggtttaaaggcagaagtactgatactatagcttgttccggcatttgccagttttgatgaatttataatcgccagcctaaaaatataagaataattatagttgtatgtcaatatatatatgattaatttatttattataatgctctttgaaatatgaacaatttgaaagttttgtagctattaccctataaaatgcatgtgaatattcatattttatatattgagtgggtcgtttctatttaaccacgctaattttaatataatatatagaattaagataataaaagttgaagtcattgtgaacagagaacaatatagtagtgggtgggggatttccatacatatggcaacttccacgatcggacgtgctctctctcttctgtcatctaagaccgccgattattcgggtgcccccatctgaatccgacctctcctcaagatcaagcgcagcccttcgtgagctcattgctgaaaaccgcgcaaccataatggctcctcagctagttgtggacggggacgcatggccctcacatcacgcccaccatcatccgcccagggatcaactctttggttccgaggccccacgagctttcggttcaatggagtcccaccatcaccacaacatatttccagagcctcaccataatggtggctgggaaaggataggcgaaaatggtatgcatgtcacgcttcacctgatgcaggcaccgagccagggttttggagcgttcatggcttccacgggaaaaactaagactgaggaagatgattgttctgatcaccatttgtggaacttcttacagggacacaatcttgtctagaattcccgtcgaagagctgagttattatttgagaagaaattgtcttaaaatattaatcaattttattttcctttattcaacacttgtctatcttgttgtgctacgaaggagtggccctaagatgacaattcttcgttgtttcataattgcatgctttaaaaaagaaggggaattattcaaagcaaaaaaaaaaaaaaaaaagggaaagtactaattccaatacgttccaatagcttcaatatatatctaatgactatctaccaggaaattacacttggcatgattgaactttgtctatttttgtatggcgttttattgttttatgtttgctatattgttataaatatttttctaaatcacctatttaatattttaaagcttctttctttttgtttgaaacatttagtagaaatgtattgtattcaagaaattggtttttcatcaagaaattgggtttttcatcaaaaaactaattttggattgtatataagtaaaatttatacatgaatttttaagatttttttgatattttttcttatctatgatggtttcatcaaaaaccgattttttatcaagaaatttgtttttttttaacaagaaattagtttcttcaccagaaaattatatgagcttttacgtttttttttatagtatttcttttttatggatgatgatatattaagtttttttaaaatgttatatttggtgtaattaagtttgcatgccatatacactagaacttctatctaagaatactctattcaagaataacttctaatttttttataaaaaaatcaagtcccaatttgggccaattataaataaaaataacctctaaactataattaattatacatttttaaagtcacgtattaacacattttcatatacatttttcattaacaaagaatgcaccaaaattatgatgaaatcttgttttaaataaactaacttttcgttgttgcgtgtagctttattaagatcaatcttgatgttgttgatccccaagatttttcctctacgtacaaagtatctattcgatcaataactacacaatgaaaagcaagtataaacacatctaataaaggaaaaacttgtgaaaagcttttggcccttgcatggggagtctcttgtgaaaagcttttggcccttgcgtgggtctagtctcttagtggactggttattgatcttatttcctcttctcggttagaacatttggaggtatttcttttctgactgcatcttggcgctcctgtttttattggtgttgtgtctctgcgttgttccaacaatggttgtagttgaggagtttgctgaggttacgctgggagtggattcggtcaatcctagagcaacgaaacttttggaaagggaccgtgaacttaaaattgagatgatggagctgtttgaagatctttctctggaggatattgtggtcaacaaagcttgtgtgggtaaagtgatgggttgtaaaaccatgccagcttcggttgttaggaagatactactgggcatttggaatctggaacagaattggaggatgaagaagtttgaagagggagtgctgagtttcttctctgaatcggaggaggactgcactagggtcatgaatcgcagactgtggttagttaacgatgtccttctgaacctcaagttgtggcctgttgagggggaggttcatatgtcggaattcgatatcgcccgtttttgggttgagtttcacgggttacccacgagatgtctctcggaaaccaacattcccattcaagcaaaaaaggttggccaacttgtgaagtctgatgccaagcaaaaggaggaggttgttcatcggggatttcctaaatgctggactgatgtttggatttgtcacccgttccctgcggtttttttttctaaaggcggatgcaacactagagtcctgggttcaattcaaatacgaaaagctaccgtatctttgcttcaagtgtggcaagttagctcgttcaagcagggagtgtgtcccgcccacggcctgggttactccagcccaagggtcttcggtgagaatgtatgggccatggctcaaggttgaaggagcgactgggaactgttttacaactgcctcttttcgacgagaactcattctttgtaatgaaggcataaatctgaagggagggagtaccaaaaacaagggcattggaggagattttctgaaggctgccggaaccaggggtgggaccttcgtcggagaggagtaacgaggaaggacaagtggcatcccataacacagttgattatatcgtacatgttgggttttgtgccctaaataaaaccccttacaatctgattagttatcaatctaagtaatttgaagtgattcatgtttgcatgaa

SEQ ID NO: 162384 - DNA, 2286 bp, Cannabis sativa
  modified_base (2259)..(2261): a, c, t, g, unknown or other
atatatatatattatatagctgctatttgactcaatctagctctatatgagatcatgcgtgaccgaatggaacacctatatatattaaaaaaatcaatacatatacatatatatatatacatatattagcccttagatgtttcctataacagttgtacatataaaatgtattatttattattttatttttttgaaaagcatataaaatgtattaagtggtcctgaaaatgaatgaatgaatggagattgaataagatgtaataaggggaatagtaaacgtggggatatatcatatatgtaatctttacacaataccataattatgtgataaatttttctgattaattaaccaataatattcatgtaagatggatgtgactccaatctaagttaaaaataatatcgtgtattttgatgtaaaaaaatgtatgtaaaaaattgtattaaatttgaccaaaggaaattaaaaagtaaatattataattagtaaaataacaaattgacataaaagtaataaaatcaaatatattttaaaaaataataacaatattgtaattaagaaattgcattaaatcacttattaatgcttaataaaactattctaaataaagaaatgtattaattgtgtattaagtttatattttgtacgtaataggtcaaatttttagcatggctaagtttaacaaaatataatattacactacttatttagtgctctattagaaataatataagattaactctaatggggagagctggcttatgatgtgagtgaacatatttttggcaacattaaataattatttaccattggagtgaaaagggctgagaagaaagattttcaaacaacaacttttaaagttgtttaattatttttatacaaaagttgttaaaaataataggagtgagaaagaaataaatattagattgtgagattcaacattaattgagattatatgagatgctcaatcaattcataaccttcctcaatcaattcataatataatatttgtttgagtgtgatataaatgaagaaaaatatatttataatatatttatactatagtgacactgaaattaatctgacccaataagagtgggtagaaccaactagaagtgatatatatagaggaagatacaagttgtagaatccaagttgcacttgcatgtgaacattgtgaggtactcaaaactctatttttttctttctttttcaatacaagataatacataataatcaataacaatggtaccaacacactgatgatgtgaaatacaactcatactacaataattaaatcactggatctctcaaaaaaaaaaaaaaatagttaaagcactagacacaccataatgccattagaactaaagagagagaattatacatttacacaactcggccagtgacgaagtcagaaaattagttgagtgagagcttaaataaatattaaaataaataattgataaatgcatccttttaaattttcatcttcaacaaaattaaataaaacattgtcgatagtattattttatttttttaataaagtgttattttttttattatgtgtattgggctacttttaaaatgggcttgattagaataagagtaggctcatgaatcatgattaagatattgagtgagggctattgtaaattgggttttaataaattgagtgaaatgaattaatatatgtatatatctacatgtaaaaaatttgatgtatatacttgagtgaggacttaagcctacatataagctaaagtccctccgtccctgattacagctttgacaaatgctaaaacagtactaatggtatttagtggtatctaaatgtgtcatattattgtcgatgtatttaagtatcaaattctaataatttaatttaataattattatgtaatatcactaattttttagaagatgtcacatttacataatgtttgaggaaaaaatggcataaaaataaaatgatcaaagctcaaccaaatattgaaaaattcaataaaaaagcccaacaggctagatatagtaactcatgaggattgaacaagactataagccccaaaaaaagaaaaagaaagacaaagaaaatataatgataaaattatacttaaacccaaaaaaggccaaaactaggaccttccgcccaggaaaaattaagacattacgtgccgagataaagggaaatttacaaaaatactgaaatttgggttaacttttacaaaaatactgtcacacggaatttttttcaaaaatannntgtttttataaaacaccagtaaaac

SEQ ID NO: 162385 - DNA, 1659 bp, Cannabis sativa
tgcgcgtggtcgttttagccatagggctagccaagggtggtcagtcagcttctttgacgaagctagtctgtgacttgatgtcccgtttgagtgttgggatccttgtgggcttagttgctaacttgggcttcttgttgatgaactatactaccacgtggtgctgatgtagtccaactcgaaaagaggaaggattttaccacttccattgagtcagtccatacatagcaaatgtgaacaagagtaattgcagtctttaccatcaagaataatttaataccctagtccttacatcaagacatattaccttccagaaggctggccctttcaagatacctgctccgttaactgacatgaagaggaaagcagatgtcgtgcttattgaaattgattcgtgggaagacttcttttaccactaaaaatctccacaaatttagtttgataatgtcttgtcagtgagtttatgttgacatttatttttaccgagattttgggaaaccgattttatttagagcttaagaaaataatagatattaaacaatagacaaacaaatattttacgtggttcaggcattaatgatccttagtccacaagctaatagtattagcctctttgtgtaagtgttcaggtattacaagtgtttacaataatgatctctctattcctcttgtttctcttgagagaaagctctttaggaattttagcagagtgactgtaaatggaaaattgttctccctttcgctcaaagaaaataagactatttataggcacacattgggtaaagggcataccttttaccaacctagggtttcgtactccacatgttgctaagaccggtacaactaaaggaagatataaatattgcttggtaagaaccttcttcaatgtgtagcgtacacttgcagtgaggattttcgtacaaactaggatatgtgccaggcaatggtatctcctttcaaaaatactttcgttgggcaaaaagcatgtccaaaggtgcgtatgcgcactaccatggcctggcatggggaacaagatctcatcctgtgtcagaaaaaggtgtaaccgtctatacaataatttttgtatgatgttgacgtgttctttacctgcgagattgttatttcaccccatgttcatcgcttagaggattgtcatctgagagtcgctttccccaaccatcttctgggtccgagagatgttgttcgttcgtgaatgggtcgttccatccggcgtctcagtgcatatatttggaatagctgggatgttcctccgaaatactttattagttatctcgattagtcctttttgctaatacactttgtccgttaatcatgccacttgtcttatgcacgaaaacaaggataacatttaaccaaaggcttttgagactctttgagatacgggtcttgtcatccttccccagtaccggatgttgacacgtgttcatgatttaagccgtggatgcatcttttgcatgtgttctaatctgctaagggtaaatatgacatttacatccacttgcatggaaatcacgcggtacattaaaaatcacatttggcctctttggcgagtgacaaggcgcgttcagcaagagaagtggagtgcaaccgacgactgaatgatgtgaagagacccatatttattgtaacgccctgaataaa

SEQ ID NO: 162386 - DNA, 5066 bp, Cannabis sativa
taggatcaaggagctaaccgtagaaacttccactcttaatggcatcttcgttagcctcaccaagagcagcctcgctcaagtacttgtcggccaactgaactctcttcacgttatcttgctcttgcacaagcatgtttccatactccaacagcttctcaattgtcatctttggttgctcgaatgttggtggtccttctctcgagttcacaagcttcttcccaatggtttccactcccactcctgagatccactttctcacttcgtcgtcgtaaactctcgccctcaacgcaccaaagaaatctaataaatcaccatataataaaaaaacaaaacattaattagattataattattataagaacagtatgtatgaaagaaaaagaaaaagcgcgcgtaccaatggattgtccagggaaagtgtcgacaagcttgacgatatcgtcggtggcgacgttgtcggttttgaagataccaatgcagacaccaatacggtcttcacgggtgggtgcccagtagaacttctccatacgaccgtcacggatgagaggagcgtacaaggtggagaaatcgttacctgtgacgataatggggacacgtgggttgtcttccttgttgtacattccggggagttggacattggttgggttatcggcgatgttcatgagggtggcgttgaccatctggttgttgactgtgtattgggtggttccacccatacgaccagctccagcatcgagatcgttgatgaagagggcacacatctttcccttcttgatgatatctgcggcttcacggtacctttgcctgatcagtttcgctggctctccggcatttccactttccaattctccggcactcatcatgatagggctgcaacgtacacattctcacttattacacttaataagagtaatgtaatttaatatgtaatgtaacttagtaattaagtatattgaaatatattatgtaagatctttataacaatacagtttttactttataacgtatcaaatatacatatagtttataggccacttggtggtgttattaggttgtaaagaagttttgttggattaatatcatcttgcttagtaaccaaaaaaaagacatcaaatataaattaaagctataagacaatggagggttcgatttggatagctaaaaaaaagtatgaaatatatattaaagctactagacatatatgtttttagaaaaaagaaaacaagcttgaatttgaaccctatagagcaaaattattaaagcgaagcaattatatatataataattgtgagttttacttgtatatatactatatgtaataaataaatgagattttttatttttacacttttaataagtttttttttattattattttatttttatagacatttatatagtaatctatatagcaatgaacgcaataactcaagtcgcaattaaaatttacataacaacccacttaaaaattactcgagcaattcaaatagtaaattaaaaaaaaaaattaaaaataatatatagatcatgcattttcctaaaataaatggcaaacacatgggtccaccttttttcatagagcattactatgaaccacatatggtttagtgtcaccctatcattagttaacgattttttataatatttattaaaataaaataagtgtaatctgatattgagtttaactaataaggatattatacttcacaaaaaatattaagcaccataagtaccctttaacatttttctttttcatcaaaatagatgtgaacctagaattgagcagaatttaaagtaatacataaaattttcttacttgattcccatcttggcaaacacaagctcacactggaaagattttccttgacccttgcctccccaaatacccaagataagaggtacctgtttcattaatatacagttataacttcaaatatcgactattacgaaataattaattaataatgtgatgaatttgatagtttaacttgtgtacgtaccttgatgtttggcaaagtcatgtagttcttggtgatgtgaacaacaagcttgtccatgaaagcaggggcaatgtagaaaccatccatgctgttgtccaagttgtacctaataaaataaacaataattgagtcaattaataaaaataaagaactacacaagtcatattattagtaaacgaaacatgtatagagatagagatatgattaaactcactggcgaagtccagtactgaggtattcataagagctgagtacagcgtagtgagttccagttcccatgggagcttggaagagtgagtcaaccaaaccctttcctcgggtgatgtcttgttggtcatctgatgtgtcataagcaagacccttccacttgtccttgtctgtctgtttctttgagtcctcatctggagccgccgctgaaacaatcttaaacttcccagctgaaaccttggagttgttcactctggatgtgttcacaactttcttcaagctgtttcccatgaagcttgagcttggaactgaactggttccattgtttgacccatttaagctcaactgtatgcactcaacaaaaataattaagtacacacactcatactaatagttattatagaaagttatgaacttgatttgataattagatacacagaaattaaaggcagaaaattaggagaggcaaagctaattaattaagtacgtactggagctcggttaacggctccgatggtggacacagcggcggccatcggtttcgtccgagatggggcggcagtagttagacttcaaaagattgattttgaaaagagaaatagtaatagtgcagtgttattctcctaaagtcgaaattttgggaaaggagagaacttatagaggaagagttttgagtgtaccaaaagggatattgtgaggattggtttttcaaatgactaacggccacacactcaagattggttgaatgacacgtgtcacaagaattgtgtgcctgaattgaaactggacctttcttttggtcactttgaggttgaaatttaatctatctccttctccacaaaaaacttttacttatgtagattattgcatacagaactctcgaaaaacaaattgatgttttttttttgtttttttggttccttgttaatttaattttcttttattggatgaggaacatttattaaaagacaaaaatgtggatgacgtgaataagatgtttgtgattggcaattgttcttgtggattatatttattttatttactattattatttccaaatataatgtgtggaagtaattgaggtagatatcactatttgatctatatatggtagtaactgttatgtcctaccaaagcttcctaagagaaagagcttcgcatagcaccaattcaacacaagcatctctgctatacattgctttccaactggtattaaattccagttttttaatattatatatattcatgaatgtaacttggtatattatagttaccagaataatttcaaagtgataaatcaaaaatcagtcactcattccatacaaaataataaataaattaattcagtcattccataaaaattgatgtcaattttggtgggccgaaacaattaatccttcttaaatacttaggtggtgtttggtgttgagaagaatgaatgtaagcccctaatccttacatgtatgtatttataaattaatttataatcataaaccagcagtttaaacaaaatgtgcatagtccctttttgcaattagagaccccctatttaaaatattacaagacatgctaaagacatgctattatagtaatattataaaatgcatttaaaagttctaaatatttaaaatacaattcctgacaattcagcactacctgctggataagctgatatatacaattgttggagaagattcttgattcatggttgtccaaacgtctctacctattacgtgcaccacgtagcactcgtgagtcacaaggacttagcaagaaaagtaataacaacaatcatataatatattattcaaacatcatcatttatactcagacaatcagaatcaaacgatcacacattactcatgagatgaaatacaattcactattgacaaaaatacaatttttgatttccttgaattttccaaaaacggtaaatcagttaggaaacggttaaccgcttcccaacgaaccggtaatcggttgcaccaagcggtggagtgattcgtcgcaacagaagtggaaaatcctaaatttaacactcactgaaacaccacccaaacctatcaaaaacattccaaacttcacatggcacatatataccataattacaacaatctttacgtaacaaaaattaaaatcgaaccgttaaatgaaaaacgtcattaatgttcgaacttaagctttaaatagttctaaactcgagttctaactcaaaatcacctcaaattcaataaaagaacatcaaaactagtcctatagctacccaagaacaattccatgaagtcataatctccataactactctaaatcacaaagttactacataaaactaattgtattcaacttaaacaaaatcaatatttatcttaagctctccatctttgatgatttactatcttgctactaccggagcttgaattgctagattttggattgaaaataaaaaaaaaaataataaataatgaaagtgagggtttcatcgcaccaaaggaagaggattcattcgttcttttattttaaacttttaaaacatatataataataataataataataataataatatattactaataatattaattttattattttttttattaattatagttattttattatattttaaccactaagaaatctttaaccctatgatatttggtcaactttgagtatttcaaaataccttgatatttttaaaatcaacttatctcaataatctcattaagattactaactaaaattgctgtggcacttggcttctaatcgggtcttcaaggtcgccgaacataaaaataattttatcgtacaaattgttggaatttattttaccagaattttagatctactcacaagtat

SEQ ID NO: 162387 - DNA, 3776 bp, Cannabis sativa
tttgcgatatgtgactttagtcgcgacatattagaacataataattatgtgatgatctcgatatgtggcgacatttcacgattaaagtagcgacatacacaaacataaataatttattggaatctagacctcacaacatccaaaaactaccttctggtttgagaaagtggcaagaggagtgggatactaggaactccctgaatcaggcttgggaaaggaaagctttgtattggaaatagagattcagaattgcatggcttaaggagggggataataattctaagttctttttcatttcggctaccattagaagaaggtggaatgttattgagagtattttggacaagaacggtgtttggatcaaaagtcttgatctaatagggaaagaatacgttgagtattttagtgtaactttctctaggcatacatgaggggtggtgactaacttagaggttcttattcacgaccaactctctagtagagagcagaaagacctcatttgttgtccagatgcttaagaaattcaaaggactttgtttaacattgatagtagtaaggccccaaggccaagtctcttttgttcttcaagtattactaggagattatgggtagtgacttttgtgattcagtcttagattttttttctgttctggttatttgcacaaagaaatcaatgcgaccaatgtggtgcttataccaaaagtttcaaattcgaaaagggttactcaattttggcatatttctctctgcaatgtcacgtataaagtcatatccaagatacttgcaaatagaatcaagctgatcttacggagaattatatgtcctactcaagagacgtttgttctaggaagaaacatctaggataacaatgtgattgctcaagaaattatccattccttcaaagctaagaaagggaaagaaggttttttcgctattaatatagacctggtcaaggcctacgataagttgagttggtaatttattgataatgtgttagctagctttgatacctcagtgaggttttataactggataaatcagtgcatctccactacttccctcaatgtttgccttcatggaggccaggttggaaaatttgtccctttttgtggcattcggcaaggtgatcccctttccccttatctgtttatctggattgtagaattgttgtcaagaattttggaggaagccctgaaaggggggattaaaggggttaagcttagtcgagaagggcctcgtctatcacatattttctttgtggatgatctgattctggtaggaagagctacaattgtggaaactagggattactggaagtgcctagaaaagttttgctcttggtcagaacaacgtattaataaactcaaaacgtctattttttcagtaagaacatgagtgatggaatgaaaaaagggataagggacttgctgggagtcaatgagccaaaaggaaatattaattacttggggcaccccttgttcagatcaagacagaaggatgctaattttaatttcatccttgataatctcacttccaagctccaaggatagaaagttaaaactctctcaaaggctgggtgtgccacgttaatcaaatctgttggattatctatgacagtgtactccatgcatccacaaaactgtccaacaagatggtctcaaatatagatggcatggtgcgagatttctagtggggctttgagaagggaaacaaagggatttatctgaaggcttgagataagttgtgtctccctaagtctcgcgggggtcttgggttttgtaaaactaaagaaataaatcttgcatttctcgctaaatgggactagaaccttttgaccaggagccaatctctctgttgcaagattttggaagctaaatatcttaggggcaaagatttcttgaagggccattataagaactctgattcttggttttggaaaaatgtagttaaagtcagtgacattctcaggaaaggtgcttgtaaagtgattgttgaggggaaaggcgtgaatatctaggaagatccttgggtgactcataggaagcattttgtttaaaaatctaagagggttccatccaatgagtttaacaaagttgccgatctactggctgaaaaatggtaattgggatattcataaatttttgaccaggaaacgatcgatgccattttaaaagggggtaggccttcgggtcaaggcaatgattactgggtttggactagggagcctaatggtaaattctctagtaaatcgacttacctagtccaagctcttcaacgagcccctcattgtgatgtttctccctcactttggaataggctctagaatagtagaattctcgagcgtcacaagatcctttggtggagtgttctttccaatgctttgcttgtgcgttcagaattaagaaagagactgtagatcaatgacaacctttcccctatttgtgggggtgaagaggaatctacagaacacctctttctccactgttcgttggcattccatctgtggacgttatttggagagccctaaatgacaaggtacataataataatcttgatatcataaaatactacattgactccatttctgattgttatgcagattacagtgcttttctcatcccacactcttctcttgactagatgtagaagtggtccctccccctctcgactggatcaagctgagctgtgatgttcgtgtggggatggaagatatgtgtttagcggtagttgctcgtaaccaccttagtgaggtgatctgggtgacaactaagagattatgcttttttgaccccctttgtggcaaggccgtatcttgttgtttggctcttgatatggtggtggagtatggtcaccattttgtaattgtggaaagcgactctagtgtggttatcaacactgtcaatggtgtttgtgctagatgggagattgataacaatgctaaccattgtaaaagacttttctcagttggttgttttttttttccaagattgtaagaacttgtaattttatggcccataatatagtaaattgggcgtttatccacaagaggattggtatagtggatatatcttctataccgagaaatattttttgtaatgaccgagaggtgtcattttgtttaattaattaacgttttcttttttttaaaaaaaaaatattttaccgatttcctcacttctttgatattgtttaaatttctcaaaaaaaggcaaacaaagaaaaaaaaatgacaattacacgaacagacaaaaaaagacataattaagacattgaaattctataaatgatatttttacagtaagtttttaatcaatcacataaattaatataggactttttttcaattttaaccaaaagaagtaacaatattacaaaaaatacttccagctggccaaataaataaatatacatcccaaataaaaaaaattacacaaatacaacttacacaccttcaacccaggatccatgcttcttgggcaactatcgtgcaaccatcgcacaaccacgacgcaaccgaaacaaaaattcaaccagaaagagaactaccattaatttcggcgacttcacctaagaagacaaccagaatcaatcaaaacaggcgctgtttcgaattcatgaaaaaaagtgtagaaaaactactacgaaacttattgttcaaccggaaatctagcttaatttgcataaaactaatgtcctaacttcaattttcagatccatgaaaggcagatctcaaaaagttgaactggagttcccaacaatccaactcaagtataatc

SEQ ID NO: 162388 - DNA, 1512 bp, Cannabis sativa
taatatcatgtgtgaatgaatttgaaaaagaagaaagagtaaagatggagttttggggagtgtgagaagaaagtagtgatgattgatataaatgaagaagaaaaggaaaatggggttgctggcaatgaatgatgagtcatattgaaactagaaaacaagaagactcactgttgtcctattaatactcactattacacccaaaaacgtagtctgttttttggtcagacttctctctcatctcattattcatttattcttttaaaaacaaaaatgaatttctttgcttttgtttctttgtttgtttgcgtgacaggattgcactttgacattaggccaacaaaaaaagtgttcagtgtttcagtgtttgcttttgcaatttcattcatactctctctctctcagatgaaataatgcactttttggcttcttctttactttctacaatactttcattgctttactcttctctttctttgtggagttttggattgcttttaatgggtttcttttgttcttttctctatttctctctctctttttttgacaatttgtgttagtaaattacttcttcttttctttggttatattataattataccctctcttcttttactctttctttgctatttccaccatcttttccttccttttctcttaatttctctttttccaaaatattaagccaaaagggtagtgactaaattttgagacacctaaattctgttttttttttttttatacccatatgatgatattaaaaaaaattcaatgcctaacctatcttattttgttgtcataaagaatttttgtttttttttttatcttcttgcctagttagtaaaaatttgacctttactatcttcttgctcttttccaattatatacaaagaaatctatattgcaatgcctaacaaagccaaaacacacctctacatcatggatataagactttgacttgtaagaatctttattactaacatgtcaaaggtgtaactttcctttttttttctacattaaattttataatatacaattttttttggtaaataaaaaggtggagaaagaagaaaaatgaaaacacacaatagagatagtacaaaagggataagaagaataagaactaccaatttttcaatgacttatgaaaggtgcttttgtatagttaaatcttaattgtatattatattgcttttacttttactaaattaagaagtgatgtccaaacaaaaagcttttatttattttaaacaagaataatatattcccattagagagttttctccactaagaataatataagagagtcagctcttaatctctaactcattaagcactaaccaacactacaaaatgatcttaaatttgatggttgagattaaagaatggtccactcttatgtcatcattctcagcatccaacaattttttgtaaacccttttttttataattattattattattatttttgaggtaattttttttttttttttttttatatatatattcaatata

SEQ ID NO: 162389 - DNA, 4126 bp, Cannabis sativa
atatatatatatataagtaaggtgttaattagtatgttttgtgagtaaataaatgcaggacttgattcatcatcttctaggagtagtgtgggtggtattacttcagatgtctcatcatcagctgccaaaaagagtcgattcccaaacctcagaggttagtttcatttcttccattctcttcttaatcaacactttggtagataatgtaactcttgttgattttctcaggtgaaacaaacagaagttctattgaagccatggtgagttctctgtataaatacatgccatgtttaccaattcataattttgtattaacaataatgaattgtcttatcaggtgaagggcacaggaaaagaatcattacaatggggtgagtcagtcacgagcatgatcttcttaattacttgaatttgtattaattggtgtatcaatggcaggactggctgctggagtgtattcaggtctgacctatggactatctgaagctcgtggagctcatgattgggttagagtctaaaacataaacaatatgcattaggtagtaattactatgcataattagaatgattaatgtttgttttggttatggaattttggtgtagaaaaacagtgcagttgcaggagcactgaccggggtggctttggcacttacggcggaggagtcttcacatgagcaagtggttcaatgtgccataaccggagctgccatctctgcagctgcaaatcttctctctggcatcttttgataatcattatcaatcaatcattttggcatatcttttagtttttgttgctttttgtagtagtagtatttcttatgagtgaagatatttggcacttggattgtctctgtcctttttttcatcctataataataagcagaacataattcataagtttcaagaatcaacccaaaaccccattaatcttgggttaattcctgtgtggaacaaaaattatcttttatgggaacagtttagtttttaacaagacatgagcaagccctataattaattggtcatcttactgaaataggtgaagttcaataatcaaaacactatcccatgcagtaaccaaagaacaagagtagggatattagggatttttggttttgtgcttggtttttatgtaatgatggtgtgaaattaagagtgcaatacaatgaccaatagggctgctcattggtttctaattgttcatatttttggtaattttttattttcattaagtttataatacagtaagtacatataaaagaattaaaccaactttttatttccccaatagaatatccattaacatttaaccaatttcaaattaaccaatctatctagtaagaaattaaaacttcttcaagaatattcaaattatattagagaaaagaggaaaaataaataatccacatgcgccaattaataagtcccttttctggctgtggagattttctaatcgatcttatatgtcttctcaaatgtaagattgttgcttgatcgaatttatcgaaacatcaatcgatatttacatacattctcttcatatatacataattattttgtaagttttcttgctatgagttaaggaaaaatgagttatctcctcctcatgaatatatgatcaaaaattattttagtgataaaatatatttcataatgcgattgtaagaatctacaataacaaattagaatttttttactgcaaaatacaaacttgctctaatagaatagacacaaaaataagttgtgcaaagtttcaaacactactagtctactgagtcacgcccagtaaagtctcaaacaattgatttaaacaagttaagactctcagtaaagttctaccgcaatcttttgtaatttactttgtcaatttaattctgaacactaccaaaaaacgaactccttttgtcttttgatgtgtcagtgcttatttcctccttaagtaagactttgacaaatcttcttttgaagaccattctcttgttctatgaagttcttcaatctattctaagaatagtttaagaacaataaacaaagattaaaacctaactgaacactctaggtttttataaaagctctcctcacaaaactaagatatatgaaaatatgagagtagaagagatgagaacgtttgactgtaatctaagtcctatttataacatatagaaaccctggagacaatcacaatacgtttttacaactgtgcaaaattttcttaaaataaaccccaatttatagtgacaaatcgagaaactttctaaatgtctaagatcatgatttgtactttaattcctgtcatataaagattatatgatctgctatatatatgaacatgtatagtttctatgtttataagaagtgaaacaaaggatatttattgatcaagtaacatgttgtgttgcgtgcttttccctagaattttcttgtcaaaccagcacctaggagcaaccatctcactatctcaagtagtgttctgttcattctttcagccaagatattttattagaaagtcttaatcactgtcttgtgtctcagaattccttctttagcacaaaatagtttgaatttatttgaatagaattcaagtccattgtttgttcttagaactttaagcttgttcccttccaacagcttcttctattatacaaaagtgctaaaagcctcgttcttatttgattttcacttactaaattaatagttggtgcagcagaaccaactattaagtctcagtccaagaagtacaatccattactcaactttccttgcatcaaggcctgtgacccttgtctgattctcatcacaccatcatctatatctactatgtatccaagtttgtcaaacatgcctatggataacaaatttattttaagttctgagacatatatgaccttgtgtagggttgtgatttgtccaacatgagccttaatcttgatagtaccaatccctttgatgctactggctttgttattgtgttctttagtaagagaactcaataaattctcatttgatgtcatatgaaatgagcaccctgaatccatgatccattttccacctaactctgaactggatgcagcaagaactcctgcagattcataattatctgcaacatcagcctccccttggttcttgttcttaccttgattattgtctcttctcagcttaaccttcaatgccaaacagttatatctgaagtcccctctttcttacaataataacactatttccttgagtttcttttggaatttaaaccctttatagagttcctgatgtttgtcttagattgattccctttgtacccatttgaattatggtttcccttgtattctttcttggggtaatttcctttgacaatcaacaatccttctctattgctctcccctctttggcaaagagctgagcaatatgttttctgagttctctagtttcatccatctgaagtgtgtagtcttttcttgagatacaacttgtttggtagatatttctttacgtagattgatgacaactggttccacagatcaactgccttttcaacagcagaaaattttctcaacacttcatcaccaagacttagaagaatggcactgtgtgccttggccacaatctcaattttcttcatcttgtcctctatgagattcatagcttcatcatttaatgcctttgagatccctgaatgaaccgaaaaatctttctttattctccacaagctaaagtcatttgagccattaaatttttccacctcaaatctagtagtagccattaaagtttggttcttggaagttgaatctgattctttaaagtttaaatgtggttcttcaagactttgaatgcggatcttgaaacattcaactagaactcgtgctttgatatcatttgatgtgagatagattcacattaaattagctgttatgataaataatagctcataagaatcacaaattcaaactttaaatcagaattaaaacttcaaaccaaaaaatgaataaaaatagaggagcttatctcaaaattcaatggcagcaagaatgtattcttttattgattattaacacattacaaccagagttcttacaattattttacactcatcaatggtgtatcacactaattacaatagcatcactagggtaccccc

SEQ ID NO: 162390 - DNA, 1257 bp, Cannabis sativa
aaagaaagaactaagaagacaaaaatgcacaataactttgtgattgtttctcttggacataataaacccttcaatcttacctgaattttggtgctcaaatcaataactttctgtagtatcggaagggtctgcccttgatctccagaggcatcttgggttccatttgacatgctcgtctcatccgtcaattcaaaatcgccctcaaatttatcagaggtaatgtctgattatcacatttgagaagaagaaattggccattatgagcagagaaaaacacaacactttagttcttataaaactgattcacgctgaaagtctcaattcaaaaaaaataactaaaggactaattgaattcagtaatatcctgcgatctttgttataaatttcaatttcaaggttctacacaacctgaccccccaagtcaaccatataactcattgggattgaaatcaaacgacaaaacataatcaagaaacctaaaaattgaaaaccctaaaaaagtaaaaaaaaaaaaaaaagtgcattaattctatttttccacagacgaaaacagaatgtgtcagatttacacaagagaagaaatctaacttcgttcaaagacgaccgaaggctgggaatcttgatccaaagcactttcgcagttgtctgaaactatttctaacgtttgatctgcataggataatcaaaagttcaaaataaagaaacgttgcaaaatttgaacacagcgcaaatcgaagaagaaagaagtagaagctaataccagaaggaacgtccatggtttcaaaatgagagcaagattgcgaatttcagaaagagaacgagggagaacgagagagattgaggacgaacacgaagacttgaagatctctaagagctcagagcgtcaagtgtgtgtgtgtgagagagagagagttagaggagagagagtgattgtaaacgttataagcgttgtaatggaagggtagggttttgattgattcaagtttgaattgagcaattttggaccgtcggattaaactgattgaaaactctcattctaacggctatatttagtgtcatccggagctccatcgggtcatgagtcctgattccctgtgaacggagactcggactaattgtcgtttctatgaaaacatttcacgacgatttcttatgtcgtatgtatatttataagtagagtaatttgcttaaatttaattttcagttgcaaataaatatctaagtttaatttttagcggtaataatagttaagttata

SEQ ID NO: 162391 - DNA, 3286 bp, Cannabis sativa
  modified_base (3170)..(3172): a, c, t, g, unknown or other
  modified_base (3229)..(3229): a, c, t, g, unknown or other
actcagactatcatatacaaaatgacaaatgtttgaattccgactagagagatggtcggaggtcaaaagtcaaaaggatagatattggccataatagagcaagctatatatattccacgcgtgaaagcgcgtgacaaagaaacacatgcttcccatggttttgtttttattttgttttttttagaccactctctacaccacttatcctcaaaatcctcatacacgttctccatgtccttatcatatatatcactacaaagtagccctttttctcctcttatatatatatgttccttttggtccctacacatcaccatatagtatgaacaaatcaagactttattacaatatttattttttaaaaaaataatcaataatttcttgctttcacaaggcaagcgtagagacaagagtgtagcttttcttgtttgtttgcatttatgatccactaattaccaattatttatacttgttttagaaaatacttttgatgtgatgccatagatgatattatactgggatgtggcctaattcattattaattaattattcaattatttttgtgtacagatgggatgggtaatgaatgaagtatttcgactatacccttcagcaccaaatgtgcaaaggcaagcaagaggagacattaaagtgggggaccgtacgatccctaatggcaccaacatgtggatcgacgtggtggccatgcaccatgacccagccctatggggtgaggacgtgaaccagttcaagccacagagatttaaagatgacatattatttggaggatgtaatcacaagatgggatttttgccttttggatttggaggaagaatgtgtgttggtaggaacttgagcatgatggaatacaagattttcttaacccttattttgtctaggttttcttttaagctttctcccacttatactcactctccagctattatgctctccctaaggcctacccaaggcttgcctatcctattccagcccctttaagttaaccctaatatatataattaaactagctggctagcactaattattactatatattgtttatgtctaagtatactgggtggttatatctagcccctcagttcattttgagggatgtagtccctcatcaatttgttatataaaatccaacagtagttagtgaacgatagtaatgagcggtaataatgaggggtatattttgtaaaacttgtaaccggttgttccgaagtgcattaatataataaatataaaaatgcattattgtactgtctgtatcaaattccatttggctggcctaattattttttctttagcttattttaactttttgaagctagtttggtaggttcggattatattgtgttaaataataagtgacattatatttgaataaaatattttattgcattaattattacgaacataaatttaaatataatatgaatcgtattatttaatatttaaaaaataattcatatatttgctcgtattataatatttacaaagggtccggggttggggaccctggccctagacccaacccaaatcctgaacccttaacttggactcagactctgacccgactctagccccagatcctggaccccaaaccctggcctggaccacagacccgaccccaaagtcagccccaaaaatcgaactcgaatttagacatcatacccaaactcaaacccggaccccggacccaacccctgccctaaactttggacccagcccctaccctgaactcgacctagaccctaacaccgaacctgaaccttgaccctagacccaaacttaaacctaaacccggccactagacctagccctgaccccgaatcctagacccggaccctaaatccgaatcctggaccctgaaacctagactcgaaccctgacctcgacccagacattgaaccccgacccaaacctcaacccgtacctcaacctggacccagccttggaccccagactcgaaccttggacccaaaccccggacccccgacccaaacctggccccagaccccgaacccgagcagggttcagagttgagtcaaatttatgctaaaaaaaatataattttatacaaggtactaatacaagttaatactaaacatagtattgtacgtattaaataatattaatacaatacaatacgtgttaattttgaggtactaaatcaggtacgtgacctaaacattcatttagattatcattgtaccacactccaagaatctctatatatacatatattaaatctaaaataaaagatgaaaggatttatttacctctataagcgaatcaggatatcatacttgatcttcattactctaacaagattacctctaagtattgtttcagcttcaacaattacttctgcaaatattccattgcttcatttctattcttccacatttatttttgaactaaatttcttagacattcaataattaatataataggcactgatctacataatatattgactctactacgtttgaagtcatcatagtgtacctcctagttgggtagtggcttctggtccaaacgcgatgtcctacattttccaagtaaagtcctatgtgaatgttaattttgtcaatttctgacatgtaatgctcaaatgagttgatcctatatgttttggcaacaaagttgatagtgaggtcatttctatgatcacaaaagtttgatttgatgttgttaagcaagtggaatatgcaagcttcgtgaaagtggtttgggtaaacgatcttcacggctttttcaatacttttatgtttgtctaatattattgtactaattttagatatgtcttgtatatatattttagtcttttgccagtaactggtttttttatcactaaatatttctcttatcttattgataaactaatcccaagagtcatcattttttgagtcccctatttcgaatgccaatatgaaaatgttgttgtttgcatccattgtagaagctaaaaataaagtccccccaaatgttgtttttaagaaggttccatctacaacaataactcgtctacaatggttgcacccccttattgaattggcgaatgctagaaacaagtatttaaaacaatctttttatttgtttccaagtgtgtgattgttcctagatttgatactttcagctaggggtgttcatcaaaccgnnnaaaccgcccgcaccgcaccacacccccaaaaaaatacggtttgaaattctttgcggngcggtcgcggtttgaatttttcctaaactgcgcggtgcggtacggtttgcggttttg

SEQ ID NO: 162392 - DNA, 2305 bp, Cannabis sativa
cgcctatgcccggggccgggcctgaaccatggaccaggacccggacccgaactccagaccttggaccccaacccaagaccccaatccaagaccctgacccccggaccccagacccaaacagagacccaagacccagatcccaaaattggaccccgaacctggacctcgacccagaccctgacctgaaccctaatccggacccaaacccgaactctagctgccagctcccggccctggacctagggttctggtttgagatccgaggtttgagtcgcaatttgggtctagggtctgggtttggggttcgaggtcgagtccgaggctggggcgggttctggattcgggtccaggtttaggtgcgagatcagctttcggggctgggtcctgggttcgggtcgtgggtggtctttgggttcgtgtatgggtctgagcccgagttcggtgttcgggaccgtgtccacggtaccgcgactctaaggtcggttccaaggttcggggtcgagttcggggctagggctggggctggggctggtctaggtttaggtccaagtccagggcaaggggtttaggtccgagttagggttggagtttggggtccaggttccagtttcggttcggggttcaattccaagtccgagtccgagtttgaattcagagtctaggtttggggttcgagttcgtgtccaaggtctgggttcaggttaggttcaaggtccgagtccaagttgtggtcagggtgagggtcgagtttattgtaaataatttataattctacacaatctcttagtacaagttaatgtcaaacatagtattgtattaaataatactaattcaatacaatacaatacaacacaatactataaaatataatacaatacaatacaatacatcacagtgtaccaaacaaatccctaatcgtcattgatatggattaaacacaataatacgattcaaaactcaaacaaaataaataaatttgagtttttcttaaatgtatttaggttattttgagttgacaggactgacctattaatcaaacaggtcattttcgcattgacacaaatttagtttgtctattaaataggttattcttgagttgacacgacaataactaatttaatagttattttttattattatcaagttgacatgactaatccttcgtaaaggattatgaacatgttaaactataaacaaattaatgggttgataagtgtacaaaaattaaacattatcctccatataaatgggatacggtcatgttaagttaatctccccacctagtactaagcaagaggtcaccactactagaacactttgtagaaaattttcccctaaactttctttttgttgtgaaactccctaagttatcaaaatcaatcgttgcaaatattctcattcaattacattatgatcatttttaaaaaaataattgtttgtgtggtcataggtcacgggtatagaggtacagtatgacgggatctatttgacaattttaattagttacacgaaacctaatttattagcattaaacatacaagtataattttaagaatgcttataattaataattgaatggtatttatagtatttttcttgttttttttttttttttgtatgtgtgtgtgaattgcagtaaattaatgttgagttagtgttacattaataaatttttacaaaaaaaaaaaaacgaaaaaaaaactcaagtcaaaattctaccatgaaaaccctagttcaggagaacaaatccttttaattaattatttaatgtattaatgaatggagtgttattatcaaacttaagacgtccacctaaaaattattataataagtttaacattttggatttttttttaaatatatacaaaaaaaaaggcaattatattattaaaatatttatggtctgccctttaaatatttatatagcccacaaattaaatattataataatacctcttcttctaaattttcaacagcacgaaacgaagcaaaaaaattcacttatgcacgcttcgatcgatcaacccagcaagccaatcgaaacgaaacctaactgggggaagaactaccattaatttcagcaacttcgcctgagaagatgatcggaattaatcaaaatagggttgtttcgaattttaaaaaaaaaatgtaaaaaaactactacaaaactaaaattcaactagaaatcaagtttaattcacataaaacttcaatttcaaatctatgaaatgtagatctcaaaaagttgaactggagttcccaaacaatccaactcatgtataatccaaaaaaaaaaaatacatca

SEQ ID NO: 162393 - DNA, 1073 bp, Cannabis sativa
  modified_base (54)..(67): a, c, t, g, unknown or other
tttttttttacattttgataaaacataattaaaaaaatactataaattattttnnnnnnnnnnnnnnaaatttatatttgaaaaaaaaattaaaatatatataaaaaaaataaaatatgatataaaataagtttttacatatttgtgattataataaactagattataacattatcattatcattatattagatcttaacaactcatagtactttgaaatttataatttaccaaacactcagctcagcttttttctacagttttgctacagctgctttttccacaacacagctgtgtcaaactggccctgattatctaagcaacatgattttagatttttggtcactgtatgtatcataggtattatataaaattatcttatgctcttagatttgaattttgaatggtgaatgccctaatttgctcaaaactttcattttgcaagtgcctttttagttaagcaaaattaagtcaatcaagacctaataatgcgggcattgatgcagaaatagagtgcgagtatttcgagatttcagttagaccccctgtcactatagtttgatgatgttggatccagttggacagagatgggagataatgatggttgtggcaatgatgatattgatgataacgcaaccaatatgtagtagtatatattttattttagttgaaaaaattatacttatgttgatatttgttgaactgttttttttattattaattattataataaaaaaaaataataatgataataaagagaataacttgttcaacaacattaaaaaaaggaaaaaaatatttattaattaataatattttcccacttttctactccactaacttttaactgcccactactcacctctccactctctgatcaagatatcgtaaaaatgagtttatgaaaaaaaaaaaaaaaaaaaaggaaaggaaagcaaatcaggaagaaaagaaaaaaggaagaaaagaaaactctgccaaaatttacagagaaaatactcacatattctcatcttcaaagaagttctacagagtaagtattagggttattccctattttcttttcatctttc

SEQ ID NO: 162394 - DNA, 4103 bp, Cannabis sativa
  modified_base (1922)..(1922): a, c, t, g, unknown or other
  modified_base (4021)..(4050): a, c, t, g, unknown or other
ataaacgttcatgtgtttagttgctcctgtaaaagttaacattaaactcaactattattattacaaatttattcgttactcaacattaaaataagaaattgattttgtgtatagttaagtgataaataaattaattttagaatgatactaatataataacttgtgaaatactaaaagttagctacaaacaatgtgggactaacactacttagtacctgttagtttgttatgttcaagtctttttctgataggattaagatcagaaagatagctaacctcttcggcttcattataggaagggggaataataacaaggtcgtttgatgtgttgatgctagaagaacatttaatactttctgcaacattattgtgtaatgttattgttttgtccattgattctgctgctgccgaatataatggtgagtctagtgatatatcactcccaaataaccttataaacttgtttggaccaatatcattatgcacaaaagtgttgtttttgcaagttcttgagttatgcccctcttcttgacaatgtctacattttctaccatagtttttcctcatcatttccaaaagaagacactttgcacaactaggagtagaagccactttgttgattttgtgaggcaaattgtttttttctttctctctcacgtatgtttctgccaattgtcaattttttttatgaatgccaagcaagtgtcaatggttaatttatagatagaaagtttccacttttcaaatatgatatgacacgtgtgttatcttagcaagcaaactcaaaaaataaaatctagataaacaattgtatctaaaatctaggaaaacttcgttccaaattttattatcttatttaaagataataacaattttttaaaaaattatatgctttcaaaaacctgtaattttataaatatttgttttattcacttaaaattattattaaattactatcccttaattatttaactttaaaacagtaaatttaaagtaatatcttcgatataaaagtaatatctagaaaaaaaaattgagtaatctgattcgaagtcaatctggacatgttttcttagggaatgttcaattgtggtttttttttttttttattattattattatcatttttttttgagaaagtttattatttttatttaatcttatcattatgtataaatatcaaaattgtaccgaatataaaatataataaattaattgattataaaatttacttgtaaagtattcgaaatttgaatgataagccaaatatctatagatagttaaatttgtttgtttcttttttttataattagatagcattttctctaaaatggataagatagtataattgcaaatatttaaaccaatacttcttaaaaagatatttatgcatatatttatatacttttctttatacgtactgtatatatagaagaagctcaatttttttttcacttacctacggctaatagtttatttaacatttttttaattaaaaaagaaataaagtatcccaaaaaatttaaatttatatgcatatatattaaatttttgaatacaattttattaaaattaaaaaaaataagcacattttatattcatgcccataatactttcttctcttttttttttcttctaactttattatccgtattctctattcctatttatactgatcgtggtcttataactcgatgctacccatttttcttttgcttatatttttctcccttgcttttgcaaatcgatcaacaacgatcgtcatctaattcgtttgtgtgtgtgaagaaattgagcgaaggaaagatcggtagcaaaaggtaagtagtagtagtattatatcatacactatattattatgatgatagatttgattggcatttgtttcttcaacatatatattttctatatatatatatatntatatatatatatatgaatataaacaccagcaggaatccatataatcactatattgtgtgtttttttttcttcgtatatacgcaacagactaatttgcagtaagaacccctaactattaatttacttgcaaaaaaattatcaaatctcatattttaatgggaaaacatttcaaagtactgttccatttacattttaaaggtgtagtctgtccaactatcttaattttgcccacaatgacaggtcactaaaaaaaatatcctacgtggctatattttacaaaataaaaattaaaatgagtaattaaaataaaataaaaactttaagagtaatttgcggcaaaatcccctaactatcaatttacttacaaaaaaccatccaacctttaaagtttttttggatggtctttttgcaagtaaattaatagttagaggagttttgctgcaaattactctaaaatatatatacacacatgatgtcttttaacgtttatagttgaagcttagtgcagtgttgaatatttaattattattattttttttaagaaatcaaaatcattgtattgcataaactcaaatttacaacttaacaaccattacggcctttataaactatacaacttgtagaatctgtaaaattaattgtgttgtaaatttacaattgctcaaactattccaagtctttttattttatttttctaggaaaaattgataaaattctaactttcacctcatctcgaatgcagagcattacatgggtaacgataggggtgttcacggattggtttcgtcccgatttttatagtttttgaaccaaaccagtataaagattttttgaatattaaaaaccataccagaccaataaatttctctaaccaaaccaaaccaaaccattaagaacggtttggtttggttcgaaaccacgatttaagtagaatttataattattcatattttttaagtaattgtacttttcttaagtttttaattttatttttcaaaatatatagagtaatttgcggcaaaaccccctcaactatcaatttacttgcaaaaaactatctaaaaaactttaaggctggatggttttttgcaagtaaatcgatagttggggggtttcaccccaaattactcttaaagtttttattttcattttaattactcattttaatttttattttgtaaaatatggccacgtaggataattttttagtgactcacaaaattaggacttaactaggctggacaaacgacaccttaaaaatataaacggaacggtactttggagggtttttccaccaaaatatgaggttggatagttttttgcaattaaattaatagttgagggattttatcgtaaattactctacgcaatatatataccaaaagatagtagcttttggaattccaggcttctctctcactttgttagagtccaagttttgtgattttttcatcatcgaagattatactctaagtttagctttttgtttgtctccctgcgataaatgtagagtatgatgtgttatattttgatgcaacatttaagaccattctaatttttgacgtagccggtcagagcttaagtggtatttttagatatgttcagaacttctaaatgaatgtattaagttgtaatataggtgacaaaataattatttgtatatgtaaatatttatcaaattttattgagaatgttaatttaggtaaactcttttcgccattgacatgaattattctatttgtattttgaatctacagttggttaggcaattgcaaggttaaacccttttggagatgacccaacaactatactaaagaaaatatttcagcttttaaatcaggtgcttgtttgtaaaattggaaaatatacaccattatcatttattacttttttttattgcattaagagatggggatgagatattaatgatattttggttaagttttagacttaatctattctttaatgtttcaatagttattatataaaaattcaaaatatgcacgtgtttcagaccattgaggcttaatcgatcaatccttaatcaattgtaaatcattcaatatttcttagtatacattaagggctcgtttggaannnnnnnnnnnnnnnnnnnnnnnnnnnnnntattgtattatattgaattatattttatgcaatatttttatgtaaaactatat

SEQ ID NO: 162395 - DNA, 1401 bp, Cannabis sativa
gagccatagttcttggtgggggaggtggaggagcaatggttcttggcgggggaggtggcatctcacgtgatgccgttgatagcaacatctttggagctggcatagttgacacatttctaacatccacatctgttgatacttgagctgcttttaaatgttctgaaccctgcagagttagaagaaaaaaaagtacaaaaaaaacactagctaccttaaattcagtagataatagaagcattcaagttgataacatatcttaaaagttaaaagttaataagcaacactggggaaaaaaaacacacatttatcagaaatatgcataaatacatacacacatgcataggtacatttccagaatcataagctggaaatggatcacacaagaaaatgtaaccaaagaaatggaaccaaaggaaaagtaacacatcatgaagtgcaaatgctcgacggaaaaaaatgaaaaccatcactcatctgaaccctgttaattttcttcttcagcatgtatgtatgcaagataagctaaaaaaattcttaaaagaaaaaaagctacattcttaagactaccaaatcatacaagctaggacctaggaaatacatctctagcaaaggttatgagctcatttagaattgttttcttgacaaagcgaatgtgaatgtccattaatcaatataaggtgatagtattttcatgcacagaacacttttcattgttaacaactccctcgcctcacataaaattgtacttcctgtaactatgagatgaacttatttcctaaagctaagcttccctcctaaacaacatttagggacttggaaactgtagcaattgctatgtagctacttaaaatagacttggaacctcaaaactttttgggagcaaactacatgtgactgctcatatttgaattcacagaatcctacgaaaataataagagctagcctgtgacttctctgtccatcctataaatgagttccccaacatcaaaaacatggattgtgactgctcatcaagaaagcaaatgttggacatatagcaaataagaaaacagaaaatatagaatccactaaaataatcagcatgaatgaagctataattagttgatgataaacacttaagtgcggcctcttcagtggcacctccagatataaatgccctgaaacaatacaaaccaatagtccgatagagaggtccactatcggcaagttagctcgacagaaggtcagagaaaatacctggaatagtgagtacgtcagcacaaaatgataatacaatatatcaatggaaaatataaattcaaataattacaatttaaaacactaacaagataataagtggactaaagagagacttataatatactatgtggactaaagagacttataagattatatgcggac

SEQ ID NO: 162396 - DNA, 2382 bp, Cannabis sativa
catgtctagaatcctaaattacacggaaaaaaaactcctttaattttgtacctcggatgaaccaaaatttgttcctgttatataagcaggttgagccgttgttgttcccctctgacaccttctcagtaattctactgatgtcagggaggaaaggcagatgggcagagtcctgaggttacgtacacgagtgcggggctagctaggcgcacgagcaggctgggtgcgcgagatggctgggcgcgcaggcgtcgtggagctccccttggcgaacttttcgggcataaaactaataactccaaatattacacttagtaatctttaagggtcaacacaaacacaaactcattgtaatactgaagagagccttgttagaaattacaaggtctcagccttaatctgcttggtattatctcaacagcgaatacaactaaaatgagagtaggtcattacctaaatgaaatgggctaaaactctataaattctagtgtctttacatttattatcgttccacgcatgacagtcataagcaagatctgatcctagtcagagtatcagttggctaaatccacagtcagcagaagaagaagaagtttgggtggttttgtccagggtcccgggttagcgaaaaagaaaaacaaatgaaaaagaaaaaagaaaataatatagttttttgtaatttattttttaaatattaaaattatgtggaccattaaaaatttatcatgtgtacacataagaagtagacattagcatataacagcaatattataagagtttttagcagctaaaccctctcaactatcattttactttcatataaccctccgaactcaaattttaatggtgaaacccttcaaactactaaaacattagtaaatttaagatatcattcatttatctcaattaaataccaatatgaattgcttatgtgtatacttttatacacatgatacatttttattagtatcctaatataatttttttaaaatattatttcaaaattcgctctaaaattaaaaacataatttaccatttattaaaaaaaataaaaaaaaaccaaacaatagagatgctttctttaattacataaaaaataaaaacaaaaataaaataacaaataatgatgaaggagtcatcttctttgttaaaaccaattttccccgaaacaaattctcaaattttgaatggtgcaacccatgctggtttctcaacattgcgattaatggaaggttgccactgtggagcctacaactttggatttgttcaaccttctcgatcgcgaatcacagtagctatgtcaaagtcgatctaggttggttttgatgaaaatggcttcacaacaagaatggtgcttaagtcgtggtcactggtcatattttaagatttcagatcctaaacatttttttgatctactctagcaaaaggccaccgatcccgaatggtttatgtgtttgtttagcgagactctcaagagctctgttggcaaagagggggcatgtcggatggtgccagagaaggtgaaaatagctatggagtttaaatgcaatgaggttgcttcaagttttctgagaatttatttttgggaggaatgggttttcacgaagaaggtgattctttcatctttatttttatgtaattaaagaaaacatctttattatttaattttttttattttttttaacaatggtaaattatgcttttaatttgaaagaattttgaaataaatttaaaaaaattatattaggtgtactaatataaatgtgtcacgtgtataaaagtgtacacataagcaatctatgtacgcatttaactggaataaatgaatgacaccttaaatttattaccgatttcgtagtttggagagttttaccatcaaaatttgagttcagagggttgagtacaaataagataatacttgagagagtttagccgctaataactcaacattctaacaatgaaagtttggtgagttttgtcataaaaaaaatagatttatggaattaatcgtcacaaaccctataatttatgtaattttgctaccaatatcttaataaaaaaaaatacttttttataataaaaaatgacactgaaatttcaataatactcatttatccaataataaataaataacacgcgttcatatttttccttttttcttttcttttataagggatttatctattttctttttcttttctttttttacaagatttatctcttttcagtttttttttaatgttttatgtataagaaaagagaaacaagaagtggagcctctaattccattgacgagtcataaaataagggaaacttacaaaaatactattttttaccaaatattttcaaaaatactgggacacgacaaactttacatttttactg

SEQ ID NO: 162397 - DNA, 2553 bp, Cannabis sativa
ttttttattaattaactaaaaatagtttcagagaaatttgattaaatatgtatctattcgaataaaattaatcacttaaactaatattgatgtgaacagattttgtgtgacaattttttagtatactttcaaaatatctttttcatttcaaaaagtccaacaaagaaactttctttctattttttctttctttcttgctatgttagtttccctctcatccaaatattcacccatcaaaccaccgcatcaccacccacgacccttcctctctctagttctctctggtgcgtggtcgacgacccacgactctccctctctctctctttagttctatctggtgagtggtcaataacccacgatccatgaccaccatcgtcgaatggacagacgaacaatctgtagtttcttcgtattttttgtttattttttggtaaaaaaattgagttttgatgaaatttgcgttttctgtgattttttttatatagtttgatagtggtctgataggatacgatagtgggtacgatagtggtgtaatctaaaagttaaaaatgaaggttcgatggttgataaagacacgatatggtcgatggtggtcccagaatagtctgataggtgcttagaatttatgtcatagaagaaagagagagtgggtgaggtttttgatataagataatttgaggagatatgaaaaatatacctacattgccaatggtatttttttttagtttagattgttattttttgcctaatataagtattaatccatattttcgttaaccaataaatgagccttaaagtaataaataaactctataattaaatacataaataaataaataatggcaagagagcttttaacgtgattttgaagttaatttcttatactccacgagtcaatcttattatgaaatttaataaatcgtatgcagaatacaatattggtataattatctcttttctcaaattggttgcccttagttctctaaattatgtctctatttataggagttttaggatgacaattaatcccttgatatcttattcctttaaccgtttgagaaatatggatattccccacgttttatatttactcacatgggataattatatataattgatatagatgctcttatctttatctgtaagtagttatactaattatactgttttcatctcacaatataaacaatcctactaataactttattctgaaagtgactttttgcgccaaagtatattctggataatccttgcatccttctgtgatgtcgcaagaggcaaatacgaggcactatcatagtgtgacaacgagataagttataatgtgtgcagttcccttagtctttcaacatactcatgagtatgtagatcaataagctgcaagctcttaaagaatttgttatctacttgtcattatgctgtgtattttgtgtatccttagatggatcttctttgttggttatgtacctcgttagtctcataaagtggtagttattattcatggcttgcccttattcaagactttaataatgcacttttgatggtggtcttcatgatataaatcttgagggctatccatttacatgggagtgtggtagggggtctgatcgtttagtggaagtgcgtattgatcgtgcaatgaacaatcaagaatgattatcacgtttctctatggctaaactttataactttgaggtgagcacttttgatcattgttctattcttttaattcaagcccttctattttttctacttcaaaatgcaagtgtagatttgaaaattcttggttaaaggactcaatgtgtttccaaacagttcaagattgctgggaggttcaggatggttaaaattttaaagagaaattgagtttttgtgatgagaatttagctaattggggttatgagataactaaaaatttaaaaagtcaaattgatttgtgtaaaaaggaaattaaaaatataaagggaagaaagatgctaattcttgccagctgtttgaagaggctaacgagaatttgtctaagtttcttagcatgaaaaagatttactggcggcaaagatcgaaacaactttagttgaaataaagagattaaaatagcaagtatttccatgcttcagcaagtgctaggagacgtatcattacaagcctttgtaataataatggggatctggttaattggaataatagtttattggaggtcatggctgattattttcacgatctattctcatcttcaaacgtggattggaaaagtgtggttaagagtgtccattgctcggtcactaatgtgcaaaataattaactttttttggaattcaaagtttgctaagaagagaggtattttttggatgatgtgagattgaatggctaagagtaaatttgtgggaggtatgggttttaagaggctgcatgaatttattatcgtcatgcttggcaaacaaggatggagattgttaatggtactgacgacttaatttattgtgtatttaaatccagatactttcccatgataattttcttaatgctgagttaggaaataatcctagctttgta

SEQ ID NO: 162398 - DNA, 3338 bp, Cannabis sativa
aatgtacaaaatactatttacacttagaataataataaaaaacttacacgcgaatcatattttaaaatcaacggtccaaaattggcttatgtatatacctaaccctcggattcgactaaacctcggtagcagtagtagttgtactagataccattctcactcttctatctccctttttggagtttggggcttcgatccatcggtttttgtagtgggtttcagtgaagcacaatgtttttggtggactggttctatggtgttcttgcctctctcggattatggcagaaggaggccaagatcttatttttgggcctcgacaatgccggcaaaaccaccttgcttcacatgctcaaagatgaggtttttgttcttctttattttctcccccaaattgaattaaatggaattgaattatgaatgttcgctgttttattttaattttaaaaatttcatttttttttttgggtattattattactcggtgagtttgtttcccctgaaaagaaaggaatttgagttgggaatttcctgaattttacttttaattattgcaacgattgtataatcgttgatctgagctgaattttttgagtttgcctaaagtttaggtatggttttattggtgtaagtaggttaaaattgaccaatggaaaaatgttgggttggtgggtttgtactgaattttactcacactataagagaattaagatatcaattttgtttaggtgtgttcttcttttgcagatgtgaaaagggtggtagttttttctttttcttataatgtttttgatttaagtatcatacaattttatttattggtgatgaatattggcagagattggttcaacatcagccgacacagtacccaacatctgaggaattgagtattggaaaaatcaagttcaaggcttttgatttgggtggacatcagattgctcgtagagtttggaaagattattatgccaaggtattattataatttgagtattaaaatgcatgctcactgcaaatggtgactgccattttctttataattggctatttgaactttgttatttatgtggaagaagtttgggaatcatctttgctcaaattgagattaatggtcctcggtttgtttgattttattattattaggctagttaagatatttgcctcaaaactttttaggctgttgaaattttttcctcaactattaagattcttggattaaaagacttttctccaatttaggggacatgatttgttatatgtcaaaattcggaagtatgatttagtagatattaaaatttgtggaacataatttagttcatagaatatacccttatctaactttatagcttactttagagaaggatttatgtatttgggaagggggagcaccacaaaactagcaaaatttagacaagagtttttcactaggaaggacttggttgattgttacaatgatccgaatgggaattaagttcatttcaaggagccctctcttagattcgtgttgcataatctatgttctattttgctcgaaaaactaatgtagatgattcttcgtcttagatggctcttttctagtcaattagtttagaaattaaccaaaattttatgttttattcattaaggtggatgcagtggtttacttggtggattctaacgacaaggagagattcgccgagtcaaagaaagagctggatgctctcctctccgatgaggcattggtagatgttccatttcttatattgggaaacaagattgatataccgtatgctgcatctgaagacgagctgcgctaccaccttggactgaacaacttcacaacagggaaagggaaagtaaatttaacagattcaaatgtccgccctctcgaggtattcatgtgcagcattgtgaagaaaatgggttacggagacggtttcaagtggctttctcagtatattaagtagagattgcagtttaggacgtaaaagtaaagatttggtttataatttttttaaagcgttatcttatttcttgttaaaccaagctgttggtattcgaaatactttactttgttctgacaataacatacaaccttccttccccatgacatgttgaccaaaaaggaaaaaaaaaggcattattgatttgctgtgattgactatcgtttagagagatttctagcattttatgctcacttttgccccccacttgggtctagtggaatatcctttgctctataccttttagtatcctacaatactatcataaactcaatcaaaccagaatctttcttgtactttttctttctttttaccttatatatggttataggtggtggaagggtcattctattataatggtatgttttaacacaatattgttctccaaaagtagcaccaatgacaatcaaaaaaggaagcaccaaaatctcgactctatttaagtccaatcaaaagagctattagtgcttttgaaacaatttgtaatacaaaaatttatactaataaaaattttttaaaccttaaatatgattttcttttttctttttttttgatgagaaaataacaacaccaaaatctcactatatatttttaggaacaaaaattgctatattcatataaagtgtgacatcacgagtttttagttcatccctaatttgattaagagatttccctttagaaggtttgtagtcaattttaatttgcacattgtgaatatcattccaatagaaacataactaaacttataattattatggtgttctaacttatttaaaaggaaatataagaataaactgaataacaatgttgaaatgtttaatatctaattcattatgactggtgataatttgtgttaatgagtcgtgttcatttagagtcaagacttaggtagcctgactcaagcattaggtagcttgggcgcacaaagtccctatattaaaaggtctattttttatcatctttttatatatataataatataataagtattcttttataatgtatatataataaatattcataataataaacacacttacaaaaaaaactaataataacttattatttattctgttttttctttttctttaaaacctaagtacatttaattttaataattaaatataaaagaatttatgaagtctttttttttttaaaaaaaacttaatttatgaagtattgatatatatttatattattcttttatagaaagctcaattttaatttttcgtctaatgcctccaaaccacttggtttggctctcggatattattagcaaatgctaaatttaaaccaaactcattaattaatggggtaagttgaaaaatgccttttttattcatcaattaatcaaatttacct

SEQ ID NO: 162399 - DNA, 4313 bp, Cannabis sativa
agtacaagtttacacgaagaggcaatattttaataggtaaactgaattcatcatcatcacagagcacaaaaagaaagaaggcaactccacctttatggaatgagatgtacacaacaacatggtcattacaaattcagtacaatcaagcttacactgaaaagcatgaatagtttacctatcagcactgcaacttagaatcttttgaccattgcaagcaaattttacagaagtcactgcagcagaatgatcatcgattctttcgatgagatcgaaattcctgtcatgggggaagcctaatcaatatgacgatcccataaacatgtaaagcccttaaagttaatagctaagaccttttgccatcataaagatgaataagttggtcacagccccctgaagcaaggaaataatgcccgttgatgacttcttcagaatcagacatcttgctcggcaaattaaagctcaaggataggatctctgcatcatgagcaccctgtttggatggccattccattttaagatcaagaaaaatacttacattgccttgctttcaaaggtatggaattcaaaagaaatttaacatttattacctggaagcatgtataattaaaagtatgtaggtcatagatgtgaaggtttccttcacaatcaccagcagcaaggtactttccatctggactagctgccattgatcgaaacccccgagtgctgaaacctaactccatagcatctcgttcaaatgtccctgtcctaactgttacaatcaacagaaatgtaattggcaagcaaaacatgaaatttattatcactttgaatcttattagtacaactctgtttctttatgcataaaaaaaaaagaaaaaattgtcaagtttctcacaaatttttaaaatatttttttaggtctcagaattcacagtaagacaagttgcaaatacctaagcctgtgtagctcattggtttcaaacttgaagaatgctggtctccaagatcctctaataggtcaggttgcaaagaaagatcccacagccttatagtaccatctgccgagcatgttgcaaatgaaaccccaccagaacaacctctagctacacatgcaagggattcatcatgcatgttttcgcagcacaagttcttgatatcccatatgcaagcagagtgtgaaagcaacacacaacatcttctagcctgaaatgatgagagtggttttacacaaaaaaaaaggcccaaactctcaatatgtgcatgaagcaaaaaagcatcaaagaacttaaaagcaagaaagtcagaatgaacgatataatgattctatcaaacaaattaaaaaaggaaaagagggtaaagactactaaatattaaagaaacaattacctggttgacattatagatgtcccatatatacaaactatgatctccgtaaataaccactgcaaaccagaatggaaggatattttgaggtattcatagatacaaagttgaggtaaatttttcttttaaagaaaacactcaccaagcttttctgacattgtgaattggcaagcaacggcatcaggaagaatatcattttctggctctttagcatggctattaatgtcatcttctgcacaaccttttttgtcctttgaatataaaagacttccaacatatttaagagtatcaatggcaaagagctgcactattccattactacaagcacaagcaactagcttgtcagatacagatattgcaaaacctttttcaacctgaaaattaagtttgaatggttaattggctaaaagaattatagcctaaaagcaagtactaagagcaccaatgtcaggtcctatggtgagaatctttgactctgagcattccaaactataatgactgattctttacaaaatctaaaaacaacatacacgagcagttagttccttttgctttattatagaaaatggatacacattttttcctcgtcggagatgaattctattgattggtttgatcgaacaattgccaaattattagagaaataaaaggtatgtcgaaacctaaatctaagtacataagaacaaaaccagcaaaaaagtacacaagaacaaacacaaaatacataataagatttgtctctaaacagggcaaactccaaaacctctatacatgtataattatatattatacgtcacctaataaagttacaatgaaaagacctagtgttacaaaacaaacatttgcatagagatggagaccaactaaactcacaatatgtgtagccagattagcctccaaaaaaaggttccactttacttaatacacattggctcttttgaaatcgatcacgaaccacaaaggatacatacaacaacaaacctttaaatccacagacttttttattgataatccagaatctagatggcataatacacctgcatgaaaaggaaattgggtttgtagatcaagttttcaattttccaatgcattagtagtttagtgcgttacattaatggaaagtgtccccaacctgcatcagttaatgtgtagactgagaaaagttcaccagcttggctacacatggttataccattagcccttaaggtggatgcaatagatataaatgagctttccttgtgaggaccaagattaacagcctttccatgaactgccaacgatgcggtccctttatttaaacaagtcttcggagatgaaccaacagaccagaactttaagtgtttctttccagaagtcacaactaactttgcatctgacgagaagctaactgatgcaatagcagaagaagatgaacttgctttaagcttagtaagaagcataccacttcgccactcccaaagatagatgtatcctccaacagaaaccaaatgtttccctataatgatcatttaagaggaaaaaaacattatatactaaaaggatatagaaataaatatagatgagaatcaaatgttattgattaattcaaactgaccatcaggtgagaatgcaatgcatccaagcccataaagatgaccttttagctcggataccaaggctagcgtctcactgtcccacactaacaccgaaggttgagttcctgactgcaaactcatatcagatcacgtatagccacaaaaattcaactcaaaacaacacaccttcctccattaccataatgtagaagtgatagtatgatacttttattcatgatcaattcattattgactacattgttatttccatcaaaatcaagcttctgtgatctcatttgaaattgaaaggggataggaaatcatatgtggaactttcataggaatttcttttaattgtcagcaacaaaacttgatcttatcctaattatggcaaaatgagatgagaactgtcttcaacaaattagactttaaacttacgatctatctagtgaaagccacccaagtgatttgaaataatgctaatttctagctcttcactcattacaattacgatctctaaactcttttaatctatcgacataccttctttactaatcgtagaatcaaattgaaagcgtcaaaatctaaatcagaaatagtgtaacatatcagatggttaacatgagaaaagtgatttatattttatacctctccagcagctatgaaacgcccatcttcggacatggcaacacagttcaaaggcttcggcattcgatgagtcaccatgaggtgcgattgagagcaggaatccacattgtaaaccaccacaacgcatcccgccacatatgcacagctcgaggataaagaagaagaagaagaagaactcgaagccaatccattgcaattcgtagtcgtcaagccaatcacctcttttaaaaccagctgcgaaaccggaagaaatagaggaaaatgaaaatgaatacattccgatatcaattctagggttcaatcattttgaagagaagagaaatggagaattcattttgattgattactacacttaccttggcactagaatcgtctggtttcttcactttacgtatagcttttctcatcctgagagagagaaaagacaaagagagactaagcttggttcggagtaggaatgaagcttccggctatggagtctttggtagccgttacgttttttgaaattcacactgaaagagtgggaaactctcagtatctgttacaatcaagaaaatcgccgcttcttttatgcattaaaaacaaaaatgttattttggtcttcttaaatatctttattttgtttgttaattaacattaaattcaaagatttattagtaagttaggttgatgttacgtacaatgcacatcaatacatgtatgtttaatttattttaattaggtaat

SEQ ID NO: 162400 - DNA, 4120 bp, Cannabis sativa
cgtaacttctaactagtataattaaatgtatatattgcaaaaaagtgtaaaaaaacatattttacataattctatataattttatatatatttataaataaacatatatgttataatgtgctgattattttaaattgattaaaaaaaaaaaaaaacaataataaagtgataactacactaatattgaataattttttgataagatttacaataataagacactattattttcattcaagttattgatttgatgccatttttattaatttaattttttatattttatttaattattataactaaaattaaaaaagaaatcttcaaattattagaataagtatttgttttctacatttatataaaatatactgagcaatttaaatgataatttatctcaaattgtactttacatcgcaactcatgcagattacaacccacaaaacaatccaaatcataaaaaaaaaaacaaaaaaaaaatcgtaaaaagaaaaaagagttaaaaggaagtatatatatagggtaatttcattacatttttaatgatttcaattcaaagacttaattgatatattttatggctcacgggctaatttacaaatccacatatatttatggggtcatatactaaaatctcataatagtttctctctcaaaaaaaatctcatattagtgtaataatcattccttacgtacattgtattgtggtctgaaaacccaaaagttgaaaaggggcgccagccgcgtaagccatggcgcggaaaaaaaatgtgtgagaattttctttccaaaataaataaattaaattatatcataaattactttcggcgtaagcgatgatatcatcaacattttgtgtataaataccccaaaaatatgtctgtagaggaaaaacttcaaactccagtagaatacgattccttaaagacttttaccatatatttttttgagatcgatttcggaagagagtgggttcaatggaaaactctagtgcagataagaagagggtggtaatcgtaggcggtggtgcggctggttctattctagctcgctctattcagttccttgcacacgttgtcctcatcgatgagtaagtttccatttttgtgagacatttcgtaaagaaatttgctttaatttgtttatgcagttgtaaatacatcccatgtattgagatctattagggcatagcgagtgaaattctcttgcaggaatgttttggtattatatgattgtgtgaattgtatgtgttttggtatacatgtagatacacttgaccgaggatagatagggctctgaaacttccaatattttttctcttctatgttgagtttctaacatttacaatttctaataaatcaataaatgattcaggaaggagtatttcgagattacatgggggatgttgagggcaatggtggagccaccatttgctgaaaggatggtgattaatcactctgattatcttagcaatgtggacattgttgcatctgctgcaactaatatcacaaatgggaaagttttcactgcagatggaagatcgtttgcttacgattatcttgttattgccaccggtcacaaggattcttttcccaagactaaagctgagaggctcagttattttgaatcaggtaaatgggatggaaaaaaaaaatgcatatattcggagtatcattgtttcaattgcattgaagtgaaactataagttgaatatctatagatgaatttaataaccttttcaaatgataatgaatgtacattgtcaaaaattgatgttctgttttgcatttggagatgctaactttaattcttttcttttacaattacagaatttgaaaagatcaagtctgctgattcaattctgattgtgggtggaggtcccactggtgtggagcttgctggtgaaattgctgttgattttccagaaaagaaggtgacactggtgcaccgtgggtctagattgctagaatttgttagttctaaggcttccaagaaggcattggattggttgatatcaaagagagttgaagtgctcttagatcaatcagttaatctggacggtataactgatggtgtttacaaaacgtccaagggagaaactataaaagcggattgtcatttcttgtgtattggtaaaccagtggcgtcatcttggctcactgagactgttctgaaagattctgtggatacacatggaagattgatggttgatgagcacttcagggtcaagggtcatttaaatgtcttcgctgttggagacatcacagataccaaggtaattttattcaaacaccttttattcccatattcgaaaattacaatttccaatgatgtattatttttatagttatatatttgatcaaatacttgaaagtttagtttactaaagcatatcatttaatcaacatgtcaaatatgtacaagtccactactcttccgattgaacttgccttggacaatcatattttccccttaattaatgttttagtttacattttcaatgaactgagttgtgctttgaggagtatgtacatgagccatatgttggagaattgtgtatatataaacaagaattgtgtatatataaacaatgtatgttggaaatgtgcttacttgttagtatcggacaatcgcttgagtagtcttcttatctaattaatcatgcgtcaatgattcaagtgaactttgacatgttaatttttttttttatttatcatgtgcatactttcatttaaaattgacctcgaacactgaattctactcaagttcatctccccattgatttaccttcattttcaataagatcacaactagacgcatatgccagaagtttatactatgattccatctttttgacaaagttgtagttattcactaacgaattgctctatcttcatcaggagatgaaacaagggtacatagcagagaaacatgtccatgtgactgtcaagaatttgaaggtgttgctcgatggaggaaatgagagcaagatggtaaaatacaagggcactttccaagctgcacttgtttcacttgggaggaaggaaggtgtagctgaatttccatttattactatcagtggatgcattcctgggaagatcaagtccggggacttgtttgtgggaaagacaaggaaactccttggactgaagccataatcctaaacattcttgaagataaaacttcattctgaatgtgaatttttctattattattttaagttctttatttctatctgtatggtttagatgtatattttgaatgtacatgtcattacacaaagtgagtttccgttataaaaattgttatatcattacgtgtaatttaaagatgtatattttggggtgtccatatcattactgggcaaataaatattcatatatttaagaggatttaattcttttttatattttattttcatagccaatttggcttgtaagttattttaatgttgtataggggtgtttggtttgaaaaagacagatgtcatcataattttcttgcaggcttggaatacatcttgacaagcacgttcttgttcaaacttggttcatagtgatttgatccacttttgctgctgcatttagttttgttttcttccttggaatagagctaataattcctaaatttattacaaatatgacttgcaaataacgagtcatcaaaatatacaattttatgacaatatggtcggagccccgcttgatttttaaagtgtttttgtgctgaactaccgtatctatttttctcattttattatgagttatttgtatttgtgttgtttatcactctcttgaggatcattttggctagtgtcattgtttggtttccaactttacaatagaatgttcaaatctaaatttgttattagtgtacagattttatcaattctatatagctcgaaatcgatataatccatgtaaaaaaatggattgagattaatttgtacttttgattttagtttttgaaagaaaaaataaaacaaacattacatactttatataagacagggaaattctacaatgcattttaagatacattgatgtacccttatctgttttagcacccagaataattttttagtcagattttttctcatagtcatgtacgttatagttattta

SEQ ID NO: 162401 - DNA, 1601 bp, Cannabis sativa
tgatgcagaacaatggtatcacacaggtagtgaatcaaaccattcaattcaatgattctgttcttgttaagatgccttttgctgatgtttactcaatcgaatcagataaaaagttcccacttttcctatactctgattactttgatcaaggaaatggagaatatgtgtttggttcagattttaaattggggtttgaagagaagaagtcttctaaaattggtggctttgaattatcgaaaagtcatctgaataatctgcagaatggtgaggctaaaatgattatcgagaacgattcgattattgaagcaagttggagtacacaacaagtttacaactatgaagaagatggaaatgtttgttattttagaaatgtaagtagcttaaactacaagatagtttatgataaagagaggaagaaatgcatcaaattagaacaactagctttggatttcgactcgggtttcgagtcaaagagcttttctagctagtatctgaaatgtcctgagaacagttgggaagggaaaaaggtttcattttcaatttcaaatgtccacacaaaatgataaaatttttcttttgtgctgttgttttttagttgtgcatatgaataagatataacaaattttatgtgttttttttttttgttaatatgatatgggatctgaatttgcaatgaacataaacttggttttgctaattaagatttttgcatttaaaatattatctctattaaatcgtatccttactatttacaacatgaaatatgtcacttttaaattatatttttaattattttaaatttgatataaaaatgatacatcagccacattagcaatttattaggtatgcgggataaaacataatacaagtcccatttaattatgaatagttcataaaaattttaactagttttggaagtatcatttagtacatgtctaaaaaaagaaaaagaaatctaatattattattagctaaaaaaatgtttggagtaccaatagaattatttgtatcttttcaatatgatgtgaaaaactctatttatactagttcataaaatcccaccattaaaggtgataatcacttcactactaatattattatttttcaaaaaggtgtattgttatttaatattttaagttgtctaacactatactgatatgatacttttttaattagttaacagtttcttatataatttattaaattaaaaaacttagagacgtgatattgaaatgcacaaataataatatacaacatcttttagtgtttaaggtactctaacttagtttgtgttttattagacgatcagtaaatcgagttactcatgttatggcaagacattctcgattactctttggtcgtaacattttcgagcacgatgtttaaactgatctagaaatacttttgtactctaaatgctaatatttcaatgaagttatttcattttttttaaaaaaaaaaaaaagtactccttaaaattttctttcaaaaaaatttaaaataaataaataaataaattttttagctcacaaatcacttaatttccaacctaaaacgtcacattttatttagggaaattacgccatatactatttttttaa

SEQ ID NO: 162402 - DNA, 1275 bp, Cannabis sativa
agtttggtgtgtccttggagcattgatcacaccaataatgctcttttagaggctcattggagttgctcttagaaagagtgaaatgtttctccctactacattatatacctaattgaatttaatttgtacaatttaatcaaatccaatcaaattcgtaataaagtataaattcgtacttgtgcggattgaaaaataaaaaattagtatatttagatattgattaacatgtaaaagtaatcgatcaaattaaatctatacatatctatatattttttaaaaaataatatatacacatttaatattttaatgtaaaaaaataataatttaaaattttaatatatataatataaatatattttaaaattttataaattaaatgtatagctcattttttataattaaaattgaactttatctaaaataaaattaaacatttgttttacacttttttttttttaaatttgttataagtaactaataaaaaataatcgatccaatccacatttttacgaattaaatttgagttattacaaggataattagattagatgattacccttactctatcctatcttccatttattccatttgtattttgtacctacatatacatagttcaaagaatagagtaaattcaatacgtaatcagaataagtgttttctatcttcttccatcttgattatagcattgaaaatcgaggatcttgccaataaatattttaatattaaatttatctttgcttattattgaaaaaaaaaagaagaaatccattaaaatattttgtaattaataataattttttttttttttcgttttgttttaaaataggcagaatcacttgttgcctattattatccaatcattacagggaaagaagttccaaatattcagatagataccaactttttaattattcttatccaatatatatatatatatatttatatactttatttatttattccaaatcatgtttacgtaatactgcactccatgaatagatatacttgccactttggctataaaactcaaaaatcaaaacgactctctatttgaacggaatctccctaaattagtaatattttaaggcaattatattaaaacaaaattatttcaagacaaataaattcagggtgtaccagaaacgagaggggcatttgacacttgacccttaaaaaaatccaaaaaatatgtatgtataatttaaggaaaattttatttatactctaattttttttttttttaaatactctattttaataattttattttat

SEQ ID NO: 162403 - DNA, 3088 bp, Cannabis sativa
attgtgagggaggcaatgagcaagtgagaaaacgaattccaagtcgttggagcggccattagaggaacatttgtagcgggaacagtggaagcaagagttgtacgatttagaggatcgatttgtgtgccagaggctaatgttttatcagttgaagccatcagagacactagttaaaggcgacgaataccatatagaaacttagcaatgatagagaaaattttagagagaaaagaggtagagctgagagaagagtaactaaagaaaaacttaaccaattggttagctgtgtcactttatttatactgatcaaagagacaagaggtttcaaaaataaaaaaaattaatttttgtaactaattatctaactactattaacttacaaaataaacagttaattttattagcttacaaaatggttgaaactatttaattaataaaatttcattctattaaaaaaatttaagatagaataaaatagcaaaataaaataaataaatcttatctaaattcaaaatcaatagactttttgggttgtttgacactgcaataaagttgtggattgtttggatgttaccttttaaaacctagatagagaaaacggcaaatacaaatcaaaatttccatactatgatcaacatccaaatatataaaaatattattcatatatttgttttgaaatttattttgtatgagcttaaaataaattattttgaaacctatttttaacacaacatgcatcttattcaaaaaaaaaatgatatacctttaaaaaaaaaaatagattataatttctccatttttacaagatactcctagctgggccagccccacaatagaatttatctaatataatttttttaaaagttaagattaaaaaaaggctttgtggagatacctaaatttttttttttcactgaagcataatattaattaataaagatatgaagcatcaataatcaacatcagataacgatattattttgatttttttttaaaagcatattattttgattcttgaggcataatgtttttttagatacagccaaacagctaacagtgaaagaataatgacatacattaattaagcacagttattgtccaattccaatatacacatttatagaagaaaagcactatcaggtggcaaacagctagctattattgtactaatatatatatttatccccttttgttgataagaaagaaaacgatataacaataaatcaatttatttctaataattaatttccactacactatgctataccacactagtatcagattcagaagaactaaccccaattaaaaattaaaataaaaaacattaattataataagtcctatatttttatagaacagtacatatgagttcacaaaataaatactgcactttatccacacacaaaattaggaagaaaaaatatctgctattgataaatttcgattcattacagaccaattatgaaaatcgaagatggctttattgcaatctttgcaatttcatactgtgttctctgtaatatttgagatagagtactatatttatatagatctggttactatgtctttttctggtagtgctaggagataacgattgtgcgatttcttctgtaattatagttagagatgggtttattatgtctttgaggttgataatcacgatgccttgaagggtaattataattagtagtacaagaattattacttctataagatgatactattttcttggtagaagcttctaattcctttatgtcatccagatatatctgtctgtctcgacactctatgctgcaaaaaccttgatcccctctgaaacaaattatattaatttagtataaattaaccaattaatattgctaagtttaggaaggaaaaaacctttgagatggggttattataatatacctgtacatgtagacctctttatcaagacttaatcctttgttgcaaagatgacaagttttgagaaagcaagagtcaagggtcaagtttttaggaggaggaggaggaggaggagtttgattacttaatctcagggaagatttcacaataacataattggattcttggcttgtttgttgtgatgatgaagatgatatttgaacaaggattctcaatccaacagcgtttgataacttcttgtaattatgagtagtattattactcttatgattttctttctgaccttcaagtttgaaggggattctgaatttgagaaccatgataataaaattcagagaaaattgaagaagaagaagatgaatggagtagatgaggtttgtgaagttgagaagtgatatgggtatttaaaacaaactttggtcaccaaataaaattaaacacgtttttgcttttctctgttttatattacatcataataataaattataatgaagccccacaactttatgtaaactcggtttgttttattatattttaccaggggcgcatgcttttcccatggtcagtactgtagtcgtagaccacattaaaaaaatatataccaacatatatgaatatttgtacagtaaaagtacttggacataaatatacagtgagtgtgtgtagcctcagaatccaagccaaccccaccaccaaacatctagtttggctcgtcgtagaaaacgtgatattcatgactcaaattgggctctaaattaattatttgtaaattttatgggtctattttttaatattagcattgggtatcaacatcgtctccaaaactatttaataccgcattgtgtagacttttttctattattttattatatatatgtataatagataatagatatagatattttagaaaaaatctttagtatatcttggaagagtttttttgtttttatggtttatttaggaacactacagcagtgtccaaaataaagttaaaataactatttatgcatttaaaaataactacagcagtgtcctaaactgaggttctttcaaaaaaaaaaaaaaaatgcaaaaaaaaaaaatgcatataaaaaactaattactagtgaaacaaaatttattaaagggatatttgcggcaaaaccccctaaagtagggaggtttttgcaactaacccccaatt

SEQ ID NO: 162404 - DNA, 2182 bp, Cannabis sativa
caaacaagatctaccacctttctattctgctctctttgtttaatttctttaggccaaggtggttacaactcatctttgcaagcctttggggcagatcagctagacgaggaagaagaacaagagtcttctaataatgtcaagagttctttctttcagtggtggtattttggtgtctgtagtggtagtctttttggggtaacactaatgtcctacatccaagacactttcggttgggttctggggtttgccatccctgccacaataatggttatatcaatagcttttttctcatctgggagtaaaatatacatacacaaacaggttgaaaatatggggcgtaaacctcttcttaacataattaaaagcatcacagaaacactatcaaagtcagtaagttgcaaaatagccttacctaaggccaatgacgtagttgagctagagtaagtttaactttcttattggatatttttcaagacaaattatagtttactttacatgtatgcatgagtttctgatgatctcaactattttgtctattatataggcttcaagagaaacctctttgtcatcaaaacttgggagccatggggatcttggacaagaatttgaaaagcaatactaattacatgtttgaaaacacaaaagtagtactgcggcttttgcccatatggaccatgcttctaatgttcgcggtgatcttccaactccctgcaaccttttttaccaagcaaggtatgacaatgaagagaaatatcggaagtaacttccaaatcccaccagccacactacaaagttccatcacattgtctataattctcttgatgcctctatatgacaaagttcttatcccatttgcgcagttgattactcgaaacaaaaagggtatcaatgtaatgcaaagaatgggagctgggatgtttatttcagtcatagcaatggtaattgcagcatgtgtggaaacacaaaggctaaagattagtagaaaagaagcagcaatgcttggatctaatactgagactgtgtcactaagtatcttttggttactacctcagtacatacttttaggcatttcagacatatttacagttgttggtatgcaagagtttttctattctgaagttcctgttagaatgagaacaatggcatttgcactgtacaatagtgtttttggagtagggagcttcttgagtgcttttcttataacatttattgaagacttgacaagatccaagggaaggaatagctggttctcagatgacatgagcgaggcacggctagacaactactactggcttctcaccatgtcaagcacactcagtcttatgttgtatgttgttttgtgtagattttatactagtaggaaaaatttagataatcatgaacaaacataaacgagttcttctgtccgtttgctttgctttaataaagggaagaaactcctttggtatcctgtatttataatcctttggcaccttgtatattttcgaaaaataagtttggtaccttatgattttaataatacttatttgattccttgtattttgaagatgtacgtacatatttgataccttatgattttaataatacttatcgattcctaaatatagtacttgaagttagatttgattaataaaattttatctatttgacaaaattgttcaaagttatatataattaaataattaaatttcaatttaaagctatagtcgaattgattgtatgaacaaaattttattgattaaatgtgagttcattgtaccaaatgtgtacaattcaaaagttcaaaatttcaaatgagtattattgcaaacacataatactaaatttgtatttaaataaaactttacatttatattagcgattatttcacaaatacataaaaacaacaacaaaaaaattaaaaaatacgattgtacggaattttatatttttacgatttttatgattttatttatagaaaatacagtcttttatgttgtaatcttgttaatttgttgttgattttttgttacatgtatgctattttttgttgtagttttgatgttatttggatgttattttcctgttacttttatgtagtttttttgttgtttttgttgagttttgtaccctaataaaactcatttcaatataatcagattgactaattaataaaagatcagaaatcgcttttatgttgcat

SEQ ID NO: 162405 - DNA, 2994 bp, Cannabis sativa
  modified_base (225)..(232): a, c, t, g, unknown or other
tttctgattggaaatcgaaaaaaatagatataaaaagaaaaaattttgacaaacaaagaagaacgaagttttgttcgttgttttcgttaatatatataaacaataaactttttttatatatatatataaaataatattataataatatattattaataatataatataatataatataataataatactaatatattaacaataatattaataaaaactttattnnnnnnnnttatcttattatttcttagctactaagaaatttctactctagtgtatttggccaacttcgagtaccccaaaatatctcaatatttctaaaatcaacttatcttaataatcccatcaatatttttaactaaaaccgttgtgatatttttggcctccaatcgagtctccagggtcgtcgaacctgaaaatatttttatttcacaaatagctcatattatatccacgtatttcaaataaatctccgtaattaataaattacgcttatatattcacttatcgtgtttttagggtcgccgaacctgaattttttttattccacatatagttcatattacattcacacatactatataaatctccgtaattaacaaattacgcttacttactcacttatagcaaaatttaaattttatgctgaaatatattaataggattataattccacttattatctgattaacccatgatataaatataaaccctaattatttaccattatgcttattgggatattacacatctcctccatctttcctaaattttttggtgtcttcatcattgttatagaaagggtttttcttcatctaaatttatctcttctaaaaaactagtttaggtctcatctctctctcctctttaaaatatttttcctgaaacttagaattgagtcctttgtgcttattagagtcaatcctcacgcgtcgttcatgaatattttgagatgaatcgccttttgatcatatcccttagtcttttaacatactcacaagtatgtggatcaatgatttgcaagctcttaaagaactcattatctaccattttcaatgacttgtccttttatattctatacttatcttgttttatcctttactctgtgcttcccaaagtagacttttatttttgttagttgttcctataaaatagtggcaagaatagtcgtacaatgtccaaaactattgccaaaagtcaaaattaccataaccataaatgacatcgcaaaacatatcgtacaacatctaaaaaatcacaaaaattgccaaaccctaattcagaccaatacctttcatttatcttaatcataatacatagctaattatcaattatcgcaaattactcaataaatatcgcaaattgttaaaaacctaaaaaactgaacgtgttaaaatccagctaataaccatataaaaacactcatatccacgcattaatcaaaatttcatttctaaaacaacaggctgagctaaaataaaccaatttattgcaaactaaaaagagaaattaagaaaaaaaatgtacaaaaaactaacctttaactaggttttggttctcctaggttcaagagttggtggcagagctcagacaatgattcgagcctcgattgagcttttggttcgagtgggttctcctaatttgcgagctttggtcaagtcagtaggtggcttgggatcacactattagaagtttaatttttacaggtgactaaattgggagtgacatagattgtccctaaaaatagagtaattaaaggtgacaatgagttgtcactcttaaatttttttttattattattattatttgcagctttaggagagacaaaaatcgcccctaaaaacttctgagacgactttacaatattagaggtgacattaatataggcaagatttttcccactcactgttttaagggtgatctttgtcgcccctaaaagtctaggcgacttgaaaaaaagtatttgaggtgacttttaagggggcttgagttcacatggggcttgggttcacggaggtcttagggtcgtcaaagagcggtggtaattttggacaggagagagaacacgaagaatgagagaaagatgagagagaagggagttagagagaatggggagaagttgaaatggcatgggcaatttatgaacctatttaaaagattagcatattgttttatgtgtattatggttcaattattttgggtccatgttttacattaagcatgtaaatctaaatttctcataatttaatttaaattttgaataatgataagaatattatgtaattaatatatgatgatacttgtgtttatattttaatatattatataatcagctgtgttagtgtacacaataatcaccaatgctacaattttttagatatttttttctattgctacaatttttacttttgtgttttatttttataatttatcttttctatttttaagttaaaaattaaaatgatttatttttacgttttcttcatctaattcaatgtctctttctctctttttcttttatttctcctcaatttttggctattccaattcttttagaacctcgcaactcgagggcctacattcctcaccagtatcagtgctcctactggcttgagtttcattgtcttgttttgtctttcacgttctaattcagtgagttttcttcatttcttttctctactagctgaggaatattctttgagagtacaaatttaaattacaaccttaaatcaccatctttgttgttgctagtcttcgtccatggcattccagtttactctctatcgtagtatcgcttccattgatttcccaaaataaaaattaaagttgcaactcaaattgcaacccgaatcgcaaccctaaatcaccgccaatcatttgttgtgggcctcgtggtttctctactaaaattaaaagggaattttacaaaaatactgcttttggaccaaaactttacaattatactgggacacggcaaaaacaacatttttactg

SEQ ID NO: 162406 - DNA, 1459 bp, Cannabis sativa
gcggagtcgataagatcgcggtatcgagtgccgacgaggagacggagctcctcttgcttgtgatggatgtgggagcgcgtggtggactcggcattgcgaatttcggagattggtttggaacggaagagggcttcggcgtctctgaaacctccgccgctgagggtggccttgcggccatcatcgtccgccggaggaactctcattacttcttctttctaataatctctgattctttctcttacactaaccgaaaacgaaaacgacacgacatatatatatatttatacaattgcagattctactcttacgacatgtcgtttcactatatacacttatttgtatgtggttaattaatgttataaaagattgatgggtaaattaataaatagtgatggggaaattgccatatgattatgaatatattatatgaatgatgaagttagtcaccacttttcactcttatccaacaaattttctggtcagattcgtctgcaactcggtcggatcatgacatttagtgtgtgtggccaacaatctcttgaccttctttccaaagcagcagagggaatcttgtttgagagtaatcttgttgccaattaaggtagctgcaatgcaatattgtttgagaattcaatttggaatataaaatgaagttgagtgatctcatctcatgaatgctagtagtagtggaagaatgttgttgatggtcagttcctcaaacaccgcaacttagttcccatgttgggattttgtatggcagaaatagaaatgcaccatagcaaattatatgatcggaacacatgagcctcaaaatccgaatttggagcaatgaaaggattggcatggcttcatcatccatcaaaatatcagttgcataatgcttattagataacattgtctcatatatataaatatataagaagatgggctataatttttactcatcaccaattaattttgaaatgaaaataaggattttgagccaatgctatgtgactttggggttgcaaggctcatttgagtagttttctgaatggtgagtttggtggccactccaaaaggggatgtggtacaactttggaggggttctacttgagttaatgtgagaaggcaattgaggtagtgaagaaaagtgataattgcttcttcaagggttgtttggtagagtggattagccaagtttcaatttcaagtgattaagtgtcattgacaaacacagtgtttgagagagagaccaaccatgtttgaagatgatgatgatgagatgttgttgttggtgataattaatatcatcattattgttgtcaccaacccactttactttatttatttttatttttacttttattttcatattctttaaaatatactcaattttatgaatgatgtctccattataccttttagattaatgtaaagggattatttcacaaaaacataaaaacaataaaaaaaatta

SEQ ID NO: 162407 - DNA, 1269 bp, Cannabis sativa
ctaatagcctattgcggccgaatcgggggttattagcggcggagaggtccgccgcgctaatgagggaatatcttgtagtgccaacgaacgaacacaaatggttcgtttctcctttctctctcaatttgtttcccctctctcttctgttctcatttcgtttaccgagtcgacaataacacagctcctccctcagtcacaaacggcaacgttacaactcctcccttagtcccagacaagaaaaacaatgggtgtggattgtcatcttttcggtggtttggttctttttaatgttgtgttttggattgtgttgagaatagggatacgtcttcttgatccaatgcatattagttataattaggttttgatttgtttataggttatatctgttcagatagtgtcgtttagactattaggttatacctatttcatgtaaaaagatctcatctcataattattcagcaatttaagttaaatgtccttatttaattgcaatagtttttggtataataaggtatatatgggctcgattatttgtgtaaaaatttttattgggttcaaccagagaagactagtatataaaaatatattttttgaaatatactttaggttatggtcttgaaaatttgcaacttatttagttactagtgattaaagcagcaggaatgttgttataaatggatattctattaaactagagatctttatgcctctttttacagagcaattttatcaattcatagtgttaatttattggatgatatgtatacttatactgctcttgtaatgactgaaaaaatcaatttattttcacaccaacaaataggcttatttagtaatagaactgatatctgtaattagtgtgaacactgctttgtgagatccttatagagatttacaatactaatttagtttattgaatttgtcactatactaattttataatctgtgcttatttttctttatttcccaactgcacctgcacgtgggtgatatttaattacttgatggtttaaatccctacttaataacaaaaatttgaaaatttactaacaaaacgccacaaaagtgaaagcagtataagaatagaaaagccgtgcatacacaattgtaatttgtaaatactgatttaatcctaccttatttgattctctatatccatataaattatgtaaacatcctcttccttttttatctttactgttgtcagaattttcttcttccaaggtgaggtttactacaagaaacgtcacttttaccagcacagttcgc

SEQ ID NO: 162408 - DNA, 1508 bp, Cannabis sativa
tttttttttttttttacatatttgagctgtaaaatctgaaacttaaaatgttaaaatgtcatatattatctgactattttagaatatctaaattatctttattaaatcttttgatataaatgagaacttcattaatattatgtaatttagttttcaataatcatattcataaaaacttctctattttgaaacagggtaaacaaatattttgaaacataccacatttaaaaagtacaaattaaaaaataccatattgtgttaatagtttttaagtttctctcaaattataataaagattgttgcccttaaactttgacaagtaccatatcacgtcccctaaacttttaaggtcgttaaaaatgatccctaagattgttagatttaaggatttttgtctagtttcatttaattttactatatcacttattgtttaagtattaaattatgctccgcagactttgatatctaccaaatcatgtcccaaattatggcccctgaactttcatccgtgtcagacgatttattaaagttaaaaaaaaatccttaaatccaacaatctcaataattcaagagacatttttaacgacattaaaagtttaggagacataattttatcaatatcaaaattcaggttcaaaaatcctaattagccttataataatatatgtgcatagataaaaccaaaatgaagtcaaatttgtacaaaccaataaataaaactatactaggctccaagtgtgaggatttacctggaccacatctgatcacgcatttctgctcacagcgtgccgttaatctagctgcgtatttactattttacattaaaaataaaataaaaataaatttttacagataaatattaactacaaattgaatagcatttttcccttcagcttcagatctagtaaaattgattgattctcaagaaaacaaatcatcagaatattctaggaaaaccatatgtatcttgtattagcttcaacttcaagtagattgttaccatttattaaaaacaagatcacacaactgaatttaaagtatcaatatttgggtattacacatataagagagtatattatatattgaacttacagtcgcgttgaacgcagccagtttggcaagcatcgatgcaatcaaaggcgtcggctgctactatttctgtgtatgacaaagccaacaacataatcatagccgccacaaccactgttttcttcatcgtcatttttctttcttgatctgaaattgctttacttatcttatcttatatgtgtaatgtgtatctatattagcgagagttttttcttacttttatatgggtccggactacggaataacaatatgcccatcatcttcgtgtcatattacaatatgccattgccactattttcctagcaaattttatagtaattataagggatatttgcggcataaataccatatattttcaattttatacacttaaatattacatgttttttttttgacggattaaataccttaagttacat

SEQ ID NO: 162409 - DNA, 4868 bp, Cannabis sativa
gattttttccgaacagtgtcctctaaggtatagcataatggaatagtttattttcttttttttttttttttttttttaattaagacactgcagagccccttgaaataaacaactatacacccaaaagcaataggtgaagtttaaagagaaaacgccaagtcttttattaagtcaaacgctctcagcatttgctttgtacattcagttatatctttcggcagtgaaattaacttgtgggttgcggatgtcgtcctggctttggatcaaacgaatctccaaactgcttgacttgggatcgtgaccagctcttttgtaatcattcagtgtcctctgcagaagtgcctgtaagttatgaaaaagattcattagtcaatcagaaactacactgaaataatatagctatctaagataaattttgttttggatactactttgcttcgtgtccaaaacaaaatgtctgggaagtgaataaggtgaagcaaaaaacaatgattctagcacaaaaccctattttgtttccaggtgatacatctattttgcaaacattggtggattagtgataagctaaggccgtataatttcatgtacaataaataaaaccacttttaagaaaggtgtctaaaactttaaataggtaggtgcgttagtacggtatatcaattgaggtctctttcgataaagtaacaaaagcgagtacatcgaaattgttaaagttacaaaatgagagaaaccattgagctgaaacctacaaactcctgctatatcttgcctaaaacctaaaccaaaactgtaattatttattaaataaatgagctccggcttatatgagagtattcacagcaaaattattaacattaggtgaagtctttataatcaggaattaaaacagcctacctgtaagcttgatacagcaagttctgctgccttgtcaaggtcgtcaggatatttctgatgaacaagaaaagaaaatctattaattctggcatgaattgcttcatactagcaaatgattagccagaaaatattttaaattccttacattgctccaaccaagtagaagtgctgtcataagatctccagtgcccttgcataagcgtaatataaatttgttagtctaaagcatcttacagaggaaaataactaatactgtagagctaaagctgcaataaacaaaacagcagtgacagtacacatcgatgatagtatttataggaggcatccactattaataaccaagcaatttagattgtgatcggcaagaacatttagatcagaaatctgttgtaaataatgatgtaatcaatttatttaatctggttagtattgaaacatgctaaaagaaaatcaagctaaaagttcaattaaaaacatcttccgtgaagctcttaacaatgaaaaagatcttccgtcccatgtttctttgaaatatatctttctgaggactgaagaatgccaaaatgctactaatgattctatgatttttttctttatcttaattcgaaaacttccctttaaaatttcttaagaagatatccattttagaccacatacccttgtaccattttcagataaacattgaaagtgtgagatttttcaaaataggtatcatggatttctgtaacaaaatgaaaaccttaatcctccaaaacatcctaaccagcttataagtaacaagtaaataaacacccaagaatcttccatttctcagaaatactcaacatattgaaacacatcttcagtagtcctttaccagccacttaacataattcaaattcaagttctcttaattaccataaagttacttcaagcagtaaacatttttttttcaagaaaataataaacaaacacagaattccacaagcaaaaaaactgcactccagtcgttctaaatacacccttgaattgaaaatataagatggtgcgaagtgcaaccaatggtttttattgtggaatgaaccttctacttcataaaatatcttggtggtttcacataggggaccagtaggactaaattaagatcttaagaatatatagttaaacctacaagctttgagaggcaatatatctagtataatgttagaaattgtgttccatacttcatggagaaaaccataggtcatagtacttaaactatttactattcatgggtctaactaagttagaatctataccttgtcaaaggcataagtgattaaagtgccaaatgatatataatctaaaaggactgcaatttactttacaaaaaattgtaatttgatgagtaatgcttaggctctgtccgcaagtcattgaaagcagcagtcagattattatgaaatagcaactttttgttgttttaatcagctaataaatttgtttctcacagcaaaaagcaaaaacaatataaacaagccctctgacattgatctggttaggtaacagacacagtcaaatttcaagccttttatgaagaaaattatacataaaactttgctgatggaagaactcgtaagaaataagaatattcctcataccgtgaaatatgcaggaattttgggaatcctgatcttaaactgcttaggtgactcaccctgtcaaattcaaaccaaaatatcatacttcattacagctatacagtagagtaaataaactagtactttcacctccaaaaaaaaaagaattctgcactttgacagcagaataacaactaacatcttctcccgcttttcaaagaacatatgtgcaacagatattgcaccattcttgtgtgtcaaatattgaaagagattcataccattttaatcaatatcatacaatacagaattatcaatcattaattagttgactacagggaaaactaaagaaaaccaaagttcctaaacatgacttgcattggttgtgagctgattaactccctcttccctccctctctaggtttttaatggattgcattggttgtgagctgactaacttactccctccctctttccctccctctctcactatatatatagagagagagagagagaggaaagcagcaaggaaaacaaagaaaaagaagttcaagacaaaaaatatttttgcatttacgctcttcatagaagtactccctgactttcaccttgtttggaaattcagtcctcaagaattactccttgttgtttatttttctcaaaattcttagtttttgaaagaaggtttttttatttttcttatacaatgagatgtgtataatgttaagaaaaatatcaaattatccaagaaaaaacttcaaatttaccttaaaaatgaactaaaatgacttcattgcactgttttgaaattgaagaacttaattgtcaacaaaatttctcaactgactgaattttcaaacaacaaaagcttcagtggatggctatgctataaaccctacaaagaaatatacctcttcatttagatgactgccaatgaggagaagattaccatctatgttaatgcttgtaattacaacctgaaaaaattatcacaattcagtcatcaaatactagattttgcttttcttaaaaaataagagataaaggtaacaccagaaataaaagaagtggatacataaattttcttgaaaaaattaaaatattattgtttgtaaaacatggtaaatgaattgtacattttattcaaaggaataatgtgtatttatatacaaacttaggagactacataagaaactacctaaatacaattaactctaatttttttacaaccaatatacggctaattatattctaacactccccctcaagctggaacatagatgttaatcatgcctagtttgttacaaagataatcaacctgcctccttttcaaagcctttgtaaaaatatctcttaattattctcaggtctatacatattttgtggagattaggccttattgaattttctcatgaacaaaatgagaatcaatagcagcttgattatcacaccacaattttgctgaaagtgaagtcaaacccaaattctgtcaaaagctaataaatccatactatctcacacacagactgtgtcatagctctatattctgatgcagcactagatctagacacaagattttgtttcttactcttccaaaagatcaaattgcccccaacaaatacacaataccctgaagtgaattatctatttaccttatagcctgcccaatctgcataagagaaacactaaatttgggtgtgttgatgatccttgtaaacaatacctcatcccgttgctcctttcaagtaacacaaaatttgctctaatgctgtccaatgatgaattgttagagaagacataaactgactaacaacactaactgagaatgtaatatctggacgagccacagttagataattcaactttccaaccaatctgcaatatttcgcgggagttttaaatggttccccaccacatgtaagatgcacagctagattcattgtagcactacaaggttttgctcccaattttcctatctcagttaacaaatcaagtacatactttctttgagacaaaaaaataccttgtttactccgagtaacttaaactattaagaattacttaagcacccctaaatccttcgtgtaaagtagggtatgaatgaaagacttaagagatgagatgtttttagtatcatttccagtaataacaatgtcatccacatacaatcgaacgaaatgattccaacagttgatcttttataaaacacagaatgatctgacttacttttcaacaagtcgaatttctcaacagctgactaaatttaccaaaccaagcaagaggactttgtttcaatccatataaagatttgcgaagacgacaaacttgccctaactccccgtgagcaacaaccccaggaggttgctccatatatac

SEQ ID NO: 162410 - DNA, 813 bp, Cannabis sativa
aaaaaaaaaaaagtataattagattgtattgtatattataatgtgcacgccgagatgggaaatcccagaagagcattgatgaagaaaacgtagggtgatctcagcatttccctacaagtgcgtgcgtttatttcccttcattattatttatcactgccacaggtgagatttcagacttgagagagtgtgagaatgcaaaacgacaaagaaatacgacaaaacgacgatcattttaactgttcttcaacaaatattgaaacatgggtggggtgagcttgctcttctctaataaagatatttcttttcaaaagaaaattgaaaaatcaaccaaccaataaactagccaagccagccataattctcaatctgatgcacaagaatagcaaaaagccatctattttcttctctttaaataggcacaccttacaagctcaaacaaacaacaaaacaaaaactcttctctttctctctctctcttcttaaacttgaaaccctattattttttctcttttccctatcctctcatcagaactgaaaaaggtttaaagagagaaggggaagaagtggcaggagagtgagttatacttgatttgcctgaataatgaaaatcccactaactgaaagtagagcttaaaattttgtgaatttgttgtattatcataatattatttattatatataagaggaaaacaaatttcgatagagaaacaagccctttatctttcatttaattgatggcaatgatggctatttttcatgggaattagcaaaacaaacgcaattcatgccaaaactgatttggtgggagagact

SEQ ID NO: 162411 - DNA, 4368 bp, Cannabis sativa
  modified_base (3680)..(3684): a, c, t, g, unknown or other
  modified_base (3712)..(3723): a, c, t, g, unknown or other
aatacatgttagtttctctactcttgattgcatttggtctttctatcaacccatatatgccttgctgactttaccaattcctcgtcaacaggtcgatatgtcgctcctgaggtttttaaaaatgaagaatacgataccaaagtggatgttttctcatttgctttgattttgcaagaggtaaatggtaattgtgctttctttgtggcatgtgcgcatcttcttcaacaataatgaattttaattttttgggctactttagatgattgaaggttgtccaccattttctaccaagccagaaacggatgttccaaaagcatatgctgcaaatgagcgcccgccatttagggctccaccaaagcattatgctcatggattgaaagagtaagttctataaccatcttctttaaaataagaagtgacagttgccttgatttttttggctatttctttcattgttctatggtaatgtatttatttgttttatgcatagaacttagtttggtgtaaacctcattgttcattataaaaactctcctcctcaatgataacttctgaagaagctcatgcaattttcacaggttaattgagcaatgttggagtgaggaaccattccacagaccaacgttcaaacaaataataaacagattggagaacatctatgatcaatttgctcggaacagggggtggaaggtatcctgtctctctttctctatatatattttatataatcatttggctaaaatttatatttcaacttgatgtatgctagtcaagattactgatttcctaccctgtattatatgaccccgtcactgactctgattattatttacaatgtttctttctggaatcttacttttatacaggtaaggccacttaagtgctttcataacctaggggctattctgagaaggaatcgtacgagtccaagcagtagatcgcactctcgttctggtcctaccaggtgaccgttggggttggagtcaatgcgtgtagatgttgtgcttctttttgcttggaacgatattttctttgggttattttagcagtaggaaccaaaatgtatcgactcttgaccctgtttttcatttcagtggtagccatgccaatctgttattcatggcatgttaactaagtggaagcaagaaagcatgtgaatagaaaatttgatgtgtgaactttcaatcctatttcctttgtttattaaactggtttcagttggccttgtaatatagcagctgatatgtcattttttttaaaaatctgtgactgtaaagtcaaatggggcaacttaacaaaaaatgcatgatcctttgtagattgccatgaaaaaaaaaccagcttgggcacacagaggtcatagaacaaaaagggccccactttgaaagaaataaagaaattcattttgttcagtatttacagatttgaaaaaggaaacaagtaaaatatttacaaagaagattaagtgttctatggcctgttctgtagaaactcagagagagagaaatggaattttgtacgtgacacagcaagtggtgcagttgtgctatcttcctctggtttctcatccttttcagaagcaagcttcttctcatggaagcacagtactttcggatgtgccttaatcttggcgggatccaaaccagttatgaaaagtccttcggggcttttcgcgcgagacatgactacataatgcataccatactcaaaagcattagacaaatcggccttaatgaagtcaatagtcttcccttgacacttgtgaatgcttgtagcccatgccaaagtgagaggcagctgctttctctctgcaacaatattatctccatctttaacctgccatgttactggttcaatcaccttcgttttccccgagtcgaacttcactaccggtagtagcccatcctgacatattgtagcaatatctttctcttcagtattcgagtcagtatctatatcttcatcttcatccttatcctcatcacccacaccaacagcatcaatccttgaaaaatccacaatctcaccagtggcaccattcacaaaattacgccaagtatttaaattcttggtcagcattaccctggcacctaaacacaaactaagctcagaaggggttgcctgatcaagttgtttcctgcaacgtttgatgtcactgccactatcaatggctttaaaaacaaaagcttcatcacctaaacttttcattctctcttcattcactctacttacatctttattcatgggatagacctgcacagctagcattgctttagaatccattgcggccgaagattgcaaccgtttaaagtactcttcctcttcttcaccaagcttaccaatccttatattctgaaggaacttgatgaactgaggatctgattgcctataaaccttggtaagttcaacttgtaaagcaaaacttgagtcccaacaatctgcttcaaaagcaaattgtttatcatcatcatcatcaccaatccttttgcttttaactggtggaagctgaaagaaatcaccactaacaacaagctgaattccaccccaactcgaatcatcccctcgaatttttcgagcaacgaattcaagattctcaaacagttgagcatcaaccatgctaatctcatctataaccaatgcctttgctgtcctaaaccttgaactagccttcctatttaataagacacacctaagcatatcttctttatcacacttatggctatgaatacctgcaaaagaatgaagggtctgtcctctaatagcacaagcaacaacaccagtagagccagtgacaaaaacttgtgatggcttatattgctttctcaataacttaataatatgatttagcaagaatgtctttccagtcccagcagagccagtgatgaacactgatttatgccttttaacagcatctataatcttctcttgttgatcagtccatttgggtttattattattatcatcataactcttcttctttctacttttgtacacctttttgggagactcataactgattttcccaatacttttggtactaaattttctatacacaatgattgcagccgcaaacagcctgatacccatcattttttttggaaattcctttctgggtcttcaaaatttatctttaaaatttcacattcatccgagaattacgaattttttaacattcaagattgtgaattaatagcagaaattagaaaggaaaaaaaggcaaaagaacagaaaagcaacgagtttgtgttcttactttagataaactggggtttgaatactcgtaaattccaggccaaactgctttgctcaggcaattaagagagaagaagaagtcttctctctggtactgaacttttgattcttcgtcgatttctctttatttttcgccattactcaactcatgccactatacgtggtttgtaactgaacccgatcatggggagtggctaaaacatgggcttatgagcttttgggctgttcaattgggcttgagcctgattttgggcttgtgtagaaatcatagataatttcaagggattattttacaaatacacaaaaataacaaaaaattacaaaaatagggtttatggaattttaaatatttttatgatttttttgattgtatttatagaaaatacggtctttttatgttgtactcttgttaatttgttgttgatttnnnnntatttgtatgttattttgatgttatttnnnnnnnnnnnntatgtagttttcttattgtttttatggaaaactataaaagtataaaaaaaattctttttaaaaatataacaaaaaaaaaatactcccttatataattatccctaatttcaagctctcaaatgttctacttgaaaattctaaaaacaattcaagagaggggcaataatgcaactttgtaatatttcattttattttttcttctacttgagatacctatatagctcattctcaaaaagaagaagaaaaaaagagatatgtatagttaacctattttttttcttcactccctgtccctttattataattgtttcttatgtgagtttagttggagatagtaaatttgaagagaatatgaaattgaaagtgattaacattattactattttaatttaaaaagtgagacacacttaaaaatacaaatttttttatcattaaaatttaatttaccaaatatagattaaatttaaagtaccccatacctaacactttattttagagttttgttaggagtgatgtgaatgagagagaatttgtaccattgactaataaagtttattaactaacttttttatctattttcttcattccttctaaaagatgattataaaaagggttatttgcggtaaaaccccctaaagtaggcag

SEQ ID NO: 162412 - DNA, 2649 bp, Cannabis sativa
  modified_base (2620)..(2623): a, c, t, g, unknown or other
atatatatatataatagatatataaacaaatgaaatatataataataaatatgtttttttctctaaattattactttgtagaattttgtccctaaatattttaatttttttaaagtccccgccaaattatcaaaactattacaaattggctccttatttaatttcattgctaatcaactaaatatacaatcttacctttttgatcttccaataaaaacatatcactgccattgctgatagggatcacgtactttctgaaaattgtaatacagaaataacagtcaaaatttgtttgatctaaccatgcatacatatatattgattcaattagtagatgttattttttccaatcagtataaccttatagcaatcaactaatctaacttgcaagttttttttaaagcttatacaaaccactcattatttttcattgaaaaaataatatacttttgattatcataaaatatataatgaaataaatactttaaaagttttttaatggtgcaataattttaaatacataaaaatatttgaatttaaaaataaaatttattttttttttatatagttttaattattcatataacataatagtcatgtctttttaatttttttttttttttggtagcaaaaaaggaaaaaaatcttacttctcttaaatttataatgaatgaataataaattataagttagagataagtattgtacaaagtttttgaatgctgaaaaataaatgatcccttttttacttccaactcataaagcaacaaatttaaaatacaaatgagtacattatatataagtacaaatatatgtattaattaaaaacaattttcacttttgggaaagtgataaacgaggagaaagttgggaagagacatttcttacttaagacaattgcgtctccttgttcgagtttccaagaatcaacactagagaatttcaggtagagatgtagcaaatgtgcataattatatatatgtgtgtgtgtataaacaactcgtaagaattggggtctgttgcttgttaattacatcaagtactatacatcagcccaatgaatgatgtcacctatatatatatcaatttccaggaagaaaagaacaaagaaaaaaaaaagaaaagaaagaacaccacctatatatactaaaaaactatataaaccgtggttatcttaagcaactcattaacattgagtaaaaaggcaaattgatcaactttgtatacatatatattacttttcatcctagtactcttcaaattattatttgcatgtttacacctgatacgttcgtgattcgtgcatttatattttgacttgtagtttaggtttttccttcttttcttaaccatctacaatattaatttttaatcctatactcttcaaagattgatttttatctttctgttcatgcatggtgaattattgggacagggtttggtacttctggacacttcaactacaataaatttctagtacaaaaggataatttatatagaatgggtactttttttttagaataattaaaaggataagtcatatataacataagaataaataagtggaggggtgaccctaaccaaaggcaagcttcttccacctctaatgtaaatttcgccaattcatgagcaggaaaattagctgtacgcttgacatgtgaaatactcacactaaggaaaaatgaaagaaaactagtaacatttacaattaagtcttgaaaagaagaaattgcagtagaaagagtgcgtagagcattaacaaaaaggagagcatttgattcaaaatctgtaataggaagtcgccattgagatgcccaatttaaactgtgaaataaggctttagcttccatctcatgaaaggtaaaatttttaattattggcattaagagggctgctgcaacctgactgagagaatcacatacaatagcaccaaccccattcttgttaacatccacctctgcatcgacattaaactttaaaaaataggcagctgccatggagaaggagattcaacagtaggaggcattctatcatcaacagcatttggcgagtgatattatttacttctgacagcttgagaattatatgtaattactagcaaatgctgcaacatccatagctgatctggctttatggccatgaattacccggttctatttcgtccaaatcgaccatagggtacaaatgatgtgttccatttcagatttcgagtaaaaagatgataggtgaaccaaataatcgcctttcctaattgtagttgatcgctaccaatcaaagtttagatttgaatgtttccaaaatgctctagcatactgacacccgagagcacgtccaatggattctcaggcctgacgacaaattgaacacgttgaatcagtaagaacctttcatcttaccaaagatgtggtaaccggtagagcatcatggtaaatacaccacgcaaggattttgattttcggtggtagattaagagaccaaaagaatttccagcaagacttggctgagtttgagggtgaactcatatcagaattttcaattgatgatgctaaatgataacccaatagaacagtgtaagaacctgagttatggtgatgccaaataagtgttgggttttatgccnnnnataaaactctttacaatctgattagt

SEQ ID NO: 162413 - DNA, 1565 bp, Cannabis sativa
ctggtaactcatttgaattgaactttcaatgagttgtgagagtgacccgaattctatttgatcttgtctgaaaagaaacttgcattgttgtgacataatgaattttctctcatctgctcatagttttttctcgaaagggttcccttgtgaaaccgtgcattcttattttcttttctaatatctatttgtttgtcggtctattttttacacaatgtttgagatattgtaggtatgtgactcttgaaggtagacctcatcacaagtatctcttctactacattgttgtttcagaacgaaatccaaccaaagatccagtggttttatggctcaatggaggacctggatgctctagcatggatggatttgtctatgaacatggtcacaaaattatagttctttgtttcttaaattaagttctaattagtacaattcttgaaatgtcttcttattgagttcctttatttcttcaaggcccttcaattttaaagctgtaaagcctcatggtaccttgcccacattgcatctcaatccttatagtcggtccaaggtttcaataatctcgctttttcctttactgttacatcaaattttaagacattctcaacttttatttaagttttttgcttttggcttgagttttcaggtttcaaacatcatctatttggattctcttgctagtgttggcttctcttactgtaaaagaaccagttattatgaaacaggtacttggaagctgcttcttatacacacaagtttctcctcaaggtgaaaataatatgaactgaaataaaaaaaaaatttattgctttctttactgaaattgttctgtcttttgttttgtttttgtaaaaacaaagtggtttgaggagtttctagagttcatttcaaatgcattttataaagctgaagaatcttatgttggagtttatgtgcctacccttgttgctgatatagtgagaggtgatacaacctatcaaaatttaagacaagaaaacaccataattcatggaatttttaagtttaattcagcttctcatgtaggaagtggtagtaatggtaatggaacaaatcctacaatcaatctgaaggcaagaaactacaacctttcatcttcaaagaactctacgctttgttcatcgtaatcattttaaccaaaaagattgaaagttcatatccatttgatgcagggttacatggttggaaatggagtcactaataaagttttgatgacaatgctcttgtcccatttgtacatagcatatgactaatatcagaagaaatttttgaggttgctctcaagcgacataacagctttactcttattggatttttagaaactgttggcatatacaatgaatagaattgtgtggaaggattttaatgcttgcaaaaacaaaacactcttataggaatatgatgttgtgtgaagaaatgaacctgtttctcccttgctacatttttcctctctgctggttgttgtggtccaggtttaggacaagtgtctatctctctgtcaattggagatccctaggtagatataaccgttattcttgtaatgttgaggc

SEQ ID NO: 162414 - DNA, 3543 bp, Cannabis sativa
ttgaacagcaagaacagggttatcgaacagacttcatatttggctttcaataggaaaatccaagtatacctagaataggcatctatgaagtgaatatagtatctatatccacatgaggatagcataggtgagggccccatatatttgtatgaataagctgtaaagatttagcataaacaatttgataaacagggaaaagaaacttgagaatctttcctttgcagcaaatatcacaaaatcatcaaaggttttattgctttcaggaacattacaatgtttcatgatggattttacaatcttggtagaaggatgggaaagtttcttgtgccacaaagtaaagtaattacaagaagatacagaagaggaacaaacattaacgttttgaacataaagcaaaatatttggactaaagaatgtggcgctcttggatagttgaaattaggaaggctctatgacataaagaccttgcttaagctgccctttcagtaagatttccttcgaaacttggtcttttacattgcaatagttagggtagaactcaaagaaaacattattgtcatatgcaaattgagaaacaaagatgagattttcagcgataagtggaacatgaagcatacgattaaaaaccaaaggcttggatgaaagagatgaatgaaagtttgtattaccaatattttggattaaaagaccagtaccatcacccatgtgcacttgatcaaatcctagataaggttgcttgtgtgtaaaattggatgagcttgttgtgcagtgagtggtggcacctgagtcaaggtaccaagcctcattagaaattgtgcctgtagtggcaatttgagctgagtgttgagtaacaccggctgcatcgatgcttgggaaatccacgttgaacctttgatagcatctagatgcaatatgaccagatcgagagcagagttggcagactggtttggactgcagtcattgaggtattggttccaggattcatagaggaatttgtggtgccacggcctgcagagtaattcttcgagtttgaactaacagtgttcgatcttggattaacagcataagaattccacgttccactaccataagtgttggagttagatccagatcagtttagtatctgctatctgcgatttttggaaaagaaggcttgtggttttgcacgaaaaccacgattggtagcaagataaacaaaatccaactctttgttgtgattttccatacgatgttcttgagacaacagtaaagtctcaatttctgcaacagagtacagatcatttctcgagttgaccaagataaagtgtcataaactggaggtaatcctttaaagattgcagaaacatgttctttgacagaaactttatggccaacagagcctacacgatcaacaagattcgttattctaagcaagtattcattaatggtgagagagtctttcttatagtttttgaagttgagtagtacacaaacctattttggcagaagtttgtgtgacaaagtatacctccagtgtcttccagatttgtgcagaggtttcagctccaacaatgtgagtgaggatgccatcagacattgaggatagcaactaggagtagagaagttgatcttgaacctcccattactgaaatcttggatttagctgaccacgaacttcatcttcttgattgagaaacttgacaggagtgaaggtatcagagagaagttctgaagttgatgtcctcgaattgttgggagaacttggggacgtcaaaggagaaaattgttatcatcaagcttgacagataactttgtgtgcaaagacgactggactgaatgctagagtacccatgaacgatgatcaactaagaacagagaagagtaataatggcggaagtagaaaaaaaattgctactctcataccatgttgagaagaaggagaagagaaaatatgagctgaatgtgatttgtaataaggaatcaatcagtgcagaagtgcccttaaatacaagctgttaagttaattaacttaagctaatcctaaccggaagtagttagagatacaaaatcttaaaacaaaatataactaacttaggagtacatagagcttgtaactactttatctaacactgtgtgcgctccaaaggtctaactgtagctcttgtacagaagacaaaaatcagaacagatgaaatgcaagttgtgaattgatattgtatagttataaacatgaaagcttaccataacgttgtttatcaatatctatatccagatatactctatgggttatttcaggaacctcttctattttctccacacgttcctcctcctatgcatcaaattggtacaatacattaaatactttaccaaggaaaggttagttagctatactatcatcataatcaaatgaagctaaaattttgataaaatcagatcatacaagtagccagagcttatgatattgcaaaatattagtttagaagatgtaacactgattagtataactgaagtcttcctgatcacaaacaaaagtagtatgcttagagttagaggtacaagaaactacaagaacaaaaagctagtccttaataacaaactgcatttttcgtcagtaccaacaaaggaaaatattccattcaaaaacccaaaattgcaataatttggtagaatatcgacgcaactaaaattccgaaacccgattttgctcttcacccgttcaaatttctaataaattataatagaaacaacaatagaatcccaaacccatgtggagattcattaatacatcgcattcaaaaactattggagcccacattgtagcatttcaaagttgggtaaataattcaaaaattcagaacgagatccgctaagtaccgaataaagaaacgaaagagatagagaaagcttactcttttaggagtagagaaggcgaatatgagaaaaattgaaagaactacgaaaagaagaaggcatcttggctgaatcagaaacgagatctctcgacgcatcgttccaattcagttcgattcggttcagctctctcagtagttaaggacttatgaacaggtatatcttccttgttgatcctccatcaaaaaccgaaatcgaacagtctcagctcagtccaatccagttatggcgagagtagtcagtggctgcagactccaggaattgcagacccaaagataggcgagtaattaattttaaaaaagaaaaaaatatgaaaatttggaatagagatagaaattgggcggttaatgtacggggaatgcaatctctgccgccattgcggctacctatttatactcccattcccgtctaataactaacgaattcggggtaagagaatacccatcggttatggaaaacccatcagttatggggaacccattgagtatctattaaggtaaaatgaaaaaaaaaattaatttaaaataattgaaaaaataaactaaatcaatactctcacaaatatttattatgcattcataattcatagaagacaaatgataaatctacctaaaaaaaagcataacctaatagaaaataaaaactaaatatatc

SEQ ID NO: 162415 - DNA, 2697 bp, Cannabis sativa
tgctttggattttcagggaaaagtctcaccatgaaatcttccaaatgttgggaagccataattcacctttgcgtcagatagatttaaatgtaagatgcattttattgtcatacttaccacacagcctagccaatatcaatttatggttattttgattttgattttcttttatcaaataagtagcagctgtaattataaaccgaagtaccgaactactcaaacatgaatcagttggtaatattgtttttcaatagttaagcaaccaccttcattgcatttattgattcttttaggataatgtggattttgaggaattcctaagacacctaacaaatgatgagcaacaacaattactgaagtttcttcctccaattgatgctgccaaacttccagatgggttagaatttttgtcctgactcaattttgttagataagccatctcttcttgcattatactagcgtgtaactatactgcggtatgatgggacgagagagtatcttccattcaagctgaataaaattaatgaaaaaacctcttatgtgatctgattattgttttctcgtctatgcagccttaaaagcttgtttgatagccctcagttcagggagaacataacatcctttcagcaactgcttgcagaaggggtctttgatatgtccttctctggggcaaaacccgaagattgtaaagttttgaaaaagcttgtgttaactaatttgtcaaagtctaaatgggttgaacacttgcagctgcttaaggtttgcagttcatttgaatccttgttatctcaaataacaatcgatatggaaaacgaacctataattaattatcactcattagcatctgtctctttcttggcagaatcctaaaaatagctctagagggtcttcttctatatctggacccaatgttgcagcatcaactaacaagagaccacaagacaaccaaaataaaaaatttccaggtgaggctaaaaataatttcttgtggtatattgtttgcttaatgacacaagttattcgttgttctataacacaaaccgccttggttatctccaattgcatgtttgaagggaaaccaaagagaagcaaacaaattggaagtaattgaatacatctaagtagaaatttgaatattattttatttaacaatagaaaaatggagtatgagcagagccttttgacatgcaaatttcaatcaacacttacaaatgggaagatatatttagggatttcacaccctttgatcctaccaattttgacaatgttatagaataaacaaatggaaaattttgtaagtgttttcttagaactaaaatgcatgtatggtattctaagcatatctttaatctttcagaagtaaagatagtgatgaagagccccaaaagggtgataatgaagggtggctatgataagaaagaagtcatcgacaacaatgacggctcttgctttagcccaagaagcttatttgctgcatcacccgatggtggctcgttcttgcttgactcaatcaattttgttgaagaaagttctgatcaggacttgctgctggatgtgccatccaatggctcttttgcgcaagcagaacttcttctcccaacaataagttttggttcccaacaagcaagcactagtagtagctccatttccccacatcaccatgcccatccctgagaagaccatcatcgaatgcagcattgatccgtagaagaactatataggtatgccttatgccaggaacatcatgactgcgtttcgcctattttgtttggtagacacagaaaaacataaaaaaacgaaaagaaaaagtctgaatgaggtttgatggttgctcttcttttcccttgacctttttgaacttggaattcaaggggatgaatttgggtgggttttgttgtataggttgacaacaggttgtaatatatagttcataatgcacaagtggtaaattttaggtttttgtatgaaatggcatactcttagtcttgtcaagaaaggggggctttgttttcatgttccttaacattgtttataaaatagatgggggacaaaactaggcaaattactttgtgggggagaaaaaaggaagtgcccctctctaggaacaaagagagaatattatttggtttgtaaggtaggctccttgttgaatggtttgatcaatgcatcggtttgtaatggtgaaatgaattagtattagttccaattaatagaaaattttaagttatagtttactaaaaaattgatttaatataaaccatagatgttcatacaaccttatgagatgccttgttcaataagtaaacctttaatggatagcaagtgaagagagattatgaataaagatgcacttaaactataggcttctttaaacaatataaaggttgcctttgatatctatttcaaataccttaggtgatccaaatagtagaagggaagttatacaatttaatatagaattctacatattttaattcttcaataagaatatgatttggggtggcaaaacgcgtcttgtgttcgtgtcatattttatgtgacttgtttttatattttgtgtcaagtgtgtcgatctgttttttgactagtgtctaattctctcaatcctaacttggcccgtaaaaatcgtgtgtcgactcactgtgacttgtttcgctattattgaagctggagttgtagagaaaaatgatagattta

SEQ ID NO: 162416 - DNA, 1758 bp, Cannabis sativa
acgaactaaccagagaaattatcaagtaaataagggtttagcttaaaatttcttggctgaaacttgaggtaattatttagcatcgatgactcagaaatggcagagcgaacctaaagctcaaactcaagttgaaattgttaaaagcacaacattatcatcgttagttcactgtgagcttgaacagcatctgataagtcgatatgattagcaacttagaacccgaaaccatggcattgcacatggacgcggcagtacaaacaaatactgtagaaataagactaatgtttgcgagcataaaacatcctaatctcataaggattaatatgaatagagaaggaatcagtcagcggtaagaatatagtcattcagcagagtctcagatgctcggcacagccaaatatggtagcaccaggaaaacatctggacaatgagacctgtcagaagtacctgctttatctcatcaccttcagcattctctattcttgtgttgttacaaaaggttaacaatatgatgggtatttcaaagtctcaaatgattataattatacaacaaataaatcatatttcggtacacaatctcataggggcaaagatcaacataaactgcctcaaacttctttctttccctaataaataatgtcaacaacaaccattgagctagttctttaaagatggaaaaagacaaataatttaccaagaaaatatgtaacttaccaaacccttctttgttctttctaatcaaatttatcatatgtttgtcattggctaaattcccatcactaaaataatattccacctacaagaagaaaaacccaaggaaaattagaattgctagagtgattttaaactcatatatattttcaaattaatcaacttattgaaaaaatcacagggtttaacatttaactcatatatacaaatcagattcagcaaaaacaagaacaacaatgcataaaattaggtcatgtaaaaaacttcataaagaaacaaacttttttcttccacatttccaaaaaaccaatgataaaggaaggagaggttacctgcttaatgattctacgtttcagatcctcagtaagagcaccggtgggttggaggaggaggcgatgatcatgatcgagggtatgatctactagttcgtcctcagaaagagcctcgtgtacgtcatcagccaggttatggggagatccgatgggcgaaacatcgagaccttctggcggcgacggtggtggggctgtgatggtggtttccatcctgggattggaatgggaaccggtgggaggagaggaggagagagggtgagctggtggtgctcgtcggtcggaatattcaggaatggaaaaacggctcctcctcctccctcattctctctctctctctctctctctctatatggccctcaaagcttcgaccttttatagaacaaggaaagaaggaaagaaggaaggaaggtcatgttccattagagagggtattttggtcattttattgtatctcaaaatatgttccaacatggttttattattctaatctcaaaaatatgtttttgagatatatatatctaatgttaatgtacaactttgtaaagtaaatgacatcaacaaaaacacaccttctccttaaaaatgtcttgaagatacataggtaaggttttagggtaagtttacattttactctttaggttcgtttgaaacgtcgtattagttcatatttttatataatactgtgttaaattttaattcatactaaaatattata

SEQ ID NO: 162417 - DNA, 1385 bp, Cannabis sativa
atccattgtcttgctttttcacaaatattgtcttcaccattattagatttttctcctaataatattctcatacaaatatagttgagaactgtgctaaacatagtgctttcaccttcaacatgcaacccccatccaccatcttcattctacacataagaattgaatttaaaaactaaaaaatctcaacatataaattaatatacaataaaaaattatactttatattataatttcttaacctgatgataatatatataacgaataatttctttgcaatgttcagggctcaaaataatattaaggtgacctgtaatgtaaagacacatcacctgtatatatataatttatacaggcacaagagtatataagatagtgatgaatatatacactaaaaacttatatatatattttcaaattaggcttttaattattacatttatatctttattattatttttaatgtaatattcaaggattagaaaaaataataatgaaaacatatatatagttattgtattaattttcagggatgattcataatatataacatttcatttcatgatgtataatatatatataaatatatatatatatatataaataaaaaaaactttcttgtaaaaaaatagaaatgaaagtacaatattttaatagtattggaagtttcataaccaattcattttctaaaaaattataacataaattcatcttataaaattgattgaaagagtaaataaataagtgactatataattagaactatagtttaatcttttgttttttctcttaataagagtataaattaaggaattaattaatctgaccaaaggaggaagaaagaacaaaggaccagcattctcagcaggccaatgtccatcatcggcctgcaaagctgcgacgaattgaactgcctttcttacagacgcagtcgccttttcataagtaatctcttcaccatcttctatcttaactctaccaattcttgatttgaatcttttttctgtcaaaaactgcatgcatgcatgtatacatcttcaattaatcaatgtaaataaaactatattaattagtatatatgaataccaataatttggtacttcatattttataaaattatagtgtacaaacttatatctttaataatgtttgttttggtttctgtgttttatgtaaatacatatttaatcaaatttaatcaataaaagtttataaatatatgaacaaattaattgtactcagctatgtagattattaatgggaaatttgattttatatgcttacaaaattaaaaaattttatcattaaaccaaaaacctaaacccttaaaaaactatgccttttttttcaaaaccccaaaaataccccccacaattctctctctgcat

SEQ ID NO: 162418 - DNA, 2888 bp, Cannabis sativa
  modified_base (2847)..(2863): a, c, t, g, unknown or other
tacttattagtaaacatgtcattttacataatatttaccctatatttattgaagaatgaaaataaaaaaaagtcgtttttatcttattaatttgacaagttatcattattatatcatattttttttcttttaatatattacaatattatcattacgtggtcacatatattataaacagattcattgttttgctttttctttttcctttcattttttgtctttttatttactatagaaggattgaaaagtatagttcttttttttttttttgatcgaaattgaaaaatataacttgctctatcctatatataaaatatatgtataattaacacatgtgattaaagaacttatcatcattagtagaaatacaattatgatcatgccaaaaaggcttttttagtcatttgagtatgatcaagtggatcttatgtggttattacttttggcgtagtcttctctacatgggaaaaattccattgatttattccaaattgatgatgcatacgtttgattttgttttcccactacttttgactttgaatcatatgactttgcagcatattattagtagtagtagttattacaggagtagggtaaggacttaagtactatgcttacttattattaattaattaattaattaattgcatatcatattcaaggcttaatattagctacctatttatacagctctctcatattttttaactgtttctattaaaaaaaataaaacaagtaattttaactgtactaagaaaacagtggtataaaaggaaaaaaagaaaagaaaagttagtaataggattgggcggcgagtggtgcgtacttcaaaaagtagaattgcctttatctttgcttacatttccagcaaagaaagtaacaaaaaaatgacccaaactttgatggagtcaaaagtggccaactctcgagctttgatgagtactgtttcaccaaagttgcaccaataccaaaacctcctacaaattccaactactaacgcttatttccaaaaacgctttctagaccatctaaaatctcaaatgtttgatataaatttaaaaacaaatcgtgtttcgtgtgtgagagaaaatcctttctcatttatgaaaaatgacagaaaatgtcaaaacggtctattacatttacaaagttgatatatatgtagggtaaaaagaagaggtccaaagataaagtgggcaactaaatggtaaacctagtgcctcctcttaagatgaaatgtataaatttttcatgttcatcttggatacaaatttgtagaagtaactaggaaataaaagctttgtaaatataccaacaatgttattcttggtggtgacatgaatgagctttaatgtgccttcttggactttctcttgaacaacatgacaatcaatttcaatatgttttgtttgttcatagaatacgaggttctcgaaaaatgtgaatggtgactgtattgtcacaaaaaagatggcagaatctttgtgattgatgtcgaatccaaaactagtggtaacaactaggtcatctcactaggggcattggtcataacccgatattctgctttgactgacaaacgagagacggtggattgctttttggatttctaagaaattaattatctcccaagaaagacatgatagccataaacgtgtcactacatgaagctcaatcggcatctaaaaagattttgaggttaaaatctacattggatatgtttgtttcaacgtaagcgcacaaattagtggaatatgtcgaatgaaaatctaatctttggctagaagtgcctttcagatattgtaaaattctatgagctgcagtaagatgaggagctctaggactagataaaaactgacttaacttatttatagcaaaggaaatatcaaggcatctaatggttaagtaaatcagtttactaatgacactacgatagacttttggattttttaatgattccccaacgtcggatgaaagccaaatgttaggttccatgggtgtaggagcaatggaagctcctaagtaacctgttttagcaaaagttgtagggtgaatggtcattgaaacacataaatgccagttgaggacgaccaatctctaaatttaagaaaaactgtgaaggaccatggtccttaagctaaaagactgaattgaatttctatttaaaaaaagtaacaccaacattattattggaagtaatcacaatgacatgaacatatattaaaaggtcaagaaaaacacttttatgatttttaatgaaaaagtgttatcaaaattaattgagtaaaactagtggataaaaggtagttgttgtgttttgtgaaccattgtctagaggattgtttcaagccatagaggcttttggttaatttacatatagcgttcggaggaatatgttccttaggtttatatcctttgggaagcgtcatatagaaactttcatttaaattgccatgaagaaaggagttggttaatatcaagttcgtacaaagaacaattgttcatggttgcaatagcaagcaataattttaaggtattaaactttgtaacaataccttatttttgattgtagcctttgacaaccaatcgttctttgaatcgttcaacaatgctatcaacattgtattttattttatacacacacatacatccaatagcgtggtgtccatcaagaagagtgacaacaatccaagtgtcattggatttaaggacatcaatttaagtatccatggctttctgccaaatgggctatttggctgccattttttagctagacagttcgacaagcgaatgggcaacaagaatcgatagcatgactgagtgggagcgctgaacataaatatagaatcnnnnnnnnnnnnnnnnntatagaagtcaagtgatgattccct

SEQ ID NO: 162419 - DNA, 2668 bp, Cannabis sativa
  modified_base (2627)..(2628): a, c, t, g, unknown or other
ccttttcttcattagtctttcttctttcttctctatctccctctcttcagaattgagatcacataacagaaaaaatggatacagcattaccttcttctacgccggagctcgaactggataatctgaaggctctcaaagttctgggaaaaggagccatgggaaccgtcttcttggtctacgaccgtacagctgacccatctgccagctcccctttcgctgtcaaagtagtggacaaatcctcaatccacacgaagctcgacgctgaccgtcgtgcccgttgggaaatccgtgttctctcacgtttgtctcacccgtttcttccttctctaatgggctccttcgaggcccacgatttcttgggctgggctgtaccttactgcccaggcggcgacctcaacgtcctccgctaccaccagaccgaccgagtcttctcttacaccgtgataagattctacttggccgagattgtctgtgctctagaatacatccattccatggggatcgcttaccgtgacttgaaaccagagaacgtactaattcagcaatctggtcacgtgaccctgacggacttcgacctctcacggagcctcaaacacagaaccgtcgtaaccgtaatctcagctgaagacagcaagtcaactctccccccagaaactcgccgtaaacaccggcggaacctcacgcgctggatcgcaaccgccattcccggtgatctcggtactagtacccgtcccaacagcagtaataataataatactggattaaaaaaagccaagtcagcacgagttagcccagtgagtcgacagaaaacgagtttctctaacggcgaacggtcccactcatttgttggaacggaggagtacgtgtcacccgaggtggtccgtggcgaagggcacgagttcgcggtggactggtgggccctggggattttgacgtacgagatgatgtatgggacgacgccgtttaagggtaagaatcgtaaagaaacgtttcggaatgttttgatgaaacgtcccgagttcatagggaaaccctcggctttaacggatttgatcggacggttgttagagaaggaccccaccaggcgattggggtacgcaagaggcgccaccgagatcaaggaacacgaattctttagcgggctcaggtgggacctactaaccgacgttttacgaccaccgtttattccgtcccgtgaagaagacggtgaattaaagaaatgtttaaaggctgatgccggttttgatattcgggagtacttcgaaaaattgaggtcaccgccgtcacctgattgtcaactgttaccggagttctgacgcacgtgtgagagatggcgcacgtaacaacgtcttacttatcgccctatccttttccttaaaacaataattatatacaaaatacaaatacacaatgtctttcttcttcttcttcttttctttttttaaaaaaaacatttggagccagtgttgtgtacatataaaacggcgttcgttgagatgtattgtaaaataattacatttttgtacagtagtataacatctttaatcagtctcattgtccacgctctacatatctgcgtgcgtttcacgtcctagattatgctcgtgcaacgccagtgcaaagataataatatacgtggcttatgatttgaatcaattataaggttttccttggttattcttttaataactttgcataaaagctatgcaaaaaaaaaaactttgcataaaagggaagaaaaagaaacgaattttacgctatttttctctttgtttgaataatattatggtaaaaatctgattactgcagctataattgttgtagtagtagttaaggtgggtcacaaagaaaaagtaatttctacataattgtttatcacgagaagtcattataataacatacatagcgttgtatatgttccgtgaaggatccttattttacaatagttacgctatcaaagacataattaggaccgaaaggtaagatactttaaccgaatatatattatatatatttatgggagggttttagtgtggagattttaaaaaagtatttgttgggatttaaaataaaatgaatcttttgtctctaagttttagagtgtgtttgtgtgtttttttttttttttttgtcggagtagttgaattttcttgaaccctgcttgtaaatcgtgaatctggacccacatatcaagggcatcaagttcaatagtctttcagttgtcctctgtttgcagtcgcttgattataagttgtttacggtcatacgtccatggactactgtcgataacccgcttgatgtctatttcgtgatagaactggaataagaatctgttttgctcgaggatcttgactgtcaaccccttaccaagcttccagagatctgctatcatattttggaagacattgtagtctgagatcttacatgtgagtagacgaccgactaagcaccatcgaaaagtcaaactctgatacatcttcctcagtgatatcgagaacctcttcattgtcttcttcctcctccatattgatgttattccatctatcctcaataactttgacgaagccactgctagaagataatgggcatcacttatgcaattttgctgttttatcatttctgcatcnnattttctcaaaaacgtcaatttttaaattcaaccatttaa

SEQ ID NO: 162420 - DNA, 3006 bp, Cannabis sativa
aaaaaaaaaaaaaaaccttaagtgactatattactattttatttaaacgttttactctgaaaaatgactgactcaatatacgaagtaacaaaaagtagctgtccgccgaactgtttaagccttttttcttgtcacccattattgttgcatgtgtatggccttattttttgggaaagctttatttatttatccgactagttctataaatggcattgtcaaatgagtcctagaaaatgcgtgtgttaatagacttcttttcaatcaaaaaaagaaaaagaaggacttctactaatggttaatttcttaaatttcaccaaaactagtttcaagtggatgggccaagaatatttcttattttatttgtctttgtctttctttcccatgggccaaaaatagttctattgacattattatgtgtgttcttatcttttcttggtaatatactatacacatcaaatgccccacatgcttgttaaaattaggttcatatgatttacgtcacgcacaaattttaaatcatcaaaggctcactttgcatttcaatgcccgatttcatacacacctcaattgctcttggacccaaaaaaataaaaataaatccaattaaattggaagtatatcagatttgggtgtaaataattaatttaaaaggacaatggaaaaatattatgagtgaatgtacaacaagtgagtaggccaaacaaatagaaagagaggtggaagaggcatgggtatggaaatagctgtctccattatttttctcatgcgtgtggcacacgtgcctaaaactatatactgaaagcaataaaataaaaaatatatttaatgaaatagaagcatggtgatggtggtgagtaaatcaaatcaaatccataaccaaaaacatccaaattaagttgtcacagtattacaaagaaaaaaatatgtatataaataaacatatttaaaaagacaagagtatgatatctcacaacaattcaatataatgtgtcgaattcaaaaagttttgtttttataccgtttttattatttgtaaagagacatatgccttcattctcaatgtgatcaaataattgaatttgtgtggttgtgctatttgtgtggacctatgtatatgtatttgcttttaatctagatctattttatcttttagatttttctatttttaatataattatgtctaagggatcgccaatactaaatatgtcattatagaccgaccattacataattacattaaaatcatattttttgttatattatctttcaataaaatataatattgctttttattattattattaatattataaaaaagaaaatcatcatatatactataatacacaacatatatgttatgggcatgccctaacactatgtttatacgaagaagagatggttgagggaaaacataagagtacaattgctaaaaacatatgaatggtcacaaaattagtgtttggagaagtgagagcaaatttccccaagttgtgagtgtcataatgttgagtgcggctgacatggttgaaaatgatggtcttgaaagagttcagcaactataaagttttctataccacattttaattttttagcaaagtgcatgaataagtttctccacttacctattcatttgccagaaagttgaataaattaataaatataggatcacaaaagttataaaggaatgttactttgaattaacctcttattataacttcttaattaattttttgcgcctaaaaacatatattgattttttttttcataacggtgttcgttatagttacaacatcatagttgtacattgcgaatagtttataatgtcgaaaatagatttgaagttttttgaacacgagtgataaactgaaatatcaggaactctgttttaatactgtaaactattttaaaatttttaaaaatttacagggatgatactaattataaagaataccgctatgaaaaaatattccaacatgtgatttcaagcatgtagattaactaagaaattataacaaaattttataattaacactcctcttaaaatactacacctgtgctcatcaaacaaaagagcaaattaatgaggtggcaaccatttattggtccaaaaacaacctaagggtggagtcatttttagagaagaaatttcaataaatatacttaaaactttatcccatatctataaaaatatttctcaaaataatttaatacaaatatatccttattttattttaacatacccattctatccttttcaattaaaaaaacagctttctctctctatcgctcattctctctctttagatctggagagaacccccccctcccccgaagccctaagttcccttcttgtcatcgtcgccaccaccggaagcccctccccccaccaaattcctaagttcttccagcgccacctcttctttgtccatatatcgaagctccaaaaccttggaaagcacaaatgcctcgtggttcttccgtgtcctcacaatggatgacccaccgaaccaaagccttgaaggttgagaaccaccaatccttgtccatcgtcaccaccactgagaagatgaaccagagaacgacgatatggatcaatttttttttattatttttacaactattagtttctcgataataactgtaaaaacatcgaaaaactatcgaaaaaattgtcatgaaaacaaaatcctatcgataacttggataagttaaaagccaacttcgtttaattatcttctatcggaaacctgtcgaaaacctttcaaaaaaccattgaaaattttagttgaaaaaaaatattgaaaaatcatcgagaatgatatattgagaaactgtcaataaactatcgtgaaactatcaaaatatgtcatccctaacttttgaaaagtacatctaagaattgttatataaattaacaattaacccaagatctatttgtatataacatagaacacaataataagatataataattaggtatgtgtacctgattgttccatagcaatt

SEQ ID NO: 162421 - DNA, 4510 bp, Cannabis sativa
  modified_base (4465)..(4480): a, c, t, g, unknown or other
gggcacaaaacccaacagttttatagtagtactatagtttaatgtgcttggtccaagaatagagaatagaatttgcagacatgagtacaataatctgattatcacaccacattgtatgtggttgctgaaaatgaactataactttagtgagtaaagactcaatccataccaaattagcagtatcaagagccaaattgtgataccctgcttcagtgctagagcgagacattgttggttgcatctttgaggaccaagatacaagattaggaccaagatataagcagtacccttaagtagatcgcctatcatctggatctgaggcccagtctgcaaccccaaagtctttgagaatgtttgaaaggttcgcatcatgagcatgatagaatgaatatatatcacctttgcaaaaaaagtaagatatcatcaacaaaacaaagatgagtaagtttcagatctttgcaccaagggtgatagctaaaatctagccgcttggaaacctttgccaacaatcttgaaaggtactctaatcctataacaaagagaagaggtgacataggatctccttgttgaagacctctcttggaagcaaatagcaattcatggaaccattaaaaagaacggagaatttaaaagtagaaatgcaaatcataaccaatttaatgaacttttggggaaactgaagagcagtgagcatccttgctaactcaaatttgttagtgttgaaatggagagagccaaaatatcaaaaatttaagaaggtatatgcagttgttgctatggcagttgtatatcaaatttggagacgtcggatagagtacacaagaatcaaagcattcaaagaattccattaattgtaaagaaaatatagggtttgtaaaaacttaggaccataatgcctaaaaaggttacaattatagatttagattgatttgaaagtttgtaatagtttacactaagcatgcctttttcattggcgatgcatgatattaatattattattattgaattttttattttttaatttaaatttgcaaacttcattaaacgaagtaatcactccctaaaatagataacaattcaagagaagtaaaagtctctaaaaaatatacgttataaacaaatgtttctggaaataaagtatgcaactcgattcgcagatcggttaacaaaaaatgacccaaaattcttcagagtggataaaatgtgctttcagtcttcaatcagaagattaaaagctaaacatatcacatacattatagtacagaggcccaattatatgatattcgaatgtgattgtgaaatcgtgacctaggattattaccctaagtgcgtaatgttataattatgcaataatttgttaattggatgtatgagtagagttatgcatgtaaggtataacaaggtaagactcggttactataactgaaaaaaactatagtaaggccttaaatgtaaaagagacatgtgagcataacacgttggtctatgctacatagacattaattatagtgacattattgtatggaattatgtgatatgaagtgcggtagcacaatttatacacggttgcgtactgtaagaagtgtaattattattataattatcatactgtattattttctttcttgatgggccttggctcacgggtgctctattgtgcaggcaagggtaaagcagtgtcagattaaccatgagatcgagggctctgatgatgacttgtacatgtttcggccaagctagaccacaagagttgggtccaacaagaattgtatagaaattccatttttccgcttaggtcggcctgtacaaaataacttttaatattttacaaataattttaattggattccggatatgtaactttaaattattttggtttaaagtaaaatatgttcttaattgtaagttatttatttaattaagttaagtatttatttcaaatcacttggcttatagactctaattttaacgagattagtagattgtaatcatgtaccgtggcgttcttcaaagtaggacgttacacaaacattaggataaaactccattaatatagggttatcaacagtcagtttaggaacactgattagattaatatcaggcacatgtaacatcaattttaaacacaaagttttaccattgtttgttgggaaaacctaccaatatgacatatgaaaagcttgttttcattacctacagtaacagattccttaccccatactcatgtttgttgttcatggtggagacatcaaaagtgatatggttgctggcactactattcgcaaactaggcatcactgtccaccacttcaagagtagaaatgaaggcattttgaggttgtttcacctagttttggccctgcttaggacctgtgaaactttcatcatagcttctataaagcagaatgaccatattttccaaatctgacagttgggttttatgcaagttattgttgaaccttcctcttcctctagatcaaccaccattgttacctctaccaccgaaaaattgactaccgttactttgatttgagtataatctacgacctctaccataagactaaggtttagtttccatgttggcttgaggattagacacagatccaagtatcctgttgttgttggtgagtgtttgaagcctttcaatcttgctgcctaaactaaaaaatggtgtcttgaagttcttgtcgggttgttttggccttggattcaatttgaacaacaatggatatatactcagcatcaaaaccaattcccccaaactaaatctttactcgtcctcgagtaggactaacaactaaaaacaacatgacctaaatgaaacaagtcaatcaagagaaacatgagcaacttccaagtaagataaataacatggttatgaacaaaatttttacttataataattcctctctgtttctcctcttggattatacttgcataagccttgtttacatttgaaagaggatcttggagcaagatttgagatctaacactaaggtaagactcgttaaggccaataaggaattcaagcactttgtttttatcttgatactcccagatagttttcattgcaccataggtacaaacaggttgtggcttgtattcttgtagcaaatcctataattccttgagcttagtatagtatgaagtgacatcactggatccctgagttaatgtctgcatcgatctcttcacttcaaaaaccctgcgcattcttttgatggaatctttcctacaattcagaccaaatgcatgaagcatcctccatgtacattatactatcagctatactaggagaaatagagtttggaatccatgatattaccaaactattgcatcgaatccacgagtcatagttttcatcgtcgtcatcaggagctagaagtcttccatcaacgaacttgattttgttcctcgccaataatgcaatcatcatcgatcttcaccacgagctgaaattatctacaccagtgaggattttgggtcttaaagatgaagaagcattatcaacattagagagaaaatatggacttcgtggatcattagcaagaaatctattattttcttcaagagctgtaaattgattcaaatcttcagcagcttcattgttcctgttgcgagtttgagttcttcctcctcgtgccatggaaaggagaacaaaaatagaaagagaggaggatgaggagaagaagcagaaggaaggagctcaacaattagtcagctctcataccattttagttgtagaaagagagaaacaaagaatgaaatgaatggaaacaatttagttgtagaaagagagaaacaaagaatgaaatgaatggaaacaattcattgatcaatggagttcaatacacaatgttcttatataaagttcagacaactcaaaacagaaactaactctaacaaacttccaaactaattcacagtatacactacaccttaccaatcttgatagttctcgactaaaaatcaacaaagaactaaactaattaaagacaaacaaatactagcaagtcttacttcaatttacaatagactaatgctactcacaagattcaattgtggactcatttttttgaggtaaactcttttaaatcaaactctttctctcacgaaaaaatctatcatctccaacctttgtcttcggttctcaactcaacgagatctaaaagagaattggttgataattgaaaaagcaattgatgagaatgaaagggagagtgccacgtggtttaatattctttgataagtataaatatgaaagaaaatatttaagttaatgattgttataatggatccaagaaagaaaaaaattagtatttccattctattttattaaaattacaatatgtgtataatatgagaagtctctaaagggatcaatatatatatagagaacgttccttatatttcacacttatatatactaagtagtgttatataacaaagggtaaataccattttgnnnnnnnnnnnnnnnnaaagttaccaattggaccctgtgttttgtt

SEQ ID NO: 162422 - DNA, 2362 bp, Cannabis sativa
cttaaaccatgcatgccgagtgacttttgaaccattcataccgagtgacttttagtcatgcatgtcgagtgagctttcaacgcatgtatgctaatccatgcatgtcgagtgacttttagtcatgcatgctgagtgacattttggaaagtgcatgccaatgacactcgagccatgcatgttgaatgacttggaaatgtgcatgccgaatgacactcaagccatgcatgccaagtgacttccaaaccatgcatgtcgagtggcttttagtcatgcatgctgagaatgcttccaacccatgcatgccaagtgactttctaacatggcatgtcgagtgacttgcatggtggccatatcgtgggactcacatggtgaccatgttgtgggacccgcatactgacttccttcctaagcatgctatttgattctttgggtacgttcacgctaatatctcgattatcacttaactaatctcaaaagttagccttattaatttttgggaataacactttccctcacagtctaaaataatacgtagtgttcttgaggactagttactctagtgtagtcgacgaattgtgagtctctcccttggcacgcactttaagaaaacacttagtacatataggaggcccctccttctaacttcacttcacatctcctcccttggcctagtggtaaattccaagttctttccaagagatcccaggttcaaatctaactctagtctttctttcttttcttttttcttgttaatttcttaattttttttgggtcaagtgacatttgaagtcactcacggccgagtgactttgggtcactcaaggccgagtgacttttgtcactcttggccaagtgactttgggtcacttcaaggccgagtgacttttgtcacttttggatagtgactttgagtcactcaaggccgagtgacttttttcactcttggctaaatgacttttgtcactcttggctgggtcactttgagtcactcaaggacgagtgacttttgtcactcctggccgagtgacttttgtcactcttagccaagtgactttgtgtcacttcaaggccgagtgacttttgtcactcttggctgagtgacctttgaaaatgaccctggccaagtgactcttggagttgctctttggccgtggggcttttgacttgagtcgatcgagtgactcttagggccactctatggttgaaagacattcacaatcactcatggccgaatgactctaagtcatccaaggccgagggattgcatgctaaatagggttttggttgaatgaacttttgattctcctccacttttcgttggaggcatttcgctctccgtctattgggctttgcaactcatcgattctccttcaacactttgaagtaagtatcccctttcttgttgaaattattggttgtttatttgtttcctacatatgatagtctcatctttcacgtagctagaaggttgactaacatattgcacccgtagaattttttcctccattttctttggttagaaaacttagtaaccttctttctacctcttaggtgagggtgtcatttgagtctacattgtttttgcaatgaatccaagaaaaatacctcttggggctgactttgtgtatatctcatccttaaactttgaaattccatgagaggatccttgcgagagatatgttagataattatcgaagaggagtgattatcttggacacatcattagctgcaaggagcatttggaaagatttcggtctaaaatcatttggtcctaaatgtggaaagggtcgatcaaattgctgaccttgagttgtacttgtataggcttaggatgtcacagtcgaaattgagaccgagttgttgtatcttgagagtacctttcctttggaacctattcgttctctttcgcatgagtctaccttgcctgatggttgtgggacgaagtttgaccctccttcattcctttttgggttaccttgaactaagacttgagcttgtagggtttctgaaagaaatcaaagtgtgaggcccatgcttaccaacatttccttatgtctacaggtatgccttctaagaggagggtgatccttagcttgtccgtgccaatggacccattttctcatgccaatgtcgctagttttgctaccacaaatgaccttcatgatattagggctacctatagtatcccgcctgatgcctttttctatttgtcgatagccagtgatggggaaagggctactcatacagaggctggtagggtttctttcagtgaccaactattgtcatgtggcataactgttgaaattattttaccaggatctagatttactacaatgtatgttgtttaacatcctaatatgaa

SEQ ID NO: 162423 - DNA, 4671 bp, Cannabis sativa
  modified_base (4607)..(4626): a, c, t, g, unknown or other
cgaaattcactcgacaacaacatcctttctcattccttataccacaagactttaagacatccccaacataaggggaaatagatatgaccctagattcaatcaattgtgtctcaaaagtgacagaagggttctgcagagtcttggatttgcgagctttatgagccattaattcaaattccaagtcacctggtgaaaaagcaacattgactggctataagacattggccttgcttttgtaatattaactaaactagatgattcaagccacactgcttctcgcaagtaacagtgcataccctcaatgaattcttgtaagaatcgcctatggtggttcaaaatttccttcttgttagacctaatgaggtggttcccgatttttgcatcattaatttcaagtatggtttcaggtttataaactaaggcttgaaattgaggacaacttgattctgaaggttttttggagtgtgaattttggattaaattgggatatgatcacaaagaataatgccctaattcttggaaaaaaaaaaagagtataaataaaaccctgaacctgagagtcacataaccttaaattttctaagccctagattacttaaacattaaaataaagcttactcaaacaaattacaaatgcaaaataatgcacatataaggaaatcaaaatttaaaacataaaaggagtcaacaaaaggaaatgtcacttactagttcaataacaaactttgatttttgaagaagttggcaatgagaactcctagtttagaaatattggattttgctgattctaaagtcgaggagtgtaatcgaatgaaattcaaagaaaaaagtaaaagacagtgagggcatgcaatttcagaaagggatatggttgagaattttttaagttctaaaagcttcgtggacagtaatgtgaaagagaagggattcttcaaatttatacccaaaagacaataaacgttcaatcacgaaaagagtagatcaaatggatgggaactaatgggaaaggaacggttagaacattaaatggtgaaatgatttgcctcaaagttttgattcgccaaaatgaaagcatgcaatttctaaatggggaatatacgattgtaccctttaggcatttaaaacgtcttttttactttaaaaagcaatttttagcgggcaattattaaacccatattttgagcatcaataaaaagctgacacgtgtaataaagctggaatataaaccaagttaaattacacattaataaatgcacttacatgactttcctcgggaaatatagtcagtagaaacactcaaactcgccgtcacaaagacaatagtgagacatgagtaataactacaaactgatgggaccaacgaggtgaataagtctattttgggataaacggagtatataatggtactgtttgaaatgggtagataatgagtatgtagctcattgattcacatactcatgagtatgttagaagaataaagacaacttcttcaacattcttcatctcagctcttaacacattgaagtaatcgtcttgcctatacttcactcaaaggaaggatgcgagatgcactataattgtacacttagacatttttccgtgaaggtatttaagaaaagtattacttgaatggcgagatcaacgaagcacaatcagcataatcgtcttcagataaagataaacagcagttatacaattatttataattatttgcatgaaaaatgaaacgtgagaatgtccatgtttcatgagcagttgcaaatgatcatatcccaagaaaataactgtcatcctaaaatccaataaataaggacagaaaccagggaacacatgagggccaacctttagaaaaatagataatattgtatttattattcttgaaaaatggtgtcatggtattctgtatactatgaagatttaacttcaaaactacataaaaagttatcttgtcatttattgccattcttataattaattgttatataaataattgtgaaatttatttattatagaaaaggcttattattttgttaacaaaaatctgcgttaacaaaataaataaaatttaattaattatttaatattggaattattttaaaatattttacaaaataattaattataaaatataatttctaaaattaaaatataaacaagaatataatgcattaggttattttgaaaaaattaaataacatttcaacaatttttgaacaatagttactacagcacctattactataatttaacttttaaaaattagtgtgattttaaaaaaaaaaaataatattttataaaataactaataatattatatatatacatatatattataaaaaaatatattttataggcctataataaatttttcaaataaaatattatttaaaactatattttaaaaataatatttactaatcatttctaaaaatgaatattatttttaaatatatatacataatatagtttaaaaataaaatatctatatatttataattttgaaaacaatatatatatatatataattaaataataacccaattttgaaaaaaaagaagaagatgaagatatcttaacaaaaataaaataatacacatttagttaaggtacatatctaaatatctttttttttaaccaattttcaaaataaaaaattaaattaatcaaattaattaaaattaatattaaatttgattattatattatatatactctatataaaatgtggctatgtaacagaattattagtgtaatgatatcttttgggtttctatgttaactttaacagaatatcctattacttaacagaatattcttcattaattttatattattattatatttatttaaaaataaaaattatatggatattttatataaaaaaaaatttaatttaaatttaaaatccataaaatattacagatatttttaatcatatttttaaatttattcattattatgtagatatttaaataaagaaatttaattttaaaaaaaaaaacattatagatatttttaatcatatttttaaatttactggtttaattttaaattataataaaaagtaaaattatgtagatattttatataaagaaatttaaatttaaaatattataaatattttaaccatattttagcttaattattaataaaatttgaaaaatacgtatatataataacattcaaataaaataccaatgtagcaatagctaaaaaaattttaagattaaaatctcaaattccatttcaaaaattaaaaaaaaatacattacttaattaaaaaaacttaaacatacatgtattgcacttaacatcacctaattgaacctaattaaaaagaaaactaagtatacatgcattgcacgtaatatcaacctagtatataacatacatacatatatattcatatatatatatataaataacggtggtggaggtgggtggcaccaccctaggcagatgacaggagtaagtggacctcgaccggcagctcgagagccacctaggtcgtatgggtctaaagcggcaagggatgagcaactccattcagagataaatgggtcaaacaaacttgaacataatagaaattgaccaaaagctcctggaccaaacaatccttctttgcctgtcttcaacgtcaaccacggaaccagagggtctgattaaccatcgcttgagcagccacgggaccaggagtcccttcagcggctagttgaagctacacgggcccaatcggtccttctctacctgctttgattcgcacgcgtggcccatgcactcatgaactacttactcactttagcttgcagtcgcaacctttgaggttgtggctcgtcgtgtgatgcttgtatcaccatcttaatgagtccgagattcacaccttaaatccaagctcacatatcaatggaggttttaaataatttgagattacattgtacaacaaaaaattgcaaataaattttttattacaatgtaaaattcctatacgaaattatgttgtacatattttataataaagatatataaagtactctaaccttaattagccatataattaatgattcacattcatgaaaattaaatcacccattcataatatatcaatatattcatatataacacccaacatactattttgtgtaattgtggagatggctttgatactatttattggttttagggttcatatcgaagtcacaacggaagtgtaaaatcagattcaatttttttaaaaaaaaaataataatttttttgaatcagatattaaccagaaatcctagatcttaacacaatataacataaattaaatttaattacatgaaataaggattttacttcttcatggttatcagggaatccttgaatcttttcgtataaatgttcaaacatccaatccatagctttatggtcttgatgaagagtccacactagagcttttatatcacccttaacactcaagatacgagtagacttatagatttgacaagatgaacaaactttctgattatagtgtattctcatctcatgagacactataaaggagattacaaaaacaccaatcctcttagtagagagagatgtctgagacaaagagagagagagagagnnnnnnnnnnnnnnnnnnnnagagagagagagagagaggggggcgcatggcttttctgaaaggaa

SEQ ID NO: 162424 - DNA, 4432 bp, Cannabis sativa
  modified_base (1618)..(1621): a, c, t, g, unknown or other
  modified_base (4357)..(4359): a, c, t, g, unknown or other
ataaatatatataaattgtacaggcaccatatcagaaaaagctaattgacctgaagttgttaacaccagaagagttggattggttgaattcgtaccattcgaaatgtaaggatattttagcgccatacttgaacgaaacccagaagtcttggctgcacacagccactgaacctatttcagtgtgagcttgacttggactattaatcgttatgttgcttggtgtctttatgaaataagaataatacgaatgaattggtctttttgttaataatttggatatgaattgaatgatttggtttcatttgaaaaattctatttttattttagaagtaagtttcataatttcctttttacagttttagttatatacatttatttatccaactcttaaaactctattataagaaacatgaataatgtgggacaaaattatatattatgtatgacttatcatcccaagaacaccttatgtttgtgtatagtttcttttattacttttttctaattaacgtgttgtcaaacttcattaaattgtcattgcaaaaaaaaaaaaacttgattaattaaattgtcatttaagaaattgaataatttgaaaaacatcacttcaaagttcaaacaagactagtgttatatacaatttgatcaacaaggtgggtattaagaaatattcttttgaagttatggcattaagattagagtataaatttgacaataaatggcttgttgtttaagctgtaaaagggtcgtattgtattaaataataaataacacttgtattaaataataaataacacttgtattaaataataaataacactatgtttggataaaacaatgtactgaattaattattatgaccaaattctttaatacagtgtttgttgcattatttaataaataacaaatgatctgtattagtttgtattataatatttacaaagaatttgagattaacactaatctctgacatggactcagaacctggacccaaacccgagacccagactctagacttggactttgaacttggaccccgaacccagacctggacccagacttaaacttgagactcggactccgaacctggaccccaaacccaaacttagacctgagattcgaacccaaacccgaactcgaaccccggactcggacccgaactcagacctggacccaaacccggacttagaccagaattcgaacctagactcggacccacacctaaacctagacacgaaccttgacccgagacccaagacccgaacccgaaccccagacatgaactctagatttggaggacttggacttgaacccggacacaaacccaaacccgggacctagattggaccccaaaccatgttttggacctagactcgaacccgaactcgaacttggacccggacccgagaccccaaactcggacccaaaccccaaactcggacccaaaccccaaacttagaccctggactcagacctggacctagacccgaacctggacccgagactcggacccgaatccggactcggacaccgaacccggacccgaacctagacccgggacctgaagcgagactcggacccgacctatagttggtgttgggatcgagtgtattaaaannnnattataactttacataatctattaatcaagtcataccaaaacatagtattgtattaaatagtactaatacaatacaatccaaacacaacacaatacaatacaatatggcgtaccaaacgaacccaaagagttttaagttgttgtcacgtataaatgaatggggtcctttcataaatacttttgggagatgttgaaaaatacttttttttatatacattaactaaatttacctccaaataaaatttaattcaaatatagctctttttatgagtattgtacccaaatatcttcacacactcacataactaagacataatttcaaacataatagatttgtattctttgtagatggatgtgtaaatttgtgagaaagtatgggcaaaattttaattagagaagaataaaaactcttgtgaagtaataggggtaaaattggtagaatgattgaaaaaagaagtaaacataatagattttgaggaagaaagaaaattcaaagcatcaaattaaaagaggtatgtagtataatttcctcaatacttttttagtacatatttcatttaaaattttaggacctatatatatgtattacaattatacaaattatttgattttaaagtatcaaaattataaaaaaaaatataattttctcagtaaaaaataaaaagtaatgagaaattaatatcacaacaatcataaataaactatacagttttaattgaagaacgtatttttataaatagaaaaattcaaaccgtaaaaataaaaatttctctatgttaacgtatttttgtaattttatttttagtttttggtgtatcatgtaaaaaatcctaaataaatctccctttccattagcatatataataaaaaagaattaatgtatatatatatatttattttttttttttgcctaaactatcatcattgtaaaattttgtccttttaactttttttgttgtgaaaatttctctagaattatataaatcattacaaatatcttcctttaattacattctactcatttttaaaaataacttataacttacttatgtagctatgagttataagtataattgtagtacaaagatttatttaccaactttaaattcaattgttgacattagacatacaaacattaactctaagaatacttatacatattcaaataattcattattagactgtcttttatgtaattattttttcagtaatcatgaattggatttgtttgacgtcacattagtgctccatcaacaaattattaactggagggcgttatttgtagcaattttataatacaagaagaaattttaaattaagaacaaaactttataagagtcagttcagaaggataaattatatttattcaataaaataataggtaagattcttaaaattacttcttagttcttattatgaaattttagctatttgtaaattcataccttccatttttatttttttattaaaaaaaaaaaaggaaaatccttcaaattaggagttgaaactatatttcaccaaactagtaatgaatatttttcaattgaagaccatttaagtggttatgtgttcaaaaataataatagtaattaataactagaaataataatatcttaactaaactaataagaaagaatattgtttagggttctttatcgtatggtaagacttttcatgcctaaatctttagttgtcgaagtttgtcttttttctttgtgttgacccgccaactttctccgggcttaggcatagcttagtcgaggtttgtaatcaatgcagcagacgtagcatgatgggttccttcactatgcgttgtattccttttctcaatgggttgttctttgttattagcaatttcttgcgggttttgggctttgtctgttgcagttggaaggttcgtccgatcagtatctaggtaggattgttggtggtggcatggtggtctaaggatggccttgctttcggatcgagtagggattgtttcggtccatggtgttgtgaagggtggtttcaaatcaaatttggcgattaggttttgctattgcagcatggtgttgtgacgagaggtcggtagatctatctatatattagttttatctctgtgatatagttttgagtgtctttgttttattcgttgttggttcatcttctttgttctttgatggctcaccatcaagtcgtttttagtcattcacttgtttggaataacaagttctctgcgaccgaaaaagttgttaatggtgcaaatacgcaccttccataatagttcaatgctcaagctagagttgaatgaacctactacaacaatttctattattgtgtctcctgagttgtgaaggaacttgaatataacttttcttaaaattaattgtaatatttttttttatataaatattatttatgtttcttttgttaaccgattaagaaatcaagcgatcgattaatttgctcgtttttctatttttttttttttttttagttttaagcatttatatattacaatcctgtttcacctgggacacgaatccaggacctccaacacacactcacacctatgccacttgagctagcctcaagtggttaagtttttctgtttctaaacctactcatgttttccaatggggaacatatcccatatcccgattgggttgtcagctattattttagctgcttgttgaatgatttcttccaaaaaaaagagttgaaactatattttgaaagggaaatttgattttnnntgcttacatttggttaaaaaaaaatttctaaacaaataataactaatatttgtaagatatgacaacttttatg

SEQ ID NO: 162425 - DNA, 3930 bp, Cannabis sativa
gaattgcaaccccagcaaaagctaagcctatatattaattaacaatattaatcagttaatttaagatcattaattttgttgtgtattgttgtcgtataaccctatagtactaataattaataatgaagttaattaggtcattatgataatattattatgctttaattttttttttttttttttaaattttaattacagtgaaatatatattaattcgagtaatttaacttccttcctagatcctagtttatgcactagtggtgctaaagacacctttagtcttacaaatgggtggtaattaaatttttataataattatgaatttaatatatgtgatatatgcatgctatacataattactagatctagtaattattaatataaggtttagtacttagtagtagtaataggattctggtgccttctcagcatttctcataatttaactaatagagaatgagagtataaaggcaatacttgtggtactggtatctaataccaccaattctgatattttaatttaattattataaaaactattaactattattaaatgccacaccttatactgtacttaatggcaataataataataatataaataatttatgacactgtgtagtgagctagcatacctccaattaacgaggttttgatttttgtcttattcctgcaataactacttcttcctttcgaacaccttagatctgcaataaaagaagacaaaattgattaattaataatgaaagttaaacagttacgaagatcctcatgcaggtgtacgccaagatcttttctttataaattcctaacttattattctatcatgagtatttgtttgttaatattaaagtgtctgaaaattttgagagtcaaaattagtccaaccccatataattgcgggcctggttgaccgttagttggaaatttataattattgtttaacaaagatctcggcacaaccttggctgcgcaactagctattatatgcatattcttttacttgtgaaagtaattaatcataattgcaataaacatatacagtcataaattatgaggtcaacttcattaatatatttaatttttttatatgagcacttgtgaaaattaataaattaatagatcctctttcggtatttatttggtaattaaatctctaaagtagaaatatgttattttaagtaacgtgttatacattcaaaagtttattaaattactatacagattcgatatattttctatgtttaagcacatataaaatgaaaaataataatacaacaaatatcgaatgattgagatgcacatatttttatatatataaaaaataatgtaactaaactttacaattaaaaattataagctatataattcctacctaaaaatataaaaaactaatatttaatgtatattattgtaggtaataaatgtatacaatttaattgtaaagaaaaaaaaagttctgttaatagaagataataccctaaaattcaattgcgctttataggaccagagtgtttgtaaaaatagaaatgataaaaggtattagtgatgcctagtatttttttacatgaaactattgccattggtaaaattaagtattgaatctcatataatataatgtaataatttttagagagtatcgctagccaatcacaaactaacaataagtctaaaaagttttaggtaccactagtgcctaataaccatgctcatgtaaagatagtctctatgaaaatttttcattagcgaaataactttacaaaaatttttattagtaaaataacgttttatgatcacagaaataattatgaattagattgtgcgattataaattaccaatggtcgcaaaactaccataaattttacactgtgagattgtaaatgataattatggttgcgaaactaccataaatttacacctatgcgatagaataaattcattgaggtaatattagaaattttagtatttcacattatttaatttgacaaatttcaccaatgcaattagagtttatacaatatctaatcacctacatggcattaaagaaaagcaattttcatattaaaatacttttttggaacctatgaagaaagattatataagtacgtaaagtatagcttagaaaattttaaatatgtttgaagagaaatgctgatgggtacattaaggttattagtgtattttaaactagttattcctaaattttaatatcaagttccacatattaataaataatataaaaaccttaaccaatctttattttataagccatttactcaaataataacaagaagaaactaattaagaatagttttgcactcactttgacaaacaccattaatggggtcccatcgaaatccggccttgcataaacatcttctctgtccaactacatccgccaagcactctgaattcgccgaagcctggcaatccattgacgttttgcacatcgattctcccggcggaacccactcgatctccacgccaggcatcggccacttactcacgggcatcgaactatccaaattcacaaatacttcataggccgagcaacgctgctctctggctctaatcctaaactcattaaccgacccacctgtcctgtaaacacagcaaattggcaaactcccacactctttcattgccttgcttcgaatgtaatcgtgacatgggctattggacgaacagttccatgaaatttcgagaacttcggatgaacagttcatccccaccaccgtgttgctccccgaaatgttgaaaggaagagtgtcgttcagctgaatcccgtggcttcggaaatcggccgccatgcacgttttaatactgtctttcgctagccctggaggccgaaccactagacgatgagctggggggtcgatgagagtgatctcgtatgaggagctgtttagtgcgtcgaaccagagcttgcccatctcgcatcggaccttgtattgctggtccccgcactctggttcggtgctcagtgggaagggaactactgtacggccacagtttgggcaaggcttagttgtagatactaactctgtgcgccataacagaatcactagtgaaagaactgtacttattgtaaactgcatattcatgtttgttaattatgaactgtttatgcttgtttagtttagcagttatataaaagtttgtaaagaatttatttatttatttattttactgaattgtgagatcaagaaaggtggtgagacagcttttaatctcgtatgaaacaaattaaaaagaaaaaggtttgtgtattcaatgcatgaaaatagtgatgcatgtgtgaatatataaattaagcatatggagttggggtgttcgagaacgtacatttgtttgttaaggttaattttcctaagactccggacattgtcgacaggaaaatgattcgggtgctcatttttatttactatattattatcacactatgaatacgacaaattccatttttctcatattagaatacttttaatatgaatttagggctaaataattcgtgagaatcaaataatcaataatcaaagattagccgaatcatatagaattgattatacaaaggtatcatctttgaaatttccactcaaaaatcctttgtggagccttaatctctctttaccatcgatggggattcaacagtatgacatggagtgatattgcaaattgggaacctttacaagttatattaccaattatcaaaatagttagtaatatttaatgaatatttctaatttcgccctacatttaattagaacttgtctttatagtatcaatatattaaaattatgataatcatacctttaagtcttaaattttattctaaaatagaccacataaatttgacttattcatattgtgacagtcagtagtcccgtgatccgtaagagaaaattccgagtaagctgtacaatctcaca

SEQ ID NO: 162426 - DNA, 1533 bp, Cannabis sativa
gagggaaaaattaataattagtcccaataatacatgtttggttctagaactcattgtttattctattttttcttctttaaaaactaagtcaattatttatttattaataaaatatctaattttaattttttttgcttaaaattctcaaaccgcttggattggccttgagtatactcatttaactcaaagagatatttcggtagactagactctctttttgcttcgacaattaagagaactttttagattttgttttattatcgcgtacgctgtagttatttaggaccatttataatttttttttttgaaattttaaatagtttacggtatcaaaaataaaatttaaaaagttactttaatttttacaattttactctctttcaaaatttataaagtttacttgttttttcaatcattctactaattttactcctattattttacgataatttttattattctctaatccaaaatcttcccaaattttctcacaaacttacacatccatctacaaagaacacaaatctattatttttaaaattatgtcttagttatgtgagtgggtgagaataatttagatacaacactcataaaaagatgtatatttgaattaaattttatttagaagtaaatttggtgaatatatatataaaaaaagtattcttcaattttttctttattaagttgtctaaaacctgaggtggtagctttctgtcaccctgagccaaggtgggcgaaccttgcacttccagcccacccagcttaagaatcctaaaaaatctttttaaaaatataaaatatttttgataatttttaaaaataccatatatactaataaacgcagttaattataatttggtcatctaaaacccatttgccaaaaacttaattatttctttgagattgtttatcaatttgttaggcatgtacttgtaattgatttcataaatagattgtcacatatgctacataactaggttaattaattaataggtgggtttttattataatgcacaacactattaaattatgacaataaatctaaacaaaaattattccacttatcaacaaaacaattttaagttggtatttggaattgccctaaaatttgaatgattctattgaaatagaattaatcttctaattaattaattttaatatatagtactttgccgggacaaaatttcattaataaatagtataggatttttttattatatattatgaaagtataacattatataatttcatcatggaagaattttggacaggcatataaaaaatcagataaataaatcatcactatatatttttgtttgtttgtgtatatatattgcaagaatctatatttataaagggttcgaattcgaaacatctctcaaagaaaaagccaaagaaatagtacttaatacttctaattttttatttaaaaaaagaaaaaaaaaacactaattatactttcttttggtgccgtttggtaacacttttgtttttcaattttttaatcacaaaatgaaagtaaaatttttattt

SEQ ID NO: 162427 - DNA, 2082 bp, Cannabis sativa
tggacttgttgttaacaaaaaaaatcctttaaaagctattcccacacctaggctatctaatgttgatctatatactactatgctttaagattgaatcatccaaactttgatcatctatatactactatgccttaatattatttgtaaatctataactactattactactctcatatatctcatacttataagatggcatgagtacgtatactaattatatttgaagccatctatggtcattgtgactagtttaaaaattaaataaaaataaataataaataatttgtacactaatattttatttccttataaaatttcattatgatgaatattattaaaaattaaattaataataattactaattattttttataatttattactaaataaagctcttttaacaattaaattaattttacactaaaattagtgaaatacttgtaagaaaactcattataattttgaattattacacacatatttttaattaaaaaacttaagaatgttagaaataattttagacttaagttttatttttattttttcgtttaaaatatcaaaatcaaataaaggatagttgaaaatctaataaaaaaatttaaaacatttagagaattaataaaataattatagaagtaaagataagttaatttttttcccctactctctctcctcctcctttattttttcttattatttattaatgaaaattaaaataaaaaatatatgacttttcattgttgaagattaaaaaaatattatttttgaaaaacttgaatatttttgccacaagcaaatctacagatgagatcgaaagaaagatttcaaagatgttaaacataagataaacattttagcaagaagtatatctaaggacaagaataacaagatggggccatggatgtgtgcatgtaacagaattgagctagttgtgacagatactaaaccatcatatacaactaattaatattaaaactatttgtcaactcaaacttacatcacttaatgaaaatataaatatgcaatcatactttccttataccacttaaggtcatgatctcgtataatcaagctttgttaaatatagaaaaaattaaaattagggcattttatttgcttctagaacatggtcatatttcttttacaaagcttttttaaatttcatgatgtgaattattatttcctaatttaatatactttctctatgtcctctttgaatcctacccaaatccaaaaaaaaaaaaaaacatgaaacaaatagaaaacactaaaaaaaatagtcaaatacaaaacactaaaagaaaaataatcaaatagaaagcattatacgggcctcactgataaacacaaccaagaagttaatgactttatttggcatgactgagagataagagctaagaagatgaagaagaataagaatgtatagagaaaaatatgcttatgttattttgttgatttttttaattttactttgtagttatttttaataaatgattttcaatttaattttttttatttttttataaattttaaatatatattttttaaaaatatatttttaaatgaaatttttaattaaaaaaaataagaatattgatgtagactaattacgtaaatgtaatattataaaaataattaattattcaaaaaaaaattaatttaaaaagggtagacgtctaattttttgtaaaaaaaaatatattttcttacaaatatcataattaaattatttatttgttaaaaaaaatataataaggacttaaatataaaagtaaaattatgtataactattaattgctaaagatgatataattaaatatttaaaataaaaattcatttttgttaattatatagtttgttataatcaattaaatctaaaaaaaaattaacttattattacaagttaagaaatgtaatgtgatagtcaatagtcctgtgatccgtaagaaaaaatactggataagttgaacaatccaacattgcctggggaagatcaagtgttatgattctgggactgtgtaggtatacacggttgaagaagccttaaatagattgattggtactacctatatcaacaaggt

SEQ ID NO: 162428 - DNA, 7419 bp, Cannabis sativa
gatcattgacttgcttgaaattctagatctatatcttatgtttcaaaagagtacttttatgtgatcctgttatttctagttttcaccttattcaatatgttatgattctatgccgttgggtatcactaattgtgtacaggatatcatggaacttatttttatttttattgcaagctaaaaagaataagattttttttaaatgaattttaaatgagtttgtgcaaaatactattttgcaggataatttgtctaagaacacccagacaagtcacattgatcacgagtgctctgagagtcctcaaaatcaaaaggtaaattctgttgttattcagtgttgagacagatccacgccctagagtatgtactaagcaaatggcttttaattaaatgttcctgagtgtggggattctttttttttttttgttttttttaacttttaaatatatatattgaaggattagccattgctataaagatactcttataattcaatattaagtgccctgtgctatgatttggtctgattcattgaatggctcttacctttctcctgtgaccttgaagttggattctgattttttgttattcagatatctgctagatggtgtccagatgaagcatgcaggcccgctcttgttgaagcacctatatttcatcctactgtcgaggtatttgttttctgaggaaaatatttttaattaggtttgttgcatcactaacattatatgtgtgcaaatctttttaggagttccaagatacacttggctacatagcaaagatccgcccaaaagcagaatcatatggtatatgccggattgttcctccaccttcttggactccaccatgccctcttaaggatgtcaagatttgggaacatttaaagttttctacacgtattcaatatgttgacttgcttcagaatagagaacccatgagaaagaaaagcaaaagtcgaaagagaaaacgacggagaggctcgagagtgcgaagtgccaggaggaggacagaatctggttcagaagctaatactgcttctgagactgatgagaagtttgggttccaatcaggatctgattttacactaggagaatatcagagatatgctgatcgtttcaagaagtgttactttggaatgaaggacaccaaggaggaaacaagcactagtgcatttgaagataagaaaagatgggagccgtctgtggaggatattgaaggtgaatattggagaatagttgaacaaccaactgatgaggttgaggtgagacactggttgtaaatattttttctgaccttttaaatttaatatatatgtatatatatatattcatttatatataaaactctgcttgcaattgatgaatgctgttgatatgtcattgcaggtgtactatggagctgatttggaaacaggagtatttggaagtgggtttcctaaatcatccaccgtggaaactaaaagtgacatggataagtatgtgacatcaggatggaatctaaataacttagcacgcctgccaggttctgttctgggttttgaagaaagtgaaatatctggagttctagttccttggctatatgttgggatgtgcttttcttctttttgctgggtacgtatttatcattgtgattgctacttgactaagttggttgtaaacaatagttatttaccatatatcagtggagtttatggggttggatgagttagattgtgtgtttagagctcggtagtgacattatggtttttcactacttagatatattgggcttcactatctataacattacagtattatttatttatttattttatttttttcactacttacagtattacagtattattattattataataatacagcattacagtattattataatttcccataaagttccaagaaaaattattattattccctaaagggtcggagtttgttataagataggaagttacaaacctaccaacttctggacatgctaaaaacacctatattgaattgtctatctttatgcataatgattatactcatgtttagtttgcattgcacaacctatgaagaagaaatactactttcttgcattagtatggttttattttcctgttgcaattcatgctaattttaacttccacgaggcttggacagcatgttgaagaccaccatctctattcactaaattatcatcactggggtgagccaaaagtatggtatggtgtaccaggaagtcatgcttctgcattggaagatgcaatgagaaagcacttacccgatttatttgaggaacaaccacatttacttaatgaactggtaattcatttgtttttctcaaaattaaataatttccatagatgattgaatttagacattagtttttggatgacataaatctgtttcttatcttatcttattatcctttggcaggttactcaactgtctccgtctgttctgaaatctgagggtgtacctgtgtatcaagcagttcaacattctggagaatttgttctcacctttccaagggcataccactctggatttaattgtggttttaactgtgctgaggcagtgaatgtggcccctgttgattggttggtgcatggacagaatgcagttgaactctatagcaagcagtgtcgcaagacatcaatttcccatgataaattgttactaggggctgcacaggctgctgttcaggccctttatgagctttccacgaatggaaataaaactcctaggaatttaagctggcaaagtatgtgtgggaaggatgggattctgactgaggcaattaaggtaatgttttgttcattcctacgtactatttttgtttttgaaaattatagctggtgtttagtcacataaactaattgatgtcttcctaagtggagaattctcttgagcttcatagttttgttttttccaacagactagagtaaagattgaagaagaaagactggatcgtctgccaatttgtttgaagctgcaaaagatggaatcagattatgatttgaaagaagaaagagaatgtttctcttgcttctatgacttgcatctgtctgctgtcagctgcaagtgctcccctgaccgattttcatgtcttcaacatgtgaaccatctatgttcatgcgaaatagagaataaatgtgtcctttttcgttaccccattaatgaactaaatatgcttattgaagcattagaaggaaacaaagaatctttagaagtatggtcatcagctcatctattaacttctgttgatatagaaggtaacagtgtaggcaagccaaatatggaaaatggtaactggaaaagtgactcacttgatcaaatggaaacttcatcatgttgcccaggaacagggacagaagagaagttgaacataaatgcttcttgcagctcaaatggttcttcaaaagaggtccaatcaggaaccaaacagggaaattgtagtttgaacacatctaatgtcactattcatagtcataatagcagtggtgaagctgcaatcacaaaagaagataaggtggatcaacagtgttgtattgatttaaatgttgattatacctccgatgaacatgaaagcggggtattgtgtatgtctgataaaagtgataacaatactgtgatggatatggaggagagttgcacaatgctgtgcaatgaaggaaaaggttctgcttctgatgtaggaagagaacaaaatgtgaaggagtttgatagttatcatcatttgtctactactgttggcactctgaacaaagattacccaatgcgttcaagaaacatggacagaagaaatcgagcagttgattgtaataagttgtttggtgtttatcttttatcttcaaaatcacattcagaagttccatcgttcaacttgactgaaacagaaattttgaacactttggatgtaaaaccttctacttctgacctagaagcttcattatcaaaattagatcctcgtatcgagcttataaatattgggtatattgtctttggaaagctatggtgcagcaagcaagccatatttcctaaaggtacgttataggagtaggactatagccttgaaaatggctctaatttctttagaattacttgttattgttcttgtattgtttttactgaatgggttttcctaaatttcttgttgcaggatttaaaagccgtgttgaattttataatgtgttgagtccaactaaaacctgtacctatatatcagaagttcttgattctgggctgcttgggcaacctctgtttaaggtctctttctctcttctctttcagttaaacacattcaatttaatagggcctccagatataatagtgcaaattcaattagtttttgggtcactttttccttttcatgattaaatatatcaattgcttaacttaggggaaattttttcgtgatatcgttggtagcttactttgaaataacattaaaacaaagagaaacaataaaaaagaaaagcattcaaggatgctgataaaccctcagtcacgtatacctaatcccagaggtatgctaagccttgtgaggaggctactgcaatggaatgacacctcaacataatttagccagagaatgagagctaatgattagttgactgggcgcacttgtttagtttattacacatttgttaggaataaaactagaggaatgtgtgagggtgccgagaaatgattttctagaagacgctttggctaggagaggtcatacccttaaatttgcctgggttaatcaacacaaactagccttaaatttccatgtctcctctgtttcttgttctctggttatctgtgcttttgcacattcctgtctgactgtacctgggcgcatattttgttggggttatagatctcattattctttattaatatttattttaactttacttatttgcagtaaaaaaactggatatgagataaggaaagtaattgtgtttattacattagctaaccaatctcaagggttactaggggccaaattgtgtaatttatgatttctagcttcatttaattgcctatgccagagaatgagtcataaatgaagtagtatattatttttgtttttcttttattaataaaactaagttagctaattaaatttaaatagccctcaacttttttaaaaattgctttgttatttcattagacgagtttgtggtattctaacagccttttatgctttgagcctaccaaactaagctcttagttgattaatctaaaatttttagattgatctaagcttttaggtttttgtgaaattgttttctagtagacatgattttatcactttacactggtactatcatatcattaaatgcggatattaaataaagcatctatcgagtttgttcttttttcttcattttgttacatccctgatgtcatagcatgcatttcaggtttcattggaggaaaatcctgctgaaactttttccaatacctcagctgagaagtgttgggaaactgttctgcaaagactgaatgaggagataaaaagaggaagtaagataggtagaggactgcctttacagccttttcagagcataaacgggcttgaaatgtttgggtttctctccccttctattatgcaggtaggtgacctattgttgatttcatttttacctgtttttgcgctttaggttgagccaggtgattcactttcattttctataagagaagaactaaattacttacattagtgatcatttgtcaatagcctttaaagtaaaagtttccaaacagctgagactaagttatatttttttttttaatgtcagctgtgtaataccaccttatttaatttcctttgcaagagtattaaacaagtttgagaaataaaaacaacaattttaaagatggattcataggacatttcagttagcttctcctagttttatggtaaacctgcctagagatgaagcttgttcaattagaagcaaataagggatatttcctttattttttttcccacctctgaatattgagtttggcagttttatgctgtttcgtttcctgtttttattagttcgggtagtaagtttttagtactccaattctactccttgtattattttgtctatactaataatgcaagttgagttgttttgtttataaaaagaagagttttcctttagaaacatgttctctatggtacagatttatcaaaaggtgtatatccttaaagagaatcaatgggaccttccttaatttgggggatattgaccaggcccttggatagggttcacttgttatgatgaatttgcgaagttagttaaattcaaggtggccatggggtaagaattaggttttggaaggacctgtgtgggttggtgataggcttttgggtaatatttattatttatcttgttttattataggctatgtggcatacaaaaatggctaaatcaatgagtttctagatagggatactaacagcatagatacttaagtttatgcaagcctaactattaattttggtggcataattaaatacagccaatccacttttattatgttttcctacaacgaacttggtttctttattgactatcttatcatggctcttttcttttcttgacaggctattgaggctctcgaccctcatcataaatgctccgagtactgggacaacaggcaaaagacacctgcaaattttgagaagcatttgattgaatcaacttgctcttctggagaaacgaggacaaaacttttcggtattaacttgataaagaaggaacaggatgatagcaatccatttacagaaaaaggttacagtttaattgacgaagaggtaaaggtagttgttagaagacttttgaagaaggcgagtcctgaggagctgacgacattgcatagattattttgcagtgaatcccaaactgctgaatggagagttgcattcaaaacattgattgaagagactcagaaaaatgtaaataaggattaggaatagtttcttaacagatagggccattcattctctaatgcaacttagcttttttttttttttttggttgattcattttagtcattctattagggcctaattctttttagggaaaatagccataaaggagaaagggatgattttgggtgtatattggcccaattgattggccttcataatagaatgttgttttggagggaccaatgtcaccattctcattgagaatagaatatagaagttgcttgtacatgagaaaagcacatctctaacctctgaaaagtacacctcaaaatctcaattttgataatctggttattaatttattaattataggttctacatttgttttgtaatgaccgttatacttagatatggaattagtgagacacttagtactaattaatctgattatacgattatatatgtattttatgtattataaattttatttttatgaaaataggtgttatg

SEQ ID NO: 162429 - DNA, 4367 bp, Cannabis sativa
atatagttgaatcgatcttatatatagattggattaaaacatatataagtgaccaattaatctaataaattgatgagattcaacttttttttataattataattatataatatgagatgtatttaatttttctacaattgggatgtgagccaatagtttagtcaatttacatttgatttttatagttctcatgaaattatttttttagttattttttgttgttttataatttgtttgtagttattgtaagattgatttttttgttgttttttaaaaaattgtttttttataattttaaaattgttctttaagtcataaaattgtaaataaaatattaattaaataaataatatttttataagttccctaattcttaatacactcatacccatcaatgatatgtttatattttgatttaatgtctgtgtaggttaaaatattttcttttaattaattaacactaatttctgttttataaatcagctataaggatcaatatttcattagtttagtttatatgtggagtatctatccactaaaaaagattagaaatttttcagtgtttatttgatcaatgtagttacatatatataatttataattatatttttatttaactataatcaagaatttaattaattaattatattttatatgccacgtggaatgtttattttctccatgtctggataatatgatctatacatttttttttgctaaattaatttttccttattatttttacattctctttttaatttttttcgcttttgctgaacaaattttttggatccgaataatttttttttgacaattttatttctgttattatttatattacatattaatatgtggtgattacataattattaggataatgatggagagtgatgagtcaagtatgtattgctttgcttgtatatattgtatggatcacaaattctttgcacttttaatatataataattttgcttttggtgtagaaaattcaaataaaaaattactcataaaattaatttcttcttaattttacataagaacttatctatcatgatgtgattgcttactttccaattaatgctaatatatatatatatatatacttttctatatagtagatctatccactaataatattgcattaattattttttaggggcatcgatcaagttgaatattataataacaaatgatcatatataaaaaaaatttaaaactacccaaattacttattccaacaatcatgaactcaaacaccatataattagttttgatatttgttatccaatgtattgtagttccattttggatgttatatattaatagttttgatgttattaattgcaagatagtgatttattaattcttaacatttgttaagcaagctagttagcttatagcggtggtttacattggtccaataattatacagaatcgattcaatctaatttaattaaaaaaaaaaattgaattatattttttgtgagtttttttttttttttgaatttgtaacaatatttagttattttgtatttatttttatgatattttgttctattttattactacacaatgttgttgttttaattatttcaagtttttaattgtattatacttataaaattggaattatcatggggtattaaacttaagtaaatcgtgatatttaatttttacatatttttcataatatttttatgttaataaattaagtgtgtagttggatatccgaataaaaaaattgatcgaattcaattcaattagtaattagattggattttaaattttaattagattgaattagacgatgattttcagaatccaataactaattagtctagatcagatgaagagaaaaaaaaagaaaaaaattaaattaaattggatgtcgaactttaaactaacctttatgtcattacctcaataatagaatgaagttaccaaattctcttctaaaaaacaaatatagtcttaatttatattacactttagttagctttacaacactacccattagtatccaaaatcatcaatttttaaatatttttctaataaaatgtcaaataacgttatcaacatggctccctatctactattaaataattaattaattgtgtgcattttatattattattataaagacaacattaatcaaccttttttttgtttgtcttttgacaaagaacactaaccaacttttactttttcatacttttatttattttttgtgggtgaatattactttttcgtactttaaattttttattctaaaatttaaaaccagtggatcattttattgtacttcataaactaactttgttaattaattaatcaattatcaatcaatcaaatcaaattcataactaaaaatatacaaattttaggaagaaatgaaatgactacaaattttaatttatttttaataatatcatagaaaatttgataaaaattattagaaagaattctctactttttggccccaataatcgatgtacacgtgagcctttgaaagtcaactcttcaatacatcagtcaataatatagtgacacgtggatacacggattgcgacaaattatattgtcagggaaatgactcagaaattcatatccataatatttttaaaacaaaaaaagccgacgaccaagacgagagacgtgaaattaatatttaacatttaaatcattttatttaacattaaatcattacattagcattagaaaaaaatacaaacaaaatcattacattcttttttcttacaaggagtgctaccaacacatgctaaaatatatattaaaatattttttttatgacggtattcgttagtttcaacgtaaattttttaattaatttacagtgtcgaaaatagatatgtgaaatttttgaacattaagtagtaaattagaatatcagaaactctattttcagtactgtaaacaatttaaaatttttaaaagatttataaaaataatattataactttaacaaaataaaaaaataattcaaacatgtaattttgagcgagctttagcattactcctcttttctcatttgaacaataaaataaaatgggacacattactatatatatatatatatatactacgtaacgcatgattctcctttacattattttttttttaaatttgggtcccttttatatgaattttatgattaagtttctcaactttacccttcattaaagttttgcctataaatacatatagtttttggttattttggatccatattgccaacctatccaaaaacccctcatatctcatccctttttctttcaaaaatacaaaatattgtatattttttgtctctagaagacgagaaattttgggtatacaaaatctaatattagctcattgtagctacttattaaggtttatctgatctgtttttctcaacctcattctaaaagggtattccaagattaggatttttttctatatatatccatacacaacaagaaaaaatttcatacgcaaggagagatttaataattaactctgaacttttgttatattttctgggttcaatttttttttgggggtgtgagaaataatagtacaaatacatcaataatttggatcgagtagtgtttttgaattgggttttctggttgattcaaaaaggatcttaatttttagaaacagattatacatatatatatatataaaatttatataaataattaagatcatgacttgtttggtttctcggactggaagggagttacagaggtataataatatgggccgccgtcaagttgtagggtaagtctctttcatcatcatcttctttattattgaaaaattaattatacaatccttaaaacttaaaagtctttgctgtattttaatctatttcggtatttaaaaaaaaatagtttaattttttttttcatcttcctttacgttatagttattttggatatattgtttaaacttctttttcggtatgtcaatattttttataaatttttcaaatttttacggaatgtagacgactataaaaaaaattaaagtaaaatattctttcaaatgctaaaatatagtgtattggtggacttctttaagagtgcatttagaaatatcattattatttattaaaagaaaaattgtagttttttgtatttgaaaatggagtgtgtttttatagatctatggaaaagtcatagttaatgcatacatgaaaagtcatacttaatgtgttttttgattgaggaagtaaataattaatatatgagaaatactaaataaaaaataatcggaattaatatttgtaatatgttgtttactaaaattttttggaaatggaatggtagtgatttattttgtttactttattaggaaacgta

SEQ ID NO: 162430 - DNA, 4648 bp, Cannabis sativa
caaattacgatatatgtgcacccaaaatatgtgctcaaatttgatattatggtgtaaaaattttagatacacaacaagaccgtttttagggtgatgtactgttgaccaaggcctttcagctacttttttttgttaataattttaaggggaattatcttatatactatttttttaacttttttttttcttcaaatttacggtttgagtttctaaagtagttgcaacactagttgcaaaaggagtttctatacgattttttgttacaatttagattgcagcgctagttgcaataggggatttctatgtaaaattcagtaaaaatacaaacaaaaaaaaaaattggtttgaagtgtaaaaatgaaaaattccctaattttaataaggcttcaaaaaaatattatttgaatttcatttcatttttcaaataaaataccaatttttcaaaattttgtcccaaataatctataagtgttcacatacacttatgagtttttatcataaattttatgtaagatcttctaattatttccaatcttgaatggatatgaatggaacactaagtagtgtacatatcaactaacgtgcttgtgtgtttatcttttacttttttgttgttagttttagagctactattgatcttcattataattacttttaccaattttagaaaaaaggaattagaagttgataagagatatatggttttggtcgagttggccaatcacattaatatcgtatcatataaatctccaccaaggtaataacattttaaatcctgtattttgtaaagagcattgccattaatcactagtggtgcctagcatcttctcgacatgtcacattgtgattggctagcgatactccctaaaatctattatattaaactatatgagatccgatacttagttggaccaataacgatactaacacataagagggtgttaggcaccactaatgtcttttagcatttctcttttgtaaaagttactaattaatttttctgttttataaaataaaactaaactttgtattttttaaaataatactaaatagtatcctaaactattttctttttgtcaaaataaaatttaatcataatctcatcttaaattattattacaaattagttacatttttttttgcatctgttcgtaataggaattatctttaagttgattatattaaaaaaatatcaagaattaagctttaggtcctatttatataattttgaaaaatatatgatccatttaatcatttaacaaaataaatagtctaatcaataatttttataaaacacaaaatactattaatcttatataatataagggtagacaaatttatggaaactcaaagagacaaattagtatgaaattaattcttgccatccatttattttaaagaaaattttaaatacccttcaaaataaagtcaaatttatttcacttaggaacactaataattaattagagtattactattatgcacaaagtactcattatcatactgatgtggcatgttatgaatggttaataattttttatattatttattaaattaaaatatgtgaaacctaatattaaattgcaacaatatagcggtatgaatctcttatagttttagcactttaaagtgctccttagcatttttcgattaattaatagcgtcgaaagcaagggcagacccatatagaggtgagagggcagtcaccactatatttaaaaataaaagtgatattgataaacataatacaagctttggtttaatgtttactttttctttttaacctctactttgtatttaatactttcattatttaagccaacttttttagtgttactttttttttttttactttaaactatatttaatactataaaattacaaatttgcatcaataatttttaacatgttatatcatgtataaaaaatacacccctcacttacagaaaaaagaaaaattacgttccctttaatttaaatgttgggtccatcactagtcgaaagacgaccggtgctaactttttctcccaaattaatcgataccaaatagccaaaatagtgattttagtgtagtgagttcgattattaaattttttttaaatgataattgttgacgctgaaaagtggttaacaccaaatcgctagattggcgagatgaataatgaatgtaagtatataatttaaaaagatacaaaatttatagtagttcactctccatgtcatgatggtaatgaaactacgtctacttcgaatttttatttctcacgagattacaagagaagattggctaggtgtgaacgctctagtttctagagagtgaaactaaagaaagatgctctgaccttgtgggtacttttttgaatgtaaaaaataagctagaatccttttataggtgaatgaggtccttaaaaataaaaataaaataatctaaaaatatgaagaaaaaaaaataaaaaattagctatttttgaccatagatgatgatctaacagtaaaaattaatttttgaggttgatcgtaattttttgaagctcgaatcgcaatggcaggactcgcttcgggtaagttgtagcttaaattcgtaactctctttgggtgaaatttggagttgattactttagaattgcaattgaagtgtgaaagatgactcaatagatcattaaaatagcttcaaaatacaagttgaattgcgtcaatcagatcaatattaagtgaattatgacaattttacttaaggttgttcatggcctaacacccatattgacatttcccaacgtcgagattgacatccaacgcccaagttgacatatgacgtcaacttggacattgggtgagtgggaaaatgtcatgatcagaatgcatttttgatgcctaagtgatatttcgacatcatttatagtccatttatgtattctgatgaagctggttaacatttctcgaagatgttaatattctgtaaaaatgggatacttgaaattacccatttctaagtaattgtgaaaatgtgaagttgtgaatttaaattttctaacttcatgactcttaggtattgtgataagctaaatgaacaatcgaggcggaatcagaattgaataagcagaacccagcgctccaggccatttgtcaacctgggcgttaggtgctcatttcagagcttttgagatgtcattttgatactttcaaggtgctaaaacttgaggacaaggtatcctatcccatttttggccattcaaaagagaatgcttagagcagaattggcatttgagtgatcgaaactaaatcaccaggtttattgccaacttgggcattgggcgtcgtttccaagccttcgggctagtttgcttatatctttgttaattctaatgacgaaaaaaaaatgcttggaacactttttgagaaacttattggaaatggcccaggttgacaatatgtcaacctgggcgttgggtttgattttaggcctcctagcagttccatttggtccccaaaaatagttgaattttaatcgttcctgaaaaatggagaatatgcccagaagatttcttggaaaaaatcctcaaaaacgacctaagttgaaaaaaatatcaacctgggcgctgggccaaccccaagtgtcaacctgtgcactggccttgataatggcacccagaaagtgttgtttctttcctgaaagtacttatttctccgtttttgatgaagacgaataagaagcatgagtttgatttttgatttgatacttgaaagtggcctagatgacaaattgtcaacctgggcactgggtgcctgggcaccaggtgtttcgggtgctcaaagttgaactttcttcgaatctaattttgatgcctcaaatatgtttgtagtatgtctagttcatgtccgaaagaaaaatttgggccattttcactaagacgattccagaaactaaaaccctagttgaggatgtcaactcgggcgctggatgaaagcctaggtgcccaggttgactttcgtggtgctggtttgtgtattttcagctctcgaggcttgtatttggttgctctatgtcttcatggtacataatactgaaagatagtgttttggaaacaacttaacaggattcaaacacccattctggagtttccaaaatcaacctaggcgtaaggctagggacccctcctaggtcaacttgctatgatttgggactactcaactccaggatgttttctttcttgccacatgttaaatattgatgtccacatcatcagagctacttttggtgtaaacattaataatatcatattttctctaatatttacttaagtataaattaattttcaatttttctcaaaagaatactatgattttatcttttagttgcatctatagtactaccaataacaatgaagtttgtaatattagctacatgaatatgtactttttatttattgcaaatttttatcccttgaacttttgaaaatactgattttgtttcctaaaatatatgacttgttaataatccccctgaacttttacattcatagaatttttttcatcctgttagattccgtccaattagttcgtttaaatgctgacatgtctttgtaaattaataaatttgtaccctaaattttgacaattattaaatcgtacctcctcaaaataaaaatga

SEQ ID NO: 162431 - DNA, 1345 bp, Cannabis sativa
  modified_base (378)..(386): a, c, t, g, unknown or other
ggaatacatcaaacttgtggcatatattatgagagagtctatttatgcataagtcaaacactttatatttttgagatcttattaatgaatcttatctccggacgtaaccccataaactaataacaatctagaaagattgatgatataaaattttgatgtgtaaccacagaatatttatttcagtatcaactttattattctgtattcaattaattaattacttaaataataagttcataattataaaatacaaaatttcaattttttattatgctaattaggatttttgccccttaaattttaacatgtactaaatcatgtcctataaacttttctagtcgttaaaaattctcattgaactattgagattattagatnnnnnnnnntttgtctaatttcattcaattttagtatttcagtgattgtttatgtattaaactatgctcctttgatatgtaccaaatcatgtcttttgaacttttacatgtactaaatcatgctccctgatcttttatccatgttagattttttttattaaaattggacaaaaattcttaaatgtaataatctaaatagttcaggggatatttttaacgatcttaaaagttcagaagacatgatttgatacatgttaaaattcggaagtaaaaatcgtaattaacctattttttaattggaaaaatcttcatttttttaatatgagagatttgataagagttaatgtatgataagggaattctcacaacacaacacaacacaggtgagatgcaacaacagtagcgacagagacatcaaaataaagaaagaaatgcaaaaacatggtatccctcatcaccaccaccgaccactagttagttaagggtatagtgttgatccgtgtgtcaaacgacattgtatttctttatttatgctttataattataaactataaaggctatgtatggttgggagttaagttacattgcgattctgatgccaataccatatgtcattatctcattagttctcactcttcacatcctttctgtacccaaacaatatcaatgccatatgatatgtacgcatgtgcccaataaatttgtaatagttgaatatattacattaaatctttctttatcattactttggtattacatcttattgtattcacttttataatattatattaaattatattgtatattgtatttttatataatattaaattaaacttttatttatattaaaatgttgaatatttatgttagaaattttattacaatggaagaaaaatcaagatacattataactctattgtaaaataatataaggactaaaataagagattgattaaatatatgttaca

SEQ ID NO: 162432 - DNA, 4093 bp, Cannabis sativa
aaatatttggcaataaaatctcagttctataaacacaaacaattaagtcattgtttttttttcttcacaaatcacatatcttttttgaataaatatgatgatgtctaaaagtgaagacattattattattatttttttcttgtttaaaaaagaaaaaatatcaaaattattcataaaaaatgaactacaaagacttgtttcagaaacttattaaagattgacagggaatctcgggaagcatttactctactaataactctaatatatttaacgaaaaaagaaaagaaaaatacaataatattaatatatatttctttgatataaataatacaaaaaaaaatattaatgtaataagttataccttgcccccaaaaaatgaaaaagtattggaaaaagttatactatacctgtgaaaagctttgggattccaatacattggaccatcaggggtatattgggaatcttgagtctgatttccaattttggcctcactaattacagatcgggctctaattaaagacccctctagcctttctaatttggtataaactctttgtcgtctagctcttataataggtggaatttcatgatcagattcattaatattaattcccaaagaaacgacaatatcaccaccagattcatcactgttactagtaataatttcttctttggtcgtgttctgctgattcatcaaaacataataaatagagttatagttaaaaatcactaattaaagatttatattctaaaacttagcagcacggcttttttggaaatatactcatgtatggaggagtaaaagcaaacttgccatttttgacaagttttctgttattgaataaatgatgtgttacgtcatatataataaataaccaataaagagagtatgtgataaaagtaattatgttattttttacttttaatatcataacgtaattaattctacaatcaattagataccgtacgtagtaggtttgttaaaatcaagttgagaatatatttactaattaattaattattaatttcttgtactcaataaatttgttggaatgcatcaacctaggtataagagctcatattaattataacaaaaaccaattaattacaataacttcaaataaaatcaacccccaccaaaaaataaacaaaaatcaaattatatgccttgataagaaaaattaaagtagatttgtaaaattaaatgagagaatagttcttacatgttcttgatgagaagatggagagagatcatcagcttcaatattaatggtaagtggtgaagaagaagaagaagattggtttagtggagactcataagctgaagtagtaatagcttcttctacattgttcttattgtcaagcaccaccaagtttgacctcaaacccaaaacaccattatgatcatcatttggagttgaaagtacagaaataccctttaaaagatctccttctgctgctgctgatgatgatgttaatgatgatgaattccatttagtgaagttggacatggaaacccagttggaagatttgggtcccaaaactgaaacaaacccagaaatcactaccaatggaatcatgagcagcaaaagagttgatgatgatgtcctggtccaacatgcagaccatgattttttgttactattcaccatattgtatatattctttaacttacataatatatatatatatataaggctgattgaaaccaagatcaaaactaaagcatgatgatcttttgatatatataactgttttgtcgctatcctattttatttgtaaataatagtaataatattaagaagaagaagaaggaaaaagtagaagagaaagaaagaaaaggaaagtgatattggtttatgggaagaagaacatttggtactaaatggttgaagcatcacgccaggcgtcctcttgtatagtcctctattaccgagtttttcatgcaaactttctgagtttcctattttgcccccctttgttaccaaaaccttagctattaatgtacctataactatacatctatatcccaccgatataaaataactcgaaacttcattgtcctaaataattaacttcaagcactactcgccccccgcctattaagaaaaataataaaaaatagccacgtgtttacctctgactaactataaatattgtatctcatgaaaaaaaactatatgtaaaagtatatatgatattagattaaataaatctattatcgtaacaatttcagtgcagaataaaatggattgttacgtttacgtgtgtttgaaaataattgtgtaattactaagtagaataattattagagtagtttagtaattatactatatttgaaaatataaaatgtgtttgaatatgagctagtaattacatatgaatttctaatatattttatttgacaaaattattagtaactatatagaaaaataatatttttaagtggctaatgtttaatgtagaaagtttttaataattacacagtaaaattacattcaatatagggtataaaaattggagagtataattggaacccctcaattacttctaattacacaattacaattacagtgtaattacataatcagataaacatgtcaaattatataattacctccaattatatacaaatctaattagattatggctttctaaacatactcaactaaaataaaattgtgtattatcagttattaatttgaatatgattccgatctaaaactagaatgaatatccagatttctaagatcttaactcattaaatggaattactgaatttggataatgatagcctatgtttatattggtgaaatcataacattaatattttaaaattaataagaaaatataatttaagttcagaaaaaaaaaatgggcaagtaaaataataataattactatattttgtcaattaatttaaatatcaactttatatacaaataattaagtagaatttttattttgatgaaataattatctagaactaataaatataataattttaataatatatattatatgtcaatattctaattattgcatgcatatgatatatgtaatgatattttagctgagatttgattaatgggaattgttaaaaggtatggtttatatatttttttaccattatattattattggtatatataattaatatgttttatatataattaaaaaaatattactaattgtcagacaccatcgatgtgtccacacatttttttttatctcttatcaatttttcaatatattattctattttaacacaaatcagtcaataacaaccaacttgctttaataattttgttttattcaaagtgtatcttatcataaatttaaagaaggtatgtatcagtgtcttaatatatgaaacaattacatcgacattgatatgtactgcactgaaaaatataatatatattaattcatatcattaaattgatcgttctagtacacgaatcaaagtctttgcgtctaaaagaattaattgctttaatttgtggatcgttttttagtgttatgatttaatcctttttcatccaagttataaagaagagatgcaaaaggattgggtggaatatgtattatatacaaaatatatttacagccaaaaaaaagattgcaattatttcgattaaaggacaaaaggagttgtctcatcaataaatctttaattaattatgtgaataacacaaaagtgacttgtaagttatatccttcttcatatcctctctttggtttttggttcatataatatataattatagatattttcttgctttaactatataaatatagatttttaattcaacatagcctgttaaacaataatgcaaataaaattttcaaaaatatatgttgtagtatcaaactaggacacgaaaataaaattgattactaatttcatattaaaagaaatttgttctattaatgattgatgacatttgactatcccggacaattaatttaggttaattattatttttgttcccagaaattttaatatcgttaaaaatatttttaaattattaaaattgttggatttaaggattttttttacaattttagtaaaaacgtctaacatggatga

SEQ ID NO: 162433 - DNA, 6274 bp, Cannabis sativa
ggggggtaagcatcggatagacaaagatttgcttcatctacttcatgatgagcagcccaggctccgtgcaacttcattttcatctaataagagcttatcaacttcaacttttaatgagtgggaggtgacaagtgattcatcagagtcctcaaaatctattgtacaacattattattactcgaccatgttggcagagacgggtacaaaaggttcttctgggagtggaacaaaggttggagacagtacctcctacatcttagacatacagagtctgggtagacattctagatactctacccaaaggccatccaaattcgttgaggaaagtatcagtgttagtggaaattttagcgaacattttaaagcacaccgtccagccacaacatgcacccagacataagaaagtggcgcgaactaaacaaacctacagtaatggctaatatcgagtgcgccaatatcttgaagaggatattgaagtgcttattggtgatgaggaagtgcaaaaggtcaagaaccagggggaggtctgtccaacaggcactaaagaggaataagaaacagctcttgtggctctaccgtacggagggcataacgaggttggggagccaatatcagaacttggtaatgtcctaattgagggccaagactatgtcacgaaggaatataaagaagcccttcccaccaagtatcaggattaacccaagacttagtgagtttctcctccatccactctctcgtagaaaagaatcaagaatttgtaggccaagggccttcttggtggtgtggaaacctttcttccctatgacggacaacttgctaccaatccagggaagggaattgtgcgtggttcagaccacatgcccagtagggtgtgatcctaccccttcacccgtactttaagaggatagccagctggcagctactataagatttgccctatgcaattcataccgaaggagatcaaatatatgactgcactatttatcttgtatgcaaagaggcagtgggaaatgccatcaccccatcacaccaattggatgctcgagctaaagtccagcccgcagcataaattctcgggttacttttatttttcttagctcgaacatccttggttgaccaacatgacgtccaaggagatcgtcgaaacaggtgggttcatcagggtttactatattgtacaagagatggaggccgaccacctatccttctagctagcaaagacatactaccatcccccgttcacttacgttcaaggtcacaagtcattctttggctaccgagcagggctcgcaacatatctctgttggccccaatagataatttcatttagttcgcactgtatccatctaaggggattgatgaagatattcctgtggccatgccttctactcctgcgcaggatataccgaagcaaaagaagaaaaataagaagaaacataaacaaactctgcccgtgaggcctattttgattagagaggttgtcgaggaggctacacgttctattgtgcaggttgccgctgggaagggtaaatgggttgtagaggaagagttggaagtactctttggatgacgatgccccttcaataataggtcaggaaagtgcttccccagagatccatggtatatttttgaggattttcatcctgcgttttgctatatatttttgtgaaaaccaaccaagtttgttcgagtcagccaatgcctttactttcttctcaaggtccatccttgtatcttgggaagccttctggagttccatggagaaacttttgacttgtgaggtcagatacttggcgcaagagtaacaatgtttgagcttgagattcacctaaaaaaggcaaagttaagaattagtgatcgacatgtattgagctaaaataaaatacttgttaagaattcttaccttggttaactccctgaggagccctccgactactatctcaaccctaaactcatccgtccccttcatcttcatccgtccccttagcctcttttttctcagaagagagggggacaagaacctcggaagagtgcctagccttggtggaaggagcgacggaaggtcgactatgagatgaagttttagaggcaagatcagtgggcgaagaagttgggtcgaccagatcaacaacaatctctacaaggggttggcctccactagttggggcattataagcaaccttctttgctggaggggttttctctccctgaacgagggaattttattaggaaattttagcaggagactcccaagaagaagatctatcttccttcctcttgccgagtcgatttaacatcttacgtgacatggttgtgcaataagcaaaagacttagcaaaatagacaaaagaaaagctaagttcaacatcatataaggaaacgtaagagattaaaaattcatactatacaccccctcaacgatccgagttgtgtcatcatagagaatgatggttggccgttgattgtctaaagaatcattggtcgactcttcctccaccatcttttttccttaccctcgacaataggcataggggacctagcaacctcaaccaacgattcatttattcttatgtttaaatgaacttgtcgggtgggaggtgtaggatcccttggagtagcctattccttatttttcactaattgggtagcacgggacttccctttggcctctttggacttcttcttgccaacattggacgaatagagtccgtacttgcaaaattatcctttgtgcccagcttagaaatattcctagcctcctcggagagcctggctatctaatgagccctactcctcaggttcaaagtgaacagtggactgaggaatggaccagcagtttaaaatgaatggtggttagcctggacatccatgggaataaattagtcccaatcataacctcctatctttgttatctccttagtgcctgttagccatggataactcaggagtgaaaataaaagtacttcgagttgtaatggtggtggtttgatttcagataaaaaaaaaaaaaaaaaaaaagcaattgatctcatgggaagaaggctcccccaaccttgttgggcatacaatatgtaaacgccggtaagtactttaacccttttgggctaatttgtattgggctgatgttctaatagttggccaaactctggaagtaaggatggagcggaaggatggcacctgctcagcatggggccttgaccatgcgcaaaggccttacccgagcctatcagccaactaaccgtgatgaggaagaaaggtaacaatctcattaaaccatccgttggcaagaaggttgttcaacctcttctctattagcctggatggaggagattagtataggggttggggcttattagacttcttccaaacagacatggcctctgtaagttcctcattggggtagtccacactgactttagaacctgcctagaaggtgatacgaatttcacattagagttatatccctcgtcgatatcaggaggaccaacctcttgcatatctacctccacttcctcctcggaagcttcgtggggttttgaatcattttgagcctgaactgccattagctgcccgatgtgagggtctaaaccaaagactactcagatgatctgcgtggtctaggccagtctgcaccttggaggtggggtcggcttagaattatgcttcgcgacaataacgacaaggtctactagatggcttgtgccctaggcagagtggtacgaccagcagggagtgtgtcctggacatctgttcaggctatgtacatccacgagactggagggaacttcctccaacctctgtttaattcccagatgtgttggtcgtaactatcaccaccaacatggtcagggtagtggtgatgttggaaggaagactccaaagggtcactagagaactcctccttggtagaaaaagaagttttgtttgaggatgaagatgagcttgttgctcagagtgtttggtggtcatcaaagagaagtccgagcaggtggtcatctattcagttatcacctccctagaatttgcatggggttcatctacagaagaaagatagagaggtgaggcaccaaacaacgtggaaagttttttttatggaaaaacacttccaatgctctgaccagagggaaaatcggatcaaattaagaaacttcatcttctcgatagtgttttgagtgaagaaagattttttcgattttcaaaacctaaaatttctagaatggctcaaaatatataaaatttgctaagaacagacgaagcaagccagactatagccgaacaaagcataaattatagatccaaaaatttaagaaccttcaagcatttaaagattttcacaaaacacaatttcaaaatttgacaaagatttaggcaaagagaggtttagagaaacttactcgttgatcgacttgacgatttaatgaattcttgggaaatcggtcggcacagctgtcaatttaaggaaagaagctcaaaaaacttaaaaactcctctcttttgctctgagattttgatggaaaagtttcaaaataatctttggttgaggtatttataggaagaaatatagtgtggggaaaatcttttgggggtaaaatttgaaatgattagttttccccgaaaaaatccaaaacccccatttttcaataaaagccacataggaaaacatgtaaccgtcaaacatagtctccaaggtatagttttcaagggaagtaatcatggcaaaaagatttgaaaagacaagaagaaaattttctactcgtaggtatgacaccaaggttggacagactgtttgggcaaaatcacgcatcacataatcgcctaaagggacaaaccaaaaagtccccgtacgaccaaaagtccctgcgcaaacttagaggaaaaagttatcccaaaaatcaccctcagaatgatgtgacacatggtgaacatgaaagaggttgagaaaatcgggatccctccacgactctctaaaagatgttggtcggctatatgggccagatggagccacccagtctcagacatatgctagacgagctctaaccaccagtatcctgagtcatcaatgactcaccgcagtaaggatatccgatcaaagacccttacaagaggaattgtccatattcattccttaattgatttcttagacatagttggaggaaaatccttatttttgtgggattaatttagaaggatgagagaattgtgagattactcaaattctcacgattttctccatttatttcgttattaaatgtaaatatcttggttatcttccctataaacaatgaagtcatttcactaaataagggaaaatttgtattctcaaaagatcaaaaattatgtagaaatagttgtaaccttcgatagatattaagaaactcacatggccatcccttgtgatcttgatattttctcagagatatacaacaaaaaagagagtaggctattactgctcaaaggagctgaacctctataaatttcgtgtgtcatttacagtttttataatctttattcttataaacatacttgatattgtcgtttcattgactctacgtcgttggctaaaaataaggtaaacattaataaaatatatatatatattaagtttacctaaaaaacctaaataattctgaatatatatacaaactttattttatttataaacacatatttaaaaaatcacactgaaattatttaaaatccaataaataatttaaacaaactaagattttgtggaaaaaaaaaatcaaggttatttatatttataaactcatatcttagaaaataataaaaaaaaataatttgaaattcaataaaaatataaaattatttgttaaaaaaaattagaaattaaactaaaaaaatattatgtttaattaaataaatctagatttttagagaaaaaaaaatagacttaaatttgttcctgtaaaatttaatttttacaaaagttcaatttttaatatacatttttatagctaataaatagattttttaataaaaattaattaatttttttaaatcgttgatttagttttcaaattttgattttttttttgtaattttgttaatcattcaaaatgattatttttaagatttaaattatttttataagaattatcaaaaaaaaaatattgaatctttcgtatttttattttgagtaagtaatttaataattgtcaaggtttaggggacaaaatatttagggctatttaaaaaaatgtgggaaaataaaagtaagtttttatatatatggcataaaaacttaattacacta

SEQ ID NO: 162434 - DNA, 4816 bp, Cannabis sativa
  modified_base (4737)..(4745): a, c, t, g, unknown or other
tagccgctacggcggtcagtactgtggtggttactgccgcagctctctttttcgttcaacgatatatggtcgctaagagaaagagagagaatggtgccgtcgcggtcgccggcgccgccgctggcggcggcggcggcggaccggttgtgcagacgattggtcggagtgagtttgtgaggtatgatggtggttttaagggtttcattgttgatgaaaatggtcttgatgttttgtattggagaaaacttgagatgaaaaataataataataataataataataataattcaaaagaaaatggtaatgatgataatcgtcgccggagaaggaatgaagctgttcaagagattcctttactcaggggaagatcatcaagttctcatgtagttaaagttgttgttccggtagaagaagaagaacccgaaactcgatcgtcgtcgtcgtcttcgtcggctccaccgccttcggctcctcctacgcctccacctccaccgccaccacccccgaaaaatactcctgctcctccgcctcctccgccgcctaagaggcataatttgcattcggttccgaaaccgccattgggatcaaaaggaggtaaggaggaggcaacaatgtctacaacagcaccggtgaaattgaagccattgcattgggataaggtgaatacgaatgctgaacattccatggtttgggataaagtcaatgacaatggctcatttaggtaagtataatcaataaatttatatttcttgatttattataaaatgtactctaatttagtttaacataaacactaaacattttagtatgaagggttttgtaactataaacaactattatgatcgcaaaacgactataaatttacgttgtattgtatgatcattgtagttgcataagtaagattattttataaattttagtattttacattattatttttgcaaattttccctttttaagactaccttaaaaatggactaacttcttatgtactaaaatggcttcggtttgatgtattttggcttcactattacctattttttttgtactaaaatggcactttgtttggtttatttacaggtttgatggagatttaatggaagctctttttggatgtgttgcaacaaatagaaaatccccaaaaggaaacgaagcaccaaaagctataaatgctcccccacctcaagttttcatactagacaacagaaaatcacagaacatagccataattctcaagtcactctacatttccagaagagaaatcattgattctctcatggatggtcatggtttgaatgccgagacactcgaaaagctctcgagaatcgctcccaccgaagaagaacaatcgaagatcctcgaattccatggagaccccactaggctagcagacgccgagagctttctgttccacattttgaaagttgttccgtcggcttttactcgcattgacgccatgtcgttcaggtcgaactacagcttcgagattttgcagctaaaggagtctattcgaacgcttgattcggcctgcaaggagctgaggactcgcgggctgttcatgaaactattggaggcaattctcaaggccgggaatcgtatgaatgctggcacttctagagggaatgcacaagcttttaacctcaattcattaaggaaactttctgatgttagaagcaccgatggaaagacgactcttcttcatttcgtggtggaagaagtcgttcggtctgagggaaaacggtgtgttttgaatagaaatcgcagcacgagtcgctcatactcgcgacagagtagtaatagcagcagcagcagtagctcaagtaagacgacgagtttagcaagtcacgaaaaagagaaggaatatgtaatgttggggttaccggtagtgggaggtctaagttctgaattctctaatgtaaaaaaagccgcagccatagattacgacactttttcaacgacatcctctgctgtcttgaaaagagcagaggatgttcgaaaacttatcgtgtcacaatccattaaaggtggattcgcgagagagatggagacgtttctcgacgctgcagaagaggaagttaaggttgttgagagagaacaattgagggtaatggagctcgtgaggaagacgactgagtattatcaagcgggaacttcgaaggagaaaggagctcacccatttcagctctttgttattgttaaggatttcttggtcatggttgatcttgtttgtgttgaaattgctagggatttgcaaaagaagaagaagagagtggcggctgaaagtccacgatcgactcaactttcgagcatgactagtactactactacatctccgtcggcccatgtcaataggccgacggtaaagttccctaacttgccggacaatttcatgtccgacaagtctagtgattcagatgatgattaatttttttcgagtatataagttttcattttttttttcttcatttcttgtacatagaaaatcaaaagaaatatgtaggatgattagactaggataaggcaaaaaagagtgacaaaaaaaaaagaggaaaagagttgttaatgagggtgatttttttcttctttttttcattattattattactatacattgtttcaatctttttctttgttttgataccaaattatccattaatttgttatgttttatattgatcatcgttttaagaagaaatgagttcattttatttttgttgtcacaacaagtctttcataatccttatatagtactcacaagttgtttttacaattaattaattaaatgtagttattaattaatggcaaaattaactttgtctatgtctgatcattatgtttagcggtctcgctactcagattatatctcagtcacactattattgattaacgaaattctcctaatattctttttccttgttgagatttttttttttttttgaatttactcgagattttagtgagactatttattttaaaaaaaattaatgtaatgtagttgttattaaccactggcattgatgtacaataaaattttgttaaagccttaataacaaattaacaatacaaaaatcataagaaagaaaatgatggcattgacaatttcacagccaattggatggttaccaattttaggccaattagacattgtaacaactaactaattgtatcttccattgagcttaatctcatttgatgcttcaaattcaaaccaagtccatttcataaaatcaaattatataatattactaaagctttaattgactttgttgggttcaacataaaatggttgaggattgtcctcccaacttcaaattatcaaaagtagttgagtacgtccttagtcaaaaccaacaactccaatccaacctatgacacaatcaatgcaatacaaagaagaagaaaaatgccaaaatgcacatgtagtttcttagcattatttaaggtgtgatatcactattgcatgaccgaccctcagatgaggcgaggcgtacccctcaagcccccgtatgctcagggctttgaaattgtgaaaaaaatatcagtatataaataaaatattaaataataagaaaatataataaagtagtatcgaacactacataatttaattgagcaatactacatgtcttaacaaattgtcatgaattagcatattgagtaatgtggcaatattaaaaaataatccaaaaaaatgaaacataaattaataaaatcatgctatattgttcatgataaattttcgtaatgtacaacattttctaatttaatttagtagcttttatagaatatcgctaactaattataaaatacgtcacctataaattaaacaacactactaatgactatgctagaatacacctttacttcttttggccccctaaaccaaatactatattttatcatgctcaacctttttatgtacaaagtaaatttaaattttgttaaaagttttcttttgagttgtggaatcattcctaatccattgactcttttattttttattttttcccaataataaaaacatgcattttaccaaaattgagggagttctcaccaagaatatcacactatgtgaaagatgcaaatatgaatagcattaattaaaagatcacacaagtcacaccaactacttacttatacacaacacttttgtttccccactagaaaggaaaaatcaacacaagaagaccaactgtccaaggatgtgccctgtttttttattggccattgaacacagattccaggtgtaaaatcatatctctagcttgtcaatgatttacacatatcaacaaagcaatcaattaattcttggttgacttttttcttcctcatcaatgttgcaaatcactatcatatatagtttacacatgagtaaaaagacttaattacaatccatgacaataattataagctaaaattggattagattaaggatttatggcacgttttgagtcgctgtgattgaaattgagtgtaatttagagtaattatgggatttggctggcatgtttgttcaaccaagtaattacacagtagttacgtaattggaggtaatttaggggtctcagttactcttttcaattcttctaatagttctataaaaattgagtgtaattacataatattactatttttaaattataatattcttaaagtgtgtaattattaacttatttgtcaaacatgatattaataactcatatgcaattatgattggctaattagtaattttttccnnnnnnnnntgacatgtactaaattgtactccctgaacttttttggccgttaaaaattcccctcgaactattgagattgt

SEQ ID NO: 162435 - DNA, 3068 bp, Cannabis sativa
atcattgtacaatagaattgtttatataattataatatgcatggtatgttttttttgaacaatgcacatacgtatagtataataaatctcttatgcaacatttattttttgtgcaatgtgcagtaagtatatattttttttgaatattaacttattgttagtttttttcatagtgaaagctcatatattgatttatttaattattggaaatcatagtaaatagattattatgtgatcacacaaggaaataaaactaaaaaattaatttatatgttcaccaaaaattataaaactaagttttttttaccctgatatctttgcattcttttgcatgcccaattatatcatcaaatatggaaaaatagtaccttagtaaataaatgatcaggttagatttccttttttttttttccttattttaataaagtattatattggaataaaatcaaattatttcattctcccaatgtcaaatatacaatctcactttttttttcttcacagctttctttctttttacaattctaatacattacactattttaatttagagagaaaataagatagtgactataacgtaggaacaaaattagctagattattattataagaaatcactaatttcagatttgaaatgtgaacctcttatttaagagacactcctcaatatttaataaaaaaggtttccacgtgatagcacgtggctcagtggggagcggcgcgccgcgaggaccgtgtggcttcgctgagaaaaaggaattctccacgcccctaacctacccatttcaccctgggcccacaaaccgtgtaaacatgtaaaatgactcctaatacaagggtaatttcgtcattttaaatctttacacggttctccttaactgtctcactgattttcttttttgaaaaaaaataaaaaaatagaaaaaaacggaggcgtatatatatcggatcaccattttccctctcgctgcaatcagagtcctctgattttctcattcatttctctgtctgagtcttatcatcttagatattctttcgagattttttctctgctgtttctcccaatctggggttgatccgttttgatctccgtcaaatttgtaagtttatcgctttatatattttctgaatttcgtcggcgagtgaataggatgtgtttgtgtgcgttatttgaagttaaatttgatccgagtcttcgtaaattctgctagatctgtgataaagtgtgttgaattttgcatttggtatgtgatattttattccttaaattatgcactgcattttgttgttgatctggatcctgggctgtgccattgagaataagaaattggatttcgcggtgggattcagatcttgttgtgctttgcaaaatggtgttttaaatatcgtataggatttttagtcttcaaggatctgatgtttttttgaactgtggtggcatgggatgatttttttttatcttttcgtttgtactgaattcggtttttttgtcttttgtttgcttttacaatgattaactgggattgagctaaagaaataattagacttaatgtgatttactttttagatgtgttgataagtaagtcttttgggcaatttgttatgcagtgtatacttattagtttgactttttgagtatcgaaatcttgtgaaccgtattgacatgtgactggcttagtcatattgtttttattattggaaaaactattgtggttttctaactgcaaaatgaggtttactgatctcttaattactgggttttgaaatagtcttcgtctccatttttattgtacactactttcactttgaaactgcgtatttggtcagtcttgtcactggtttatttacgcacatcttgatacaagctgttatattttctaacgatatatttcttacatttcctcagaaactgcattgacatggctacatatacgccaaagaacatcctcattactggggctgcaggattcattgcgtcccatgttgccaatcggctgattcgcagttaccctgactacaagattgttgtccttgacaagcttgattactgctcaaatttgaaaaatctcctcccctcaaaatcatcaccaaatttcaagtttgttaagggggacattggcagcgctgatcttgtcaactttcttttaatcacagagaaaattgacacaataatgcattttgccgctcagactcatgttgacaattcctttggtaatagttttgagttcaccaagaacaacatctatggcactcatgttcttctcgaagcatgcaaagtcactggccagatcaggaggttcatccatgtaagcactgatgaggtctacggggagactgacgaggatgctgttgttggaaatcatgaagcttctcagctcctaccaacaaatccttactctgcaacaaaagctggagctgaaatgcttgttatggcatatggcaggtcttacggattacctgtgataaccacccgtgggaacaatgtgtatggtcctaaccaatttcctgagaagttgattccaaagttcatccttctagctatgaggggaaagcctcttccaattcatggtgatggctctaatgtgaggagctatttatactgcgaggatgttgctgaggcttttgaagtcattcttcacaaaggagaggttggacatgtttataatattggaactaagaaggaaaggagggtaattgatgtggctaaggatatctgcagacttttctcagttgattctgatgcgtgcattgagtttgtggagaacagaccttttaacgaccagaggtactttctggatgatcagaagctaacaaacttgggatggtcagaaagaactacctgggatgagggattaaagaagactattgaatggtacaccaagaatcctgaatggtggggtgatgtttcaggggccctgcttccacatccaagaatgctaatgatgcctggtggactcgagagacattttgatgggtctgaagaggacaaatctgaatcttatgtctcaagtaatactcggatgttggttccgccgaccaaaagcaccaactctcctcgcaaaccccca

SEQ ID NO: 162436 - DNA, 3929 bp, Cannabis sativa
  modified_base (3104)..(3112): a, c, t, g, unknown or other
gagcatcaagtagtctgttttctcttgctttccctcttcgaatatcgaccgcaaaacttaaaatcgatggtgtgtttttattactcatcgtaccctgaactaaattccttatccgcgatgggctctctaatttattacatgaaataatttttacctaaaaattatacaatgtaatgctacactgaagagaaaagcaagacaacttagtgaattgggcgagtctgaggtggttttggtggtggaaatactaaaacgattcttattgattaccatatcactagaagaagtaatgaggatgatagattgggtagtgaaaatgaaccattcttctcatcaagtttgtcaatttaatttaataaataaatcattagttttatttaaatatatcgtaaaatgtatatagtataattgggtgtagattttgttgttagttttttaaaaaattaatgtaagccagtttagggcataagaattttttatctaatttattatatgaaataatttttacctaaaaattatacaatgtaatgctacaccgaagagaaaagcaagacaacttagtgaatttggcgagtctgaggtgtgtttggtgtgttatgattccgcaggcaagttagatgtttttccagaagactcgatcaaagctcattctattatctctaattactatgaacgattagagtcatgtaaagctaaaaagagagaaaacagtgaagtgggtctctctatggtgttggagaagaacttacggaaacttgaaaagaaagtaagtcctgctactcatgatattattccaaccctattagtactactaatgttaacattcatgttaatggggtttcatcactaccctccatgaattggaatgaaaaactagcccttttgtccaaaaattccttgatgggttcggcacaatacttggaggccaaaattaaaacttttgatgagaaaattgagatgcctaagaaaaaagagcaattaactacacaaacccaagtccaaaataataatcatgatcatgttcaatttgatcaagatgagtattttcattctcttccactattaatgtcactgtcaccgcctctgctttcgtaaatacctcaacaatatgttccattcaagtatgaagattattcttgtaatgccatagagcagttgttcaacacagaaagataattagaatttttcgagaaccaaagtcagtttgatggtagttaaattcatgaattttatgatggattcagagttccttttggtcgtgaatctgttggaataatcaataataatgatttgggatattcttctcattaggtttgtcaatttactttaatgaattaatcaattattttatttaaatatatcataacatgtatatagtataattgggtataaattttgttgttagttttttaaaaaattaatgtaagctagtttagggcatagaaattttttatctaatttattatatgagattatttttacctaaaaattatacaatggaatgctacacttaagagaaaagcaagacaacttagtgaattgggcgagtcggaggtgtgtttggtgtgttatgattccgctggcaagttagatgtgtttccagaagactcgatcaaagctcattctattgtctctaattattatgaatgattagagtcatgtaaagttaagaatagagaaaacagcgaagtgggtctctctatggtgttggagaagaagttatagaaacttgaaaagaaagtaagtagtgctactcaggataattattccaaccctattagtactactaatgttaatattcatgttaatggggtttaatcactaccctccatgaattggaatgacaaactagctcttttgtccaaaaactccttgatgggtttggcacaatacttggaggccaagattaaaacttttgatgagaagattgaaatggctaaggaataagagcaattaattacacaaacccaagtccaaaataataatcatgatcatgttcagtttgatcaagatgagtattttcattctcttccaccattaatattattgtcgccgcctctgcttttgccaatgcgtcaacattatgttccatcaagtatgaagattattcttataatgcgatggagcagttgttcaacaccgaaaggcaattagaatttttcggggaccaaagtcagtctgatggtggtcaaattcatgaattttatgatggatcgggagtttcttttggtcgtgaatgtattggaataaccaataataatgatttgggatattcttctcaacaggtttgtcaatttactttaatgaattaatcgttagttttatttaaaaatatcataacatgtatatagtataattgggtgtagattttgttgttaattttttaaaaaaattattgtaagccagtttagagcatatgaattttttatctaatttattatatgaaattatttttacctaaaaattatacaatgtaatgctacactaaaaccacaagcaggggttacatgactgacatgtcctcacacacaaattgagaaaacgatagaatcgatcaataagtcgagattcttaacgcagtcatagtccacattcacggcatctatcctgatatcttgcaaatagcttttccaattatgacctcggtggagttcgatcgaacctaggtcgaatatttgctactatgatgagagaggattgatcgatctccacttgaagaacaccagtaccattgttatcgctcacatcgttcagttcagaggtggatggagatggagaatcgttcagttcagaggtagatggagaatcagatggagatggagaatcgtttagttccgagatggatggagaattggatggagaatgtggtggtctgagtctcaagaaacctgcaaccgaggccaagatgatcataatcgcaatcattcttctttccattttgatttttgaataatctttgcttcatattgaaacgtgttttatatatataggggagattgagagaaagagagggaaaagaagaaaataaacgaaaatggtattgcttacacggcctttccttttcttttgaaaaaaaattgttttttattattattgttattatnnnnnnnnntactattattattattattaaaaatgacatctaatattaagtacttctagttggtgctactgtactggtatgtagtattatgcaaatttatattcccttaagccgtgggactcatttccatcatgtcacaagccacataaaatatgtgcaccaaataggcataagtccaaaacaagaaaacagagcattcttaaagacaacaacaagaacaacaaagttaacatgaaattatctataacctctaagaagatttcttccaattataagtgtgagtttctaacagaatgttgtctggtttcacatcacactgtatgatcttgtggttgcagccattgtgtaagtaagcaagtcctttggctgttccaagtgctatattgtgtacatatgtcattacttgaagaaaacccactttggaaaaggctagggagataaaggaatcgcgcttaaccatgagttcgagaagagacaccataacttcagggaatgcataaaaataaaaagctaaaattacaatggaaaaaaaggttaaatttccttttatttatttaaaaagcaaacatgtatatataaattaaaattgcaatacttaccattttgttcttgatctcttagagaacatcttttaatctgggaagtgagttgccaaagcaaatcaaagaacttagaggatgtttggctttatagtttaaaaactgttttcagttttaaaaactgaaaacaaaaactgaaaacagtttttaaaaactattaggagtcgtttgataaaaatttttaaaaattgttttttaaaaattcagttttaaaaaactagaaaaca

SEQ ID NO: 162437 - DNA, 3095 bp, Cannabis sativa
ccaaattttgtttcataacatttcaatctcttcagttcatgaattttccaaaagtgtcacttagatagtatttcattacactactacaaatttaagctttaaaagcgatttttaaggcctttcaacgttgattttggcgaaattcgttaccgagactaatttaagtgacgttgtagggtctaaaacaaccgacgctaaatagtaccctatggcgtcagttcttttatagtaaccgccataggatacttatggcgtcaattatatactattaatggatgccatatacccatataactgatgttatatactttaataaccgacgccaaatctataataattattttttttcagttaatttaatttaattaagatatatatttattaatttatgtattatattatttcatttaaacctaaattaaatatttattttttaaaagctaaattaaatattatttaaattaattttatgaatagcgaatatatttaatttcatttcatagaagcaattaaataaattacaattatctattacataaatattataaaattattccaagtattaacaagttaataaatctaattacaagttaacctaaaaaaataagctagggaagaaaaattcttaggcctttcaacatcatctgtctaagccttcgtgaatcaccgccatcaatcgttctatccactgtcgctataatggtaataatttagttttcgaattgtatgcttgcttttctccaaactgtataaaaaagtaaaaaatatattagtttatatatatatatattaatatttgttattataataaatactataactaataattaaaatttacagccttttggtcatgtatatagcggttggagtttgcacgtgcgacgatgtcagtcatgtatttcaaaatataaaaatcgcattcttgatgtcacggccttgcagaactcttctagaaccgacccatctcacttttcagcacttaaaaaatctgaggcaattcttgatgatctccttgcccaagaggaggattattggcatcaaagatcaagaatctcttggatgaaatcgtgtgactccaatacaaaatttttccatcagcgagtgtcagctagaaaggctaacaaccgaatgacagagctacgtgatgcagcgggagtaactcacaccagcagtcaagatatctatggtttaattaagaattacttttctgctatctttaccacacaaggagttgatcaacatgctttaaattcagtactggacactattcccactaccatttctgaggctacaagatcaactatgtcgctaccttatactgcagatgaagtctttcaagcattaaaatccttgtcaagtgatagcagccctggtgtagatggtatgtctgtgatgttttactcaaactattggaatatcgtgggtccattagttactacagcagtgcttgatgtgctaaacaatggttgtgattcttttttgctgaataaaacattaatcactattatccccaaagtcaagaaaccggttcaacttactcagtatagacctataagcctctacaatgtgctatacaaaatagtctccaagacaattgtgcttcgcatccaaccatatcttccaatggtgatttcagaattccaaagtgcctttctttcttagaggttgatcacagacaatattctagtggcatttgaagttctgcattctctaaaaaataggaaaagacgagccaagggctatgcagcgatgaaattagacatgagtaaggcattcgatcgtgtggagtggcattttatagaacatgttatgctaaaaatggggtttggtatcactttggttcagctgattcttcgttgcatcacctcggtttcatactcctttattacaaatggtgttgtacattgtgttgttgaacctcaaagaggtattaggcaaagggatcctctatccccattcctttttcttatttgctttgaaggtttctctcgattgttgtaatatgaagaaaggaatggtgccttaaaaggacttaaagtgtctagatcagctcccgccgtcactcacttactctttgcgaatgataatgtgttattttttcatgcaaatagatcgtcggtaagagcagttcagcgatgcattaaattatacagtcaagcttctggacaagttatcaatgctgagaaatgtgttctctctttttctccaaatacaagggctactgacaaaaatttctttcagcaactacttggtatgccgatccaaccttgtcatgcataatacttgggcttacctttgtttgctggacgtgacaaaacacaactatttagtggcattacggataagatttggaaactcttaaactcttggagggaacaacttttttctattagtggcaaagaggtattattaaaagttgttgtacaagcaatccctacgtacgccatgagttgctttcaattaccagccaagttatgcaatcaaattgagcaacttatagctcatttttggtggggatcatctgcatctggtcaatccatacattggaaaaattggaattttctatgtaaaactaaggttcaaggtggaatgggttttcgtaacttcatttactttaaccaagctctcttagctaaacaagcatggagacttcttgaatgtcttgattctcttctcagcagggtgctcactaatcgatattaatcattttcttgatgttggtgtgggtaactctccttcattaacttggagatctattgtttgggggtaaagagctgttgaagaaaggcttgcgatggaggatttgatctggtttagatgtaagatgtggtagtgatccttggatccctggacacactattttcaagcctttattgtatagaggataaaatcaaaaccttaaggtggctgatttgatcactgaccaaagacaatggaaccttcaactgcttaatgaattatttagtcaagctgatgttgaaagaatcctctccattcctttgagtctttttcttacacctgatgctctttcttggcatcactcaacaacagggagctactgttggatttttgtgccctaaataaaaccctttaca

SEQ ID NO: 162438 - DNA, 4686 bp, Cannabis sativa
tatttgtgtaataaaagggtataataaaacacacatgttagctagtataaatatacatataaattacaggaaattaataattgagcaacaaaataagatattgcatgataaagttaatcgacaataaaaaaaattataattgagttacaatttttctttaggaaggagatcacatttaatataggaaattatattactttttaacaatttttttttaaaaaaaatttactgttgttctcttggtttatatataaattgttatgtgaagtttagttattactctagttaatatgtaagttgttatgcgaatttcaaaaaaaatatgtataaaaatattttttaaaatataaaaataaaaaaccttttaatatataacaagcaataaataaataaatagatagataaaatacatcaaaaagaaataaatagataaaatgataataaaatttgttgtgactactactagaaacatatttaattccatgctgaaacagaaaataaagaaaacatatttggttataattaaataagttccacttgcgtttcaaaaaaaaatgtccacttgatgtttttaatgtcagtaaataaagtaaaattaaggggtagtaccttaatttatattccacaaattataaatacattttgatattaaaaaaaacataaacttaaagaaaattatccaatatattatttttttaatttttttttttaaatttatagtttggcttgttccggtagttacttctgtagtttttatatgagtttctatgtgagttttggttgcaatttaagttgtttcgttagttgctatatgaatttttatgtggatttccataaatacaaaaaaaaaaaaagaaacttttttcaagtacgtgtaaaaataaaaaaaaataatcttaaacttaaattaattttaaaaatatatattttttaaaaaaatcacattattttctattaatatgaataattattttaattttatttccatatatttttgacactaggtatataatttttcattttattttttccaaaaaatgttatataattttttgtttttattttctgctttaatatgtaaatatattttattttgttttattttatattgtatttttcaacaatataagatggaagaaataaaaattagtataaataaaagatatatatatatatataaattatatataaaataaaaattattaaaatagaatcttttttatattttttgagtgtaaataaaacctcccaaaaataatatgtaaaagctgatcatgtatgtacactacactattttatttgaaagagacaattactagaattggtatgtaacttatgtagtaaaatgattgaaatatattaaaataactatatatgttgtgagaagaaaaaaatagtgtgcgagattaattatatattcttatgaagaaaaaaaaaaacctaagatatataaatgtaatacaacaatttataataatgtatatcctcatacattatatcaatgttattaaataagaatattgtgaagaggaaaacagttgtgaatgattgatttatttagtgttaccttaattacagcttctacaatattcttataatagttatattaatatttaataaatgaaaaaacaatgtttgtgaagaagaaaacagaaagtgttgatttattagcagtaaaatataaagaatgatatgcgaagcagaaaatggagagtgttgtaattaatatatagtcaaatataattagtatgtgaagaagaaaatagagctcgaaacatatatataatacataataatgattgatatgtgaagaagaaaacagagatcgatcgagttgcacttgtaattgtatatatgtaaataataattataagaattagtcacgtacatatatataagcatatatgtatatgagaagagaaaaatagaaagcgttctaataagttattagtagtaaaaaattaagtatgtgaagaagaaaatagagagcgttataataacttagtaaaagaagaatgtgaagaaaaaaaaatagacaggactgtttttaagtatagtaaaataaatatgcatgtgaagagaaaaacagagattgtaattatactaaagtttatatacatttatacaaaaaaaaaatatatatattaacgatgaaattaaatagtttgataaagattgaatagtagtttgagaaaataatacaatatacccgtatgtatgtggacttttttattatatttttgtggatcaagtgtatccattccaaaattaaatattttttactaacaaacttgttaaaaggaaacgaaggtcaaacatatataaatattgatacattatatatatacatgtaacataaggattccttattaaataaatatttatctgatttgacgtcatgatataacaggtagaattattcatgtctcctctctagctaattaattaaagcatgatttaattaagtcaataataatagagataccttcatcaatttgtttacatatttatttatatataataattaagtactgtttatccgttttctgtttctttttgcaatgcctcgtcattataattcattcattgttgttacatgtatctaataagtactactagtcatcgtctataatcatatatgccaatattccattgttgtgtttatcataaactctatctttatttatatatatatatatatatatatatatttatatagacacgttaaacttacatataatgatatgattcatgactatattccgcaatttcatataatcgccaatatacttcatatcatttataaatatctaacatatgatgctaaaaaaggatcaaaataactaaccctagctatacataatgttgtattatactattatcaatattattccatgaaattacagacttcattctcataacacacacatgcatatatatatatgtatgtatatatatatgtataaaaaaaatgaaactcctaactatatactgaaactcgtgatcaattaatcaattcatgaacacggttgtacgatcgtttgaactgtcaaattaaggtttctgatagatcacatgcaaaagtttctcgaaccacaatttgctatacaactatcctttaattactcgattaaaaaaaaaacatttaattaccaccataaatataaaattaatatatatgtgacgagagaactatatattattaaaattgtacatagtatatatatattggaaagaaattaagaaaatatatatagggatgataagtagtcaattactaaagcctcattctggcgtgtattatatattaattagcaaataaatttgtgtatagagatcgatgacctaacgaaaaatgtgtggtaaacacttattatgcaattttctatatgcatatatgtggactgcatgcctttgaggagaatagggcgcgtatgtaattaattatatatatatacatctattctcaaattaataaaatactaaacaaatttgaaattaaatttcaaacttattattaattttttatatattattttgttaggagacaaagggcgcatgcgtaccacaaaaattaaaatattttatatattttccgacataataaattaattgcaccaatatgtaagagctgcatttacttgctggagattctttcgtttcttatattggctacaaacacaattacacatacatttatatttattacataccaaccaaaaaagaaaagaaaagaaaagtgaatttaattttaggcaccaaacactattctaatttgtaatcactaaataataagctaggcaggggcgttgaccatctccatcgtgaaaagaccatgtcaacgtggcactaatccgatgaaccccagaatattcatcatgataagcactttggtacgtggagtatttgccacatcatacatagatatatttatttgtaaataataataataatattaattatttatggccgtcagcacacgatttgtttcacagggtttactcttctatatatatttattttttgtgtataaatatatgtgtaaattatgtaagtagtcattacatgccaaaatacaaaacaccatgagccgtccaatgcgtatgcctaattatattagtttttaggtcctaaatatataatttatttattagtgaaggttcaatatttctatatatatacaaaaattgaaattagtaacttgagatatctgacccttcatatattatcctcaatagtgtccccttgcatataattaatattaatctatgtatctctcatctattatgagcattactttatagttaaacatttgaatcggaagacaaatgagccaattagtatatactataagatgcagtgtagtgagaatatactaaaaaaaacaagctttgataatctaaatgtatatattggtattttatatgtatgtatagtttagccacttgtcatagcttgtctggtggagaatggctcttggtgcccatgaaagaatactcatgtaacttttgagatccctagccatattatgccatagttttttttttctttttttaatggttgattattgaacttattatttttctttttagtataaaaatataataataatatagaagaggcagatatcagtagctttctgtaaagaaacttttattatattaattataattactgtttgtagaa

SEQ ID NO: 162439 - DNA, 1794 bp, Cannabis sativa
tacaagcatgttttcacatacgaaattgagattcttattttcgaatcatatttgttctgttttcatggatctctgcgtaatgtgacttaaccaaaagccaaaagcccaaaaaaaaaaaatcagtgaaaaagaacctatggggttccttgtgtgagaagtgttctattgcttgctattgacctaatttttttattttaattttaatgatgggtatatatatgcacttttagagactgttttttcttgggagaagattgttataaattacggtgcatgaaattgttttggaaattttcattttcattcttctctgcacccattaccttatttttatagttttaggttatgttgtaatgtattttatttgcttatagtgtttttggcttttcaggttgaaggttttgtaatttttaccatgataagtgagaacctatatcggagaggttgatttaccatttgttggaaggtgaaattttgttagacttgaagatgagcttgattttaagattgaagcatcatttgccaaatggcttctgcagaaaaccgatagtttcctctgtcgtggcattaaatcttgggaaactaaatggattgtggcaaaactatagtcaaccagcaagaaatgatgaggaagaggaagaagtagagattgaccagaggaggctccccactgattatgacccagcaacgtttgatcctactcagcatcgcagtcctcctaccgatcgtgttttcaggcttgtagacgaaatatcaggacttacattggctgaaattgctgagctgggttccattttgatgcgtaaaaggggaatgacggagtcaccaagtgtgggagtcattaaagcaggagctgctggcttagcggggatagggacgaaagcaccagcagctgccaaggaggagaagaaacaagaaaagactgtctttgaaattaaattagaatcatttgaggcagcatcaaagatcaaacttatcaaggaggtcaggagcttcactgatttgggtcttaaggaagcgaaagagttagtagagaaggcaccatcggttctaaagaaaggagtgtcgaaggaggaaggagagcagataattgagaagctgaaagctcttggtgcaaaagttgttttggagtgaacatagagcactgctatgtaagctgttgcaatttggaatttgatggagctctgattctagacatactacccgtaaaattgattaccgaaacaaatctctcgaatgtcttgaattaagtttttgctcatcattttttgttttcttttttctcaatgagattatagttaacttaaaaggtggaaatttttgatgaagaatgctgcagaggatacttgctgtccttgtgttttctctttgtttcttaataaacatcttccattgcagctgtgtaagagatacatgtaaaattagctaatattagaaggtttaacactaactgctggatatttgatcatagaatagaagcttctattgggtaagaagtcaacccttttagtagttttgtactcttgtacagtgctacatcccttgatttatttattcgtatggttttgttatagaagtgcttagattagtaaggggtatttgcgggttgtgggcttgtggcatataaatacctatgttaaactgagtattttatattgcacatatcttaattactaaaaaaattaagttttattgatttctataacctcttaactcttaagtttcattttttttattaagctttattagggctgttcatccgatctaatctgcacttttttggtcaaacaacat

SEQ ID NO: 162440 - DNA, 7152 bp, Cannabis sativa
tcatggatttcacccactgccaattacatcttctcatcaaaaattttaacttataaattgtattctatatattatatataatattagtcaagaagaaagactgaattatcataaatttttacataaaacttataaatatgacacttttgaaggtctgtaataataatatcttcacactggggaacaattcatgtttgtgagccttaatgtgggttcatctttctagcaacttttagcaagtagtaaccatatataactaatcattttgttttatttcatttgtttaatatcatgtaattaaaatataaaattcaaccagagtttcacattgataatatatgagaacacattattatcatatatatataagatagtaatgtattacttattattgatgttactaaacaaattaaattataaatattaaatcattaaatttttataaacatttatattataatagcaaaaatattacataaataaattgagcagaccctataaacatttatacagctcagcaataaaaatttacaaaaatacatcttgctctaacattcagttgcacaaacaacttttttccacaacgacaccttccgacaaccaaaccagcaggcccaccgaaaagaaaccaagccagatggagaactaccattaattctgatgaattcacctgagaagaagaccaaaatcaatccaaacacatgtttcatattgatgaaaaaaagtacagaaaaacttgtttgaaacaaaattcatccctgaattctggtttaatttgtagaaatctaatacacttaatatcaattttcagattcataaaatgtagatatctagcaattagatctggagctcccaatcaatccaaatgaggcataatccaaaaaagaaaaagaatgcatcaatactatagctaaaactttatcccattgcaattttgttatttttcagatttcgaatggtgaatttgttcatatcaaatcacaaatagaatagtgaattcacatttagatggagtcacgtacatgcaaatactgttttagttttttatgtttcaaaaaagttgcaacacagttgcataactgttttaataacactctgaaacttgacatgtcataaccagaaggcatgtcataaccaagcaattagatagtaagagaacattaattttgaattatttaattttttttgtgaacttttataggcaaaaaatgttactttaatatattgttattacatttaataaattattggttttaaaaaagttacataatagttgttttgtagttgaactcaaaatccaatatcttatcagaaatgtaaagtattagcaacaccatatttgaaacattaattagaagttcaaaaaaaatttcttagtacgttgacaagcctgttggttattcaatatttgacaaaccgttgaatgatagatgtatagtaggtgttacacataacacattaatttaaaagattaaagtgaattctccaactactttcatagatataataattagacatgttgaataaacattgtctcacagttgaatcaaatattttatgtatcagtataaatgagaaactcgcacaattcagaggaagaagaagaacagtagacaactcaaattttctaagtaaaaaaaatctcttttttctttatttattttttctaaaacaacataaactttactggatttttgttgtttttactaattatatttttttttctttttttgggttatagttagctctggttttgtgagtggtttgtatcgtttgatggctcttatggtttattttgttatttttttattattgttttaatgttattttactgttttttcttttatttttttatctcattttttaaatattgttgtattgttctattttaaatagcaatagggaaataatgaaatttgtatgtaagttatttcttcagtatcatatacttcaatatatgttcagttttcttttgttgttccactgttgttttttaaatgttctccttgttttcatttttgatgtctcctcctgtatgttctcttgttgtgccccagcttcccacatttactgcatttgttatgttgttttttttcccagccagcttccatcctctttttttttttggtcttctagatttcaccactttaatgaaaggtaagcctattactgtccacgattctttcattctagttacctcatataaatatttagtagttggtttgacatgtgtaatttaaaaccaacatttgttaaacatacgaaacaatagtggaacaacccaaaaacaatattagaaaaaccatgacaaccctaatattaatagttttaatgtttccgcttcatctcaccggatttaatgattatttttcagttgttctggtgttattgtggtggttctgtctgtgggtgtagaaaatggagacctcgttttttattttcggtgtttacagtataaaagaaaagaaaaagtcccaaggcagtataaaaattatttttgtcatgtgtcagtatttttgtaaaaattgggtcaaaatacagtatttttgtaaattttccttaaaaaaacttccactccccatagttcattaattttcaccaaatatcttttacgatttatttggtaactcataattatctcaatatttttatttatcatttatttaaaaatttaattataattcttattttaatcagcttgaagaatattttttaatattttttcatatatattttacacttctgacatttctcacttgctataaataattattttaaatactaattttaaaaattatgtaaacgtaatcatgggtacatatataagtctaattaatattttttatcgttatatataatatataaatatatttatataatttttgtggcgaggagatgtttacacatgcaaaatttcttttttcttgaataacatatgcaaaatatcttgaacatgtacaaatatgaatataaatagtacaatgtatctcctgtggttgtggtaatatatataactcataagcatatatacatattttttcacctaagtttaaatctctatctcccaaatcaatattagtgggtacgtacgtagttgtggtggtggcccatggacgtgtgaggcttttttgtttttgaatgaaagagatgctttattaataattgagatcaaccattacaatgttcaactcagaaggtgaatttctagcatgtgcgatcgatctgaaaaataacaagagctacacgcaaggaaatatgcggccttattagcagaacgcttatcaaaagacaaattaacattagacaactgagatataagatgttgacagtcgtggaccaacatcccgaatgtagatggaagaaacgtgttgttgtggatagcttgaactgccataagacagtcggtttcaagtacgacataactccatcctttggtttttatcccactgagggcatccttaattccgattagttcaacaatctcaggggaagcgctactggttttgcttgaagtaacagcttcaataatagctccaaagctgtcacgggcaataaaaccaaattcaaaagagttgtaagcttcaaaaatcgctccatcaacatttatcttcaccatatttgcaactagtttagtccaatgctcttcctctttacctatctcaaaaggagatataagaggatcaaatctattttgttgagcactttgccattgataaagattagatcttgctgacagaaccacatccaaagctactgtgtttttctgattccaaagtagcttatttcaagcattccatattgcccaaaccaccattaaagcttcttcaacttgcactgcattattgatcttcatggcatgttgaaaccactcatagaatggcatttgagaggtggactaaaattgacagatgacctatggcaataggacctggcaaaggaacaatccaccaaaatgtgctgaatttattcggctgtaatattgcagaaagtacaattctgagtaataggcacatgcttagaattgagttggactttggtggccaaagttccagttaaagctctccatccaaaatgcaatactttcagctggacattaatcttccaaaaagctgtccaaaaatcagagtccaaaccagtagcaacatcgtgattttgaagccatctgtatgcacttttaaccgtgtaaatccaagttttttctttactccaagtccagcaatcctgctgaatagtttgaggtagaggaatgctgaggattaagttgtgatctctagcatcaaacatgtcttctaatatctcttcatcccattgatgtctatcgatgcaaattaaggaagagaccttctcattcacaaggctaggatgagcagtatgaacataagggtctgcaatatcaggaagccacgaatcttccaaaatagaggtttcaattcctcttgcaatactttttctcacaccagcaagcataagttgcttagtttcaaagatgcttctccccacagaggtgggattatttcctagagaagatgtcaagaaagaaccagtagcaaaataccttgccttgaaaactttgctgattaaagcattatcatttacaagtagtctccatgcctgcttaccaagaagagcaatgttgtaatctcttaaatctttaaagccaagatctccattactcttatgcttgcaaagttttttccatctcatccaagaaacaccactactttgtttggatgatttccaccagtaattactcatagcattctccaatgatttgcaagtatttaaaggcaagagaaacactgacatagcatgattagggagagcttcagcaactgtttttagtaagagttcttttccaatttggtaagaatctaccctcccagctttgaatctttttgcacattttatttttgagaaaaccaaaaactaccttcttgtttctactgatgatgcagggtaaccccaagtaaaggctagagtcatctgcctcaataatgcccattttttgacagatttgcttgcggtcagctagttgagtgttaacactaaagaacacagatgattttgagaagtttaccatctgtctagaggccatttcaaagtcctttagtaaagttagcacctttgcagagtcattttcattggctcgacaaaaaatataactatcatccgcaaacaacatgtgtgaaataaaaggagcaccattagcaactctaatgcctttgatctgatgtgaaacctcataatgtttaattaatgatgagaaagcttcagcacaaattaaaaacaaataagaggacaaagggtcaccttgtcgaatgcccctagatggaataatagggcctataacccattatgaataaccttatactcagccgaagtaatacattgaagcacaaggaaaatccacttaggatcgaaccccattctaagcaattccgcttcaagaaaaggccattcaactctgtcatatgctttactgaaatcgagtttcaaagccatgaagccttcttttcctcatcttttgcgttttagatagtgcctgacttcgtaagaaatcattatattgtctatcatgaatctgcctgggacaaaagcgctttgagtgtctgagatcagatgtggaagcactacctttagacgattagataagactttagatatgatcttgtatagaacattgcataatgagatgggtctcaaatcccccatattgctcgggcttttcttcttaggaacaaggataatatgtgtgcggtttagaccagtaggaattgtaccatcagagaaaagactccttacaacagagcatacatcttgcttcacaatgtgccaacatttttggaaaaatcctggagttatgccatcgggtcttggcgatgtgtcaagatgtatttggaatagagcctttcgaatttcttcctctgtgacatttgcaagaaaattgtcattttgctgaggagttacagaactaggaatatcatcaatgacacctgctatattgacatttgaggagaaaactaagtcttcaaaatagcacttaataacttcagacaagcccgaattccaatcacaccaatcacctgcagaattctgcagcctatagtaatagcattatttctttttcggcttgttgctgcagcatgaaaatacctgctgttatgatcaccttcacgaagcaaaagttgtttcgacctttggcaccaaaaaacctctctttttgcatatacttcgaacagctcctttttcagcattcttaaaagctactatggaattatcatctctaccacccttgtaatgagcaatctgcttcttccagtagttgatcctttgtttaaaattcccagtatagttcttaccccactcggctagatcttgaccaaaaagagcaatcttctccataatagcaagtgaattattaacctcccaactatctttaaccgtttggatacataatggctctctaagccaagaattctcgaaactaaagtgtttaacttcagagttaaagtttttgacagtgggttcaagtaggattggacaatggtcagagctagtcacctccaaatttaaaagttttgcactgttgaaaatgttgagccaactatcagacacaggagcacaatccaacctcacttctatctaattcgaagagcctctccctttctcccaagtatagggataacctgagagattaagatcacataaaccacaatccaataacgcttggttgaacccctcaatgagccagctaggataaagggtccctcctcttttatcttcctgtgacagtacattattaagatccccaataacacaccatggtaaattgttgtcacctgagagattgtgcagcaagttccaggttcgagtcctcaagcttctactgggttctccataacaacccgtaagacgccagatgttgccttcagcagaattgatttgaacatcaatataatcttgattatacccaagtagtgtaacatcatccttattcctccaaatcaatgttattcttccacttctaccttgtgtatcaactgaaatagctccatcaaacttcagttggacacagttgactgaggtttacggcaaccgatataataataatttagagagctataagggattaagagagagatttttacgtgg

SEQ ID NO: 162441 - DNA, 1383 bp, Cannabis sativa
  modified_base (591)..(591): a, c, t, g, unknown or other
aatttgacatttaatttagctatacagattgatttcatattgcgacaccaataatctagtgtgaatatagattcagcagcaaaatatagctctccaatttgggaattcgacgcaaaagttgagttttttctgggcggcacaacatcagcatatataatagggatatatttattttcctgcatatgaaaacaaaccaaattattaacccaaaaaagaaaaaaagttgttacatgtcaagcttcggttttgttgaaatgtcaaactaattaatcttattatttaatgtcactaataaagcttcggttttgagataatttttttttttttaaaataatgatagtaatataattttgaatcgatcatatgatgtagagacgacgcacaatactttattagattgtttacttaaatgtctatattatttgacaatctcttaatattactaagtaaagttatacttagatgttatatattatcattcatgcatttctctaatgtgctggtgctcaaagtcatacttatgatatatataaaagattaaaggggtttttttttaaaaaaaaattttacactttaaaataattttttatntttttttatttttacagaattttacatattaaatctctattgcaactagcgctgcaacctaaattacaataaaaaatcgtataaaaactcctattgcaactaccaattcaaccactttaaaaatccaaactgtaaatttgaaataaaaattaaaaattctccaaagttaaatttaccatatatatatatataggaatagtaaaatttaaaaattaaaatttattagatgcctgcacgcggactcactcaattaatatcttgattttctttgcaaatacaaaataaattaaatacttcttttagtcttttacattaataccaataattagttatgtgattttctttgcacatatacaaaataaattatatacatcttcttttacattaataccaataattttaaacgtctccaataccaaaattaaaagccacaaaatctcgatcccttgtataattaattataaaggaaattagctattaatgattgtttatatatgaaggaaggaatacgagatcataataggaaccatatgtgttgctttacgttaattaataaaggagctgacaaatagaaactatcataatcaaaatgctcatataattaagcatactttaaagtaaaggcaactataataatggagtactacacataaattgtacgtaatagatttaagaagagaaatgataaaaggataccactggtgcctaacaccctcctacgtgtcaatatcgctattggtgcaattaagtatcgggtcccatatagtttaatataataatttttataaagta

SEQ ID NO: 162442 - DNA, 1827 bp, Cannabis sativa
aaactgactttttcactgtaagagtctttgcttaaatattattccacaacaaggatactagcattgctttcgtagcatcagtacgcttatttatgatgaatttttctattgtagaacactttcggtgtaaaatctctaaggaacagcccttttgccgagcatgaaatgatggctgctctctaccttcaagtgagtattgtcagccaggccctcatttttgtaactcgctcacgcagctggtcatttgttgaacgccctgggttactactgcttgtagcattcttgattgcacagctggtatggatactacatttttcctttccatatttactgtaaaattaagtaaataagaatcttcatttcataagaaacttgttctaattctgttttatcttccaggttgcaactctgatagccgtctatgccaactggaattttgcaagaattaaaggtatcagttggggatgggctggagtcatctggctttacagcattgtgttctacgtgccacttgacataatgaaatttgccatccgttacatcttaagtggaaaggcttggttgaacttgctagacaacagggtaagcatcttctctacagataatagattttcagcatatttagttggaacttcagaagagtatagtgaattaagaaagatttaacattgatcatgctaaatgtgtaaacagactgcgttcaccaccaagaaagattatggtaaagaggaaagagaagctcagtgggctcttgctcagagaaccttacatggacttcaaccaccagaatctaataacatgttccctgaaaagagcagctacagagaactttctgagattgccgagcaggccaagagacgagctgaagttgcaaggtaagctccatttctctttatcccatgtttacattgtttttcatgcgataatgtccgttcaatatggcatcagaacattttgctaaaacagtttctttttccgatctatggtttcaggcttcgtgagcttcacacacttaagggtcatgtcgagtcagtggtgaagctaaaggggctggatattgacacaatccagcagcattacactgtgtgattgtgttaatccaataaagatgaattcagaggaaaagggctgcattcaaatgatgtaagcttagagagaggaagggagagagagaagatgacaaacatacagattggcggaaaggcctagttagttaagagttccttgaatatatggagagaatctttgtgctatatataactctcctgaactggtttacatttttcttcttagtctattgcagttggcagcagaaaactgtgtttggtttcttcttgctctgatgttaggggccaaataatgtcccaaagtttttcttttctttcttagtttttgtaatcctttccctttgatttcctatcatacatgtttgtctttctgtatcttcactattgcaaccacaaacatttaaccaacatttggtgtgttctaattgtttgaagtagcatatgggggctcttttattgccattccaatgctctcccgtggttttcaatttattgtgttttatatggatgttcaaatcctttcccatggtttttaatttgagaaatgttcaatgtactaattttctcatgctcttgtgtgattgttagagaatctttgtaggtatgtacatattcttcagtcgtacaattataataagttgttacaataatgatacaaaatatgtacatcccaaaatctatatatctattctatataaagtgtgcttatataactgaaattcttgttttatgagaaattcatgggtgacttttaattttt

SEQ ID NO: 162443 - DNA, 2890 bp, Cannabis sativa
gagattatttacgtggaaaaagctatcttgtcatttttgatgatgtttggaaggctaacttttggggtgatatgcaaaatgttttacctgacagtgaaaaaaatggaagagtagttatcacaacaagatatgtgaatgttgcaaacttctgtaaggtatcatcttgtgttcatatacatcatttaaaacatcttccttcagaaaaggcatgggaactcttttgtagaaaggcttttcaatatgaacttgatggttgttgtccaccccatttatacaagttgtcacgcgagattgtcgaaagatgtgaaggattaccacttgctattgtagtcattgctggtcttctatcaactaaaaattatactactgatgagtggaaaaatgtgcttaatactttaagctcagagttacaaagcaatgaacatctagaatgtattacaaagattttatctttgagttacaatgatctaccttatcatcttaaatcatgcttcctgtatttaggatatttccctgaggactactcaattagatgtggacgaattattcgccaatggattgctgaaggctttgtgaaatccaagaaggataaaacattagagacagttgcaaaagaatacttggtagatttgataaatagaaatcttgttcaagtatcagatgtaaattttgatggaaatgctaaaacttgtcgaattcatgatcttttacgtgagattatcctaaataagatggaggaattaagtttctgtcacatttatcaagcaaaaggttcaaatttcaaaggatttactcgacgcatttcaattttcaatggctcttgtgatgtcattaacaaccgtgcttttgtggctaattctcaggtgcgatctatttttatgtttgataaagaagaagtacttaatcatcttataactaaacttaccataaatttcaagcttctaaaagttcttgattttgaagatgcttcaaatctaaatcatctttcaaaagaaattggaaacttatttcatttgaaatatttaagtgttcgaggcacaagagttggatgtttgcctaggtcaattggaagattggaaaatttagaaactctcgatttaaaacaatctttggtgtttgtggtaccaattgagattaagaggcttcaaaaactacgacacctttcggcttaccacgcaaatttgaatgaggtttcatttagtcaactaagaggtgtaacagtagatggaggaattggccgattaaaaacattgcaaaagttatattacatcgatgtcaatgtcactggagtgaacctatttaaggagttgtgcaagttgacggatttgagaaaactaggcataaaaaacttgagaagtgaagatggaaggagcttttgtgattgtattcaaaatatgaacaatcttgaatcgcttagtgttacttcaataagtgaagatgagacaattgatttggaatccatgtcgtctccccctcaatttcttcggcgtctctacatacaagggcctatgaagaacttgcctgaatggattacacaacttcaaaatctaactcggataggaatttattggtcaaagctagaaattgatccactaagtgtatttcaaaatatgcacaatcttctggaagttcgtatattcaatgatgggtactatggtgagaaattacactttaagaatggaacttttccaacacttaaggttttgtacctcaaatccttgagtaaattgcgtttgatagtacttgaagaaaaatcactatgtcatcttgaagagttttttatagggccttgcccacaattaaaggagttgccttttggtttacactatttaagaaatctgaaaaaagtttacttgcgtgaattgccaacaatcttcttgatgtctaaaaattttcagacccttcaaaatactggacttgacattcgacttctttataagattaatggtaaattgtggtccttcagattggaattgtggattacggattttttggaatatttgcgaggtaaaactttgtgccactccaattaattaatgtttttcagctattaatttaaaattaataataataatatctgtacacataaattacatacatatttcattctgaagtttcttatgagtttagtataccaaattaattaagaacccatttataatagttggttataatttttctcttatcagatcatgtcaggaaagaagaatgggagtcaaaactggacaacctatttagtaagtagttgtcttttatataacaaattggcttatattctttctaattaattaaaaataaatgttatgttttgttatatataggtgaacgggcttctgataaggctctcatccatgctcgatcatgacaacctaaccattttttgcttgaacttttttatgagtattttgatgattttgtatcagtgttaattaataattttatgcctagaggcaacaatatttttgctcaattgatggctaattgtgaacgaactttgagcttggcttccaattcctgatcaaagggttattcagcaaagagatgggactttgtgtttttgataaagtataaactagtctactatttttgacatatttgtttttgttatcgaaactttgtgttttataagtaccattttattaaattaaaaatagtttattgagaatgagtctgagtggggtttggtttcgagtggtgcttgggtccgattgggtgacttctagaaccaataattagcttttcacaaacctagatttcatactcattaattaaaatatattacagtggtatatataaatatggaacactaataccattgatgggaactaaaaaaaaattaataaggtaataatccaataacctttttatggaaagtttctaaaaattattt

SEQ ID NO: 162444 - DNA, 1567 bp, Cannabis sativa
cgtacctcagcttgatttaacatgacagccaaatgtaaaatggtgttaccactttcatgatctttggcgttaaggaagtcagtattttcactacaaccggccaagtgtaccacctttttcagagcatccaaatgattgtgcttaacacataaatggagaatagtctctccactgggtaacggtgtaaaaagggactcctcaatatgacccagtcctgatgatgaaatgagaagtttaatgaggtgtacatggcctctcacggcagcatggtggagaggaattttcccatcttggtctttgaccaaacaaacacctttatcttcccgtaacaaggctacggctatctcggcatgaccctcagccgcagcaaagtgaagtggtgagcgtttcagagagtccagctccgaagcaagttttggtttaagacgaaggagctctttagtgaattcaacgtggccgagtgaggctgacacgtgtaggggactttcagtgagctgggtactgagacatatcttactcagaattaaagggtcattttggatcaacgatttcaacgtggctacacatccgtctactgcggcttcataaagctcacaaacttcattcgaattatgtttgttattatcatcacccatcatcatcttcatcatctcttacgtacaagtactacttttgtactttaaaattaatatataatatataagtataaatatatatttattgaaagagatgagagaggtttaatattagagctatatatatatatatatatatgttttgcatgaaacatgaatggaagcagtgtgcgatatatatagactctctaaggtcatacagtttactttcagggtcaacgtgtatataaataaccaattaaatatagggattcctaccaccttcctacattttatgacagagctatataggtagataagtagctctgctatagtaacatgactaataataaatggaactcattttaacatcaacatacatcatcatgaaagagctatttttgtagctaaaaaataaccaaatgggtagttactaatttttgtttgactttctaatcacacttttaccttcaacaaaataaccaattaattaagtaccttttcaccctaattaggagaaaattatgtataattaacacccaaacaaattactaaaattaataatttaattagctcccaaatgatatttgatggctagctccgttatcctttaattttttttctctcttgcaaagtgatgtggcccgccaaattatgaaattctaattcattatgaataatgattaatatatgtcgtacttaaattgtgcactaatgatattaactaatctaaactacataatattataagtaattatgtgatcctatatattcatctatagttatgcccttcctcccctcttctcagcatcacattatttagaattgtcaataatacaccaaaaagagaagattgcccttcagagtacaaaccaaggctcaagtatcctatctaaacctcctattcggctcaccatataagcctgttaacctccatgtcactaaacctccaa

SEQ ID NO: 162445 - DNA, 6444 bp, Cannabis sativa
  modified_base (740)..(745): a, c, t, g, unknown or other
atctcctctttctctctatatcaaaaaattaaatagttaaatatatatttttttttataatagttattaaaattaaaatataaaatatgtgagatgtatatcatgttaaattatcaaaatgacaatataacataaatattaattattttacgtgcataaatatatatttatattatcagctatgcatggaaatggatgaatcaagtagtagtaagtcacacagttcttcatcaagtggtgttattaggcataatcaatgcagaggagaatcatccaattcatcatcttcttcttcttcctcactcccaactttcaacttaaaacccaactatcaacccaatattgcaagattatccaaactcaccactactactactcatgaaattgaggtaattattaattatatattaatactatatatatatattcatatatgtgagccttattaattaattactaatttggcacaatattagagtgtgtaacacaaaaatgtatcgatgctaattaaaggcacttatttttttaaaatagtatttaatgtagttagccctttgcaatttttttttaatgtacaatgctcaaatcagagtttaaattaatagtttatttttcatgtgtgtataataatatatagtttaaccacttgaggctagctcaagtggccataagtgggtgtgtgagtattggaggttctgggttcgagttccaaattaaacatgttgtaatatataaacgcnnnnnnaaaaaaaaaaaataataatatatagtttatttttaacatagtatttttaattattcaaataaataatttaacgtggactaataaaaaattttcatatatgtcgatagatttatttagtatttaacagttaaaaattaataaaaaaatagaaacccaaatagaactgacgttcggaggttttaccctccaaaatttcaatatctagagttgattctaccaaactttaaaattcaaataatttagttgtaaattaccctttgataaattatttgaaccctatttcatatgccataaattaattaacttaaatttcttaaaaacttgcatacaactagccttttatagctattaatagaatgaatatggtcataaaaacatttggaaaaaattatactataagtgactcaattagagtcgtaccccactaaattaataaataaatttacattatataataataatgataatactttttttttttataaaaaaaaaatataacaaagaatgtagtagctagtaaaaaaaatatggttgacaaatttatgtttgaccacttaaccctatcaagtggcaacaaagagaattaattttatttgctaatataaaacattcccaaaaattactgggcacaaaaaattcctttggagatatcgaacatataatatatacttaattttcttattaaacctatatatttgtgctcaaatacttttttaatgatatatatagtggaagatgaagatatatgtgtatgtatttttttgtatttgtttctgaattaatgtttttaggaaggaatagagagaaataataaaaatattaataattaaactaattaattttggttaattagggtcacaacaaattattctcttcatgccactaactagggtttcagataaatgcaattcacatcagtgtctacttggaaaaagctttttgcttttgcaaattccatacatatcacatttatataatttaatttatatttaaaaagctaattaattaattaattaaccttattaataaataaagagtggacatgatgtccttttggaatattaattgaatcacttatatttatttatttaattttgttttatttggcaggaaaattgtgaaagtgatgaagaagaacacaaccatccaagtccactacttcaggagcaaaaacttataataaaataataagaagaagaaaatattaataataaacaaaagaaattagatgagaactgttgcaaaaaagagaagaagaaaaccccacctacttggccactctttaatctattaggatgctaattaattcatttatatatctatatgcatgcagtactactctttattaatattatatatatttaactctatattcgttgtattcttgttcttcctaataagaaaggactaattaattaattagaattcttaaaattatcactatatatggtggtttctcttattattttaattaataattaatattcattacataattaatatatatctatattagatatatatatatctttaattccatactactatatatatatagtaagattttaaaataacctgtttacgtgtatataaaacaagttttaaaactttattcaaaaataaatacctaagatttttatatagtcaatttcctttcacctaagtaaagcccttagccaataatcttactttgaaccgtatttgttcattctcattgattgattctctctttcacctcgagaatccatttacactccacaatctttttattctttagttttggtacaactacccaagtcttgctctttcggaacgaatcaatttcttcattcatggcctggagttattttgacttatttccatctaaaattgcctcttcgtagctttcaggctcttcgatattagttggttatactactatcattgcaaacacaatcaggtccgcctcaacaaaccttttcggagggtgaatctctcttctggttctatcacgtgccaacagataaccttccagaccttcctatctggaacctctgtttggtcttctaatcttctggctcaacatcagcttccgtctgcgcattatgttctagttccataatagcttccggttgcgaactctcttccagatgtttcgttccgtattccatttctatgagtgtagtgttattgtttcctgattttcttgcatcacacggagacacaccacattttccaactgtcagtggggatattctaattaatttattgaaaactacatttctagaaattactacatttgatctaccctatttggaaatacatattctataacccatggtacctaaggcataacctagatagtttctttaactgatttaggttccaatttgtcgatagattggtgtacataaaatgtacacccaaagattcttgaatgtattagatttggggttctattgtaccatattttataaggggttttcaagcttataactcattttgggcttatatttataaggtcagttgcagtagctagatatttccctcaaaatagtttttctaatccaaaattgaacatcatgcatctaactttattcaatagggttcggttcatcctttcagcaacaccattttgctctgggattttcactacggttccatgtctagtaatcccacattcttgacacaacttgtcaaatttagagttaataaactcaaaccaattatcagtcctaaggttcttaactttaagatctgtttaattttccacccgagtttttcaaattctaaattgttctaggcactcattctcagtttctagtaaataggtccaaacacatctactataatcatctttaatagaaagaaaatatcgcttactgagtgagtaggcactttgtatggccccaaagatcaacatgcacatattcaagtatcttcttagttgtatgccttgttggagtgaacttcagcttatgttgttctcctaatacacaagcttcacaaaatggtaaggcacaagaatttaaattttcaatcatacattatttgtgtagttctttgaggccttgttcactaatatgcttaagtttgtgatgccacagctgcatatctgattctagcccttacgccaaacttgctacttatactggaatagtttctccttggagaatatataaaccattgatcttttcacctttcatcactatcagtaaacttttggtgatcctcatgctttcgtgcatagacttgtatatgtatccttcatattcaaacgcaccaagggatgtgagattttgtctcagctccagaatatgccttatgttcgtcaacactttgattcaaccattatattgtttgatggcaaccttttcggttctaatgaccctgcataaatgatcactatacctccatcaactgatttataattaaaaaataattctcgacttgaatacatgtgataagtgtatccggagtcaagaatccattacctattcattgaggattccaagatgaaaaacaattcttcatttgttgagaagtcatctctatcctctgcgatagcaattgaatctttcttgtggtaatgatactggttgtccttcctatctccattgtgaaatgttttgaactttgctgctctttgtacttcttgcaaaatctttgcaagtgtccggaccttctacataagtaacacttttgagtttccttttccacttcgatcttgattgagagtgatgttgtttactctttgaacttactttcttaggtgatatccctcttgctaaatacacttcttccttcttggattcctctccaattgtagttcaaaatccttggacttgagtgcggcaagaacatcttttgacgcaatcacatctacttgatgtcagctttgacttcttgatacacgattgggagcgatcttaacaaaatgatggcctaactttcttcaaccttatgatttatattagtcaattctataataatctcattattaaacttgtcaatattatcatctaaagaaaggaaaaaaaaatattctaaaaccatataacatttgtagcaaattaatcttgctagcaatcgatgacttcatatagaattcttcgagcttgttccaaattcattttggccattttttatgcgacaagctttctcctcacaatgttggacatgtatatgatgatcatgtaataagtcatctcctccattttaactatttcatctagtttcttgtcagtcaataatttctcatctctaagaaatttgaagactttctggtgcactagggatctctttcatactttctctccatagcgcaaagtctattgttctgttgaatttttccaattcaaatcttaccattgacgacattaattgtttattaaagaaatgcagcggaaagaatcttgattctacattcttggtcgattaccaagttttgatttatggaaaattataactaataacatcaaattaactaaaacttaatcaacaaacaattaaaaatgacaagataaacaattcacaaataaaagttagagataaaaacaggtaggaacaaagtatctaaaatctagaaacgataaagcaataaaaacataaaatcaacaacaagatttatatttattcaagtcctataaatgaatgtaatttatggctctacttcagtcctagagcaccatcgaaatcttctttattgattgagcaagaacagggtacaatacagtcgagatcaattctctgttggactctctcaaagtatttatctttcatgctcttactctaaaaatcttcttcatatacagaaattattttatacaaatcataaacccaatctctctgtttttctgtacctctctctctaccactcaatctctcccttcgaaattgcctctcgaaactcgtctgttaatcacacttgtttctaaaagataagtgttggtgatatttatagatagaatatgaatcccaaaatcagtggttgtcaaaagctaagtttctaagttaattagttacgacttaacgaacttaacaaactccccgaaacaatatctccacgtcaacttaagttaaaagcgcttccaaatgagacgtacatttcttggaagataaaccgaagcgtacgttgaaggaacttccaggataggaatagcgataactggagtcgactatctgaaactcccttccaggagggaacatctagccatccaaaactcaattccaagatagccatctggaaactcttttccgaaggaagactagcttttagagactctttctggatggacaagttagacttccaagaacgccattccagatgatatctacctttccataaagaacaactttcggagtggagaagctagacttctggaactcttatacggacgacatctaactttccacgagacatctttctgagacatttccatttagagaaactataccacccgtagaatttatacccttcataatatgcatgcatgtacgagtcaacttgtttagaattagcagctgtcaatcaagagtatgagatttaagtttcattatatcaacaaaacatttatatatatgatttatatttaaaaaagaatgtgttgggactagaaatctctcttctcaagttttaactaccaccaaaaaaataaaaattaaaaaattaaattaaagaggtagccgtagctaactaatatacggttgttgttgtcatg

SEQ ID NO: 162446 - DNA, 3339 bp, Cannabis sativa
ttaagcacaataaataataataaaattgcttgaatattaaaatttaatctatattcactacacgagtaagtgtaaaattacagatgaacttcggtctaagccacaaagtgtttttgtaaaaccaacattgatgcccctattgatcatgtgtaaggcatttgcagttttggtttggtagagtgtgatctgaaggggggcgttcttggcgtcaatagtttggatgtgtgtgcattttgagcattgtctactcccacatgtttgaatttaagtgcaaaagtgtggctgttaagctgagagattacatgattttagactcttacttgagagtgagtgattgttctattaaatattaatgtcattgcattagcttgattgcactcactttagagaaacattttatggcagaagccatttgatcaatggatatcttatcctcgacatgcatgaatagcttgctaaagtgacatccaaaatgaatcatttttatttttgatagatttcaacgacacataaagatgaatcaataatcatttgtattatttaccttcgtgaataatttgattgtatccaaattttaacacagctaccctacttatttttcttttcttttttatcctagtgttttattatatcaagaataccttatacaaactatgctttcgacaaggctaaattcaaaggagaatgcatgtattgattggatggatcatttaaagggaagcaaagcatattgaggtctttcaaaactgggaacaaaaaattgtatcaaagtatctgaaatcaataccaacacaaaaacaaaggcacaataagtagctagcgttcttgctgagtatagatctgaaatattaagtctaaacaaaaataaatccaaaactcggttgtctttccttgcagtactccactctatcatctaaatgaaaaaacacctacaaaagccaaaccaacaaaagtacagttttaacatcagatcaacaaatgaaatgccaaaatcaaatacgattttaacaagttaacaatcaccaagatcaaagcatactcctagtatcaactcatcaatgctttgcagataaaaataagcaaaatttcagtgcacaaactatgaataaacataacttcatagcaactccgtcagctatttcacagccaaacattataaatcaatgtatcatgatcaatacttgtagaaatttaacactcccacaatatagattaattcttatgcaaatcctatgtgataaaattctagctttaggttagtgattgaaataaaaactgtggaaaagcaaacatgaacttaatacgttgtcttaaaatgatttataacaaagtcacaacaatctgtcttttatttcagcaacctaagaaaataatatatagctcaatgacttcaatttctgaaaattgaataggtttcatatctagaagaaaccataatgccatatcataaaacacaatcacaaaaacttaaataaaaccacaaacccaataagcgaaaagagaacttgtgagccactttcacatatacaaaaccagaatctataagacaagttcaaacacatattgaaatccatttcaagcaattgaaataaaagtacctcatatgttgctgggatacatgaacactctgaccctagcaccctgttcaaatgagaaaagaaaatgaattcatatacttaaaagctataatgagccaaaaaaaaggacccaaaacaaaaaaattaccatggatttgggaggaaggttagaagtgaacttagcacgaacgacaccactgtttccgtgaggtctaataacctttccccaaatacaacggtaatggctaccgtccttcttcaccttggccttgtaaatgtaagccattctcttcccggcgtaccatgatacttcctccttcgtgttcacgccctcgatctgaaccagagaagtgtttgggtactgattcgacttcgacctaataaattaatcgcacataaaatatactcaattaaaaaaaaaaagttcatttcttcaagtgtatacagaattcaaaacaggtaaagtatgaatttcttcttaccttttgtatccaagaactgtgcctcgcacataaagcctgtgaaaacgaaaatggaatacaaaaatatcagtaaggagttagggtttcatggatgataagatttaaaaaacctgagaagtggaaagatttgtaatgacctgacgcgctctccttggcgacccttcaccattttcgatcgaagcttgttctgaaatctggtgaatgaagatggacagtcggaaaccctagccctatcgttggatgaggaatatatatacccctgtactgtggtttgagatttaaggttgacgtcgttttgcaaatattatgtcgtttattaaggttcgcaaaagaagccatgcacgtgacatttttaaaaaataaataaaaaaaataaaggattaataatttcattttatatgtcgtttaaaacaatattccttaataaaatttaggctcttaattaattcatacaattaaatgtcatttttttttaatttctatagaaatatccttcttttcatttttcctctcttccttgcaccaccaagaccaccaccgagaccacttagacccagacaccgagaccaccaaccaccacaaccaaacttcctcatttacccaaaactcaacccaacaactcccaaatctcacctacccaaatctttctctcttcctcctcctcgacttctctcaaccaccgttgccacctaaccctcaccctatcagaaactcattatacggcgccaccacaccacaaacgaagaccaagacagaccactagaagctcttcattaatttttttatgtggcaaaaaataatataaataataaatagtgtaaaatagtcatttctctacaaatttttaagttaggatatttacttacataatgctattaattaagttcattttctatagttttccttagtataacttgtaattttgtggcacataatgtgacaaagtgaacctttacctacaaacggtatagttgtttgcttgtttcttccattctgacttacatcttttgtaatgaccgtgagatttaatttttatctatgcatgcttatttcaaaaagaaaaaaaattaatatatatttttaaaatatctaattataattagatgataactggattgattcggtagattgtttattggattggatgtcccatccaacaattgatctcgatctaattaaatttttaaatttacatccaatctaattataattggatatctgattttattaaatttaccttaggtgatgtttgctttgatgtaatgtaatgtaatgagaat

SEQ ID NO: 162447 - DNA, 2406 bp, Cannabis sativa
ataaatatattttacttaaaaaaactcatattctatattatttacatcgataatctaaaataattaatttattatataattgtatcatagctactagtaagaatttaaaattttaaaataatttagtaaaatataatatttattaaatcaattaaaacattgcatattttttttttgaaaaaagaagaaaaataaaatcatacctacataatttaattttctaatcattatggtgctcccacatatgattaagtaatgcatttcaaaagacatagcaagcatctgtatctttgatttgtctatgttcgccaaaaaaatattgaaaattaacatttttatttgatatacgcgtccttaatttgtttatttttattaatgttgttctttttaattttataacttagtattataatgtgtttattttatttaatactaatattactatttttattatagttatttttatttttcaacatattagtgttttaattaaatcaattattatttttgataaatttttattttgaagattaaatataagattatttttcacgagggttaaaatgtaaaaaaaaaaaaataataataatactaaataagtgtagattcaaaattcaatatcattaaaataatgtaaaaattccttatcaatttaatgaaatagtggagcattcaagatgaacgaaggcatctacatgaaattatagactttatagtattagctagctacaccgtctgatttttttttttttagtttttcaattatgattattttcataccaaaaatagaaaaggtgcacgttgtactttttttttatttttattttttcttctttttgttggtgcaccttttatgaaaactgtggaggtgaaaagcaatggattaaagcgaaagtgatgcaaacatggcagcggaatagagagattccattcattttttatttttaattacctaaatattatccattggaaatgggtacctaatttctcattatagcattaccacctttaagtcaacatgaaacagtaaaaatagcatagtttataaaaacaatgtgcgttaagtttaatgccagagtattttttctttttctcagctatattccttgtagttacaaattactatactatttgtgtaatttttttaaaaattcataatattctgttttaacacacttgttcaaaagaaaataacaaaagagatgtttaactaaagtaaacactatcaaaaaataaaattacaaatatgggccatattagatacagggaaagaaaagtacatgaggactggttttctgtttcttctgttcatccttcatcgtcttgaagagtttgattttctgtcaatatatccctatccacaaatcaaatgaaaaattctttgaatgttcttgtataattaatgaaaacccatgcttggaataaggatctatataattcaaataaaataaaactaaattatattaataataataagttattcaaaaaaaaaaattatattaataaagatcaatatagcaaagtcaaaattaaaattaaatgaatttaattataacgtcaaaaagatcctccaaagttcagacaataagttaaaattattgttttattagtcaaaaacatttaataaaatgggtcattaattaagagcatctctaatgtatagtgtaaattttatagtaaatttatctcaaaaatagctcaatattatattttgacttaaattttataattatatttcaatatacaattgtatattaaccctaaagtcaacatagtgattaatttttattaaaactatataaaaaaattatttaaataaataaataaaatattaaagtttttaattagtaaaaattattaattagtgacaaataagtaaataaaaaaagtaacatttaattgtggtgtaaatttagccaataatatattttgtactaaatttggcctaacttttcgaatatgccaaatttgatacattttttacaccatgaagcttcattttttctaaaagcatttctaatatatacagtgttataaatatagtgtatatgtctttttagctttaatgtggccaaatgggctttcacaaacaaccgctatggtaggttgggtgtttcttctatcccgaataatatcttatgtaatgatcgtgaagtctaatttctatccatgcacgtttttattttccaaaaaaaatgtatttttagcctattttcacaaaattgaactttaatggtagtgtataatgtgatttaaatttgcccacgtactaaaagttgtgccaattttagtataaaatatagggaattttacaaaaatactgctttttgaccaaaagtttacatttatactgggacacggcaaaaacaacttttgtactgcccaagcccaatttcattacttttg

SEQ ID NO: 162448 - DNA, 2183 bp, Cannabis sativa
tactaatttgtttatataatgcccaaaattagatttagtgttggttacaaatcgaaactaatatcacatgggtccatgctatattaatgttatcaacattaataaacttattagtgtcaattatagttggacttgaatcaattaaatactattggaataataattgaaaaatctataactttatgtcaaataagagttttaatttttttgttatgaatgagagaagtatatattgactttaaactatgtgtaatacatacatgcctatgcaaggcttaaaattaggcctgaatttgatactatcttttctattacaattgagtaatccaatatctatttttaatttatatttttatacattttcttattctgcttggtaattgaaacctttggttcaagtagacatcattcttgttaagccagagatgataaatagaccgtagcataaactcattttctgggttttcttattttacagcttcttatccattgcaaatgattcaatactataatttagagacggttattttagttaaataacaaaaaaaaaggtaaatgaaatatttttttattagttttgggatatttatttgcagtggttttataaaaacgtaattatagaatactccaatatctatacctttagtttttatttatgtgtggggtgattaaaacagaaatgcgagaaaaagacctatagagatggttattataaaatcatttataaaacatcatttaatattataaaatataattgaaaagatattttgtcaaatacttttaaaaatatatttatatgttgatataaaaatattgaatctaatactcatatgtatgatatactatataaaattaaataaaaaataaaataaagttgaagtattatatatgttatgcatatactttgtggagaaaaaaaaaaatatatatgttatgtatatataaagaaagtttacgagtgtgccatgtgatcctaattttttaaagtcttgtctagctatggcctaatagattatagtgccaaaaatatataatttttaaaaaatatatgatatatattaattgataagtttaggattaaaagaagtgacttaccttatttgtaattatttcttctaagaagtgcaattaataatttttttactattgttaatctaggctttgagggctgcattgtataacaaaatacagatttggaaatgaaaaaaaattagccttgaagtatgatatgataaaagcttacaaaaaggtagagtggggtttcattgaaaatgtgatgttaagattgggctattgtgatagttgggttaggaaggcgatgagatttgtgaaaactgcgaaatactcatttttgtttaatgggagtattaggggtgaagtggctcctactagaggtttacgacaaggtgatccggtgtcactatacctttttctcttctgtgcagaggcttctttggggttaatccagaaggcaaaagataagggataaattagtggtctagagtttgggaaagatacagtttcgatttctcacatgttccttgttgatgatagtttgattttcatgaatgctaaagaggaagagtgtacaatttttaaagggatttttaagacttattcgagaacttcatgtaaatctaaagaagtttgatttaagtagcaaaaaatgtgtggcatggaatgatataggaaaaacttggcaaaactgttggaggttaatttggtggattctcatggaaaaacttggggatgccctctttggttggaaggagcaagaaagaattgtttgataatattaaagataaggtgcgaaagagactaaaaggatggaggagatctttgttttcatcaccgaggaaggaaatcctcattaaagtaattactcaagctatcccaacctatgtaatgggctgtttcaaactgcccaaaaaaaccatcaaaagtgtccatggtatggctagcaggttctagtggggactaacagaaaagaagggtaaaattcattggtgtaagtgggaggttctttgcaaaccaaaagagaagattggcttgagatttagagatctacatctgttcaataaggcaatattgcagtttctaaagaacccaaattcgttgtgcaccaagccccttaaggcttcttatttcccaaataattcaattttaatatatctaatcaaagt

SEQ ID NO: 162449 - DNA, 7433 bp, Cannabis sativa
ggaaacctaattcctctacacaccaagtggtccctggtgagaaggtggttgctaaccatctgccacagaacaaatttgttatgtttagaatgtaatttttttttctacagaattttgagagagagagagagagagagatttcaagtaattctctctgcttttctatgttcttaatcacaaacatcaattaaaaagaaattcaaataaaacataattctaattaatataaatatggtgaaagagggaatcccaaataagctttctagttcaagacaaatatacaatagaaaaagtaaaaaaaattaaaaacttaatcattttccttaagcaaattttcttcctttattttgttttattcttaataaaacaatattcaagagaatatacaatatcacatgaattaaactaagctaaacttactcaaacttgtcgagagaaaagatacagtggttacaaatttgatcgaaaatgacaacatgaaaagccccatgaaccaaatcaccatcaccggcggctgtcacaacaatgataacaaagatacacaatattataagactttactaaaacacaaataatgactttaattcataaaccattcccagcaaaatctcaaacatcttattaccaaaatagatttttggagcattagcaagatttgaaatttgaatttttattgtcgtctgagatggaatatgaatcgttttttgtaaccatcaaaatgctcaaaagtagttatagaaaccaaccaagcaaggtacaacctcaaacttacaagttacaacagttattattgtttgtttttttttatgattaagatgcttaaacatcgaaaattaggttcccatgcattgtatttagtttaatgcatggtgttaatcaataatcatggtttttccgtgagtatacatgttagaatattcttccaagatattttttttttttttcaatttttgtggtatgggccagctaagtttgaccaaacccagttaagcccatattagcttttatacttcaaaactaaaaacgcaccgtttaggttgacgttttcaatgaatagtaaatatattgattctttttatatatgtaagatatagagagagagagctttttcagctgagaaagaagatgaggaaggaaacagtagcagcgactaaggcttgagacagttttttcaaagttaaggctaagttttcctgacaaatgaaactcaacgttttgaggatgttgatattctcttgttgtaaaggtaaatgtagcccacagtaaaatgaaaacttcatccaaaaaaaattaaaattacataccaaacattggttagacttagtattcccgttcctgagtaaggaaagctgtgtaccaaacagccccttaatatttctgcttttcgaggaaaatgtgttttgattaggaagtgaaaatgaaggtgaacaagtctttccttgtgttttttttttttgaaaataaaatcttcattttattaaacgattaattcagttaccaaacaaggcaacaactcaacaggaacattgtccaagttgaaacgacgatcggggtgagatatagcagctctagcaaaagagtgagcaactatatttgctgatcgctttacaaaataaaatgaaactttacacaaagcatgaaataaaattttacattcactaatcactttgccaaacattgaagccatggacatagaacttcgcatagcttgaacagccgagagatgtctctcggtttccaaggtgacattggttcacagatggtctttgatccaacttaaggcctctcgaacaccaatagcttcagccacttccggagtagttgaaccatgaaaaagctttgtactaccttccacgaggataccaccatagtctctagccacaaagccgactccatatgttgaggaatcactaaacacagttgcgtcgacattaaccttaatactattatccattgggacattccattgctcagcaccgtcccttagaatgtacccagagaaaagcaattcattgcttgatttttgagcaatacgccattaatttagtttgtagccaaaacaacaatgctctcaactcctacaaatttgttttgccagaccttgtcattcctagcattccaaagtgcctgataggccgccacaagcacgcaagattggtctgtattcaacgctgtaaaccgctccatacaccagtcaaggaaggacatttgctgctgcaacaaagtgcctatccccacacggttgcaaacagcagcaacagctggacaagaaacaagggcatgaagagtggttcggcatccatactgcatataggttaggtcgaaataacgtttactttttttgacagcagctgagacattgtaggaaggcaacctttagccgcacgccacactagatttttcattttcggaggggttttaagttgccataacttcttccaaaacttatcttcagccaagacatcaagattgaagtcaccactaagttgttgaagcaatttgtaagcgctcctgactgtgtatatcccagatgaatccttcaaccaagtaagaacatcttcaccaggccaagattgaaagggaatactctgcaccagttgaacatcacgaggcaccagcaagtcctctacgatagtagtttcccaccccgtaccatccatagtagaaaattacatactttagcattatagagactaggatggttggatataatcgaggggttttcttcatctggcagccaaggttcccccaaaatagatttgctttttccatcactaataacccatctcgagccttgtttcactagtaactgagcttccaaaatactacgtcaaacgaagcttggatttggaccaatagtagccgtgaggaatgaaccatggggaaaatatctggctttaaacacacgggagacaagagaatcatgatttgccataagccgccacccttgtttacccaaaagagaaagattaaaatcttgaaggttgcgaaaacccataccacccttatttttgtgaccacaaagacgctttcaagacatccaatgaatactcgaaggagaattactaaaggactgccaccaatactttgacatcatgctttccatgtctctaataatctcaagtggaagtaagaagacactcatggcatagctaggaagggcttgagccacagttttaataagtatctccttacccgctcatgaaagaaatttagtgccccaagcttgaagccgttttcttagttttgcctttaagtaacccaaagtcgcagtcttgtttcgccccatataacttggaagaccaagatacaaactcccctcgggggcaatacacatgcctaagagcatagctagtctatctttagtttcaacactagagttggagttgaagaagatcaaagacttagaaaagttaaccctttgacccgaagctaattcaaatttctgaagaacttcttttattcggagagcttcctcatgggtggctttacaatacaagtaactagcatccgcaaagagcatgtgggaaatacggggggcccattagccactttacaaccatgaatccaaccacgttgttcatattttcggagaagagccgagaacccttcaggacaaagaataaataggtatggcaacaaaggatcccccctgatgtatacatcttaaagggacaatagggcctatttcgtcgtgttcgtggataatatggtatctggccgaagacacacatcttagaatcaagtggatccaataattagcaaagcccagtttacgtagcatagcttcgagaaaaccccactccactcgggcatacgcattactcatgtctaacttcaaagccatgtagccatctttaccctttcttttcctcttcagataatgcaaaatctcaaatgaaacaagaatgttatctgaaattagtcggccagggataaaagcactttgattggccgaaacaattgtatccatgaaaggcttcattctattcaccataaccttagagatgattttatacatgacactacataaagctatgggtcggagatcagtcatacggtctgaattctttttttcgggatcaaaatgacattagcagcatcacaatcattctcaaaagttccactttcaaaaattttttgcacacagcaaataacatcaccccccacaatattccaacacttttgatagattgccagagtcataccatccgatcctgggctcttatcagggtgcatttggaaaagtactttcttaacttcttcctccgtaactagttgacacacctccaaattaacataatttggcataataggataaacacaattaataaagtcacgacaagaagttcctgatgactgaaacaactcttgaaaatagttggaaatcatatcagccaaccccgtaccccaagaaagccagttacccgcatcatctcaaagttgggtgatttggttattgcgtttactagtagtggaagccttatgaaaatagctactgttcgaatatccctcctttagccaatgttgtttagctcactgtttcgaatagctttcccgacgatcaagagcctcgtagagtttcttttttgtatcctgatactgttgcaccgaaacactatctcttctggggtgtaaagctttcaagtcagctttgtaccgttttattcaatgattcaaagagccaataatttcctttccccaccgagccaatttctcagcacacagagccaacttgtcactaaactcctgcagatgattttgttcccagcaatctttcacaatttcaaagcataaaaggatctttcaaccaagtattctcaaataaaaaatgagaaacatgagagaagctacctgatactttcggttcaagaaagagaggggaatggtccgacgtagagtactcaaggttggtaaggctagcttcaggaaatgcaaggctccgagattgcgatactaaagcacgatctaatctcacctcaacccaagcattcgtgccccgacccttctcccaagtgaaaggatgtccatgaagctctaaatcagtaagtccacattgttggagggtcgtgttgaaaccgttaataagccattgagggtaccgtcttccccccgcttatcttcatgtcgaacagtgttattcatgtctccaatgacacaccaaggtaagctcgaatgattggacaaggtgcgaagaaggttccatgtgtgttggcgtctgcttcgatctggctcaccataaagactagtgagtcgccactccctattgttaggagagaaaacaactgcatcaatatgattatttgaaaaacccagtaaagtggcttctttcttttctttccatagcagagcgagtccaccagcttgacccagagcttcaataacaaaaataccttcaaaattcaacattctagccaatccctttatttttgatttttgacactttgtttcacacagaaaaatacaattgggtctcttttgagaaactgtttctctaaggaattgaatactctgttggttcccaagtcctcgacaattccaactcaagacattcataatacttggcgggtctgaaaactagcacccgccccatacaagttttttggctcacccgaactgtcccccatctcacatcataatttcaggaatatctatattatcaagaaaagtgtcatttttgtcattgaggcccatttgatcttcattgagcacactttcttctccctctttacccgtcccactactatccacgtgacccactcttcttctttacacatcaataaaagaaagaccctcatttgaatctccctccacaatattcacattaaactcctccatattcggctccctcatttcatgggattttccattattgctaattgaaggatggtcaactccaacatgttgcaatctcattgatggtgatccctggattatctcagcttgtttacctcctccaaacgtccctagcaacaccgaagaaacagtcggcccaatcgcactagtcgaggatgacccctgtttcgtccccattccaaattgaagccaccttgaatgattggattatctcagcttgaatgacgccttctcggagctgctttaagatccaaactatagttcttgatgatttgatcttccggagtgttaaataatttctcacaaaatctctctgaatgaccgagaatgccacagatgaaacaaacagttggaaggtcttcatatttaaagatcacatgacaaacccggcctccttgtatttcaagcttcttttttttttcttcaaagggctgttaagtggaattttaacctgaatgcgtagataatcacgccatgctccaaagaaattgttcggatccgatttaacaaccgtgccaagaaaattaccaatacctgtgataatctttttcgacataaaaccaattgacatattatgaagttgaacccaaagttctaaccttgataatggaacctaccgcggattaacccctggtttcaccctttcgaatatcagcggaactcgatcgaaggtccatggactgccctcaattaccctttcaatgtccacttcatggtagaactggaataggaataggttcgggtctaactccttgacatagagacccctccctggttgccacaaggtggccattttgttttgcatcgcttggaaatctatggatttattagttagaaaccgccccaccaatagccacctaccgtcgatctcctgaagttcatcaacacccgcttcaaataacagtccctcattatcctcatcatctatgttcaaggttgcatattgctccttcattgaatcaagaaaaaaccgtagaacagagaattatagtaaaataatcacgccaaacaacatacgaaaaaccaaccgaaattaaataaccatgtcaaaggacaagacaaaaataatcctggatgcaaaaatgatcttacatatactttgttgtatgtttggtcattaaaaacctccaaattctatacaactttaaaattactacaaaattctaaggtctatcttttgaatcttgattgtctaaatggatttttactcaaaaagagtagctttcctagtgttaggaaagcatgtattggaatatattcgtaaattgtaactctaaagacgtgttattaatgtgatatggtcaaatgttgtgtagaagcaaagtacaacgagaagactaccaagcaagcaaagtacaatggagatttaggatacgattctaataaaatttgaaatagatttaatttaaccaacaaaatctataaatttgaaatttcattttactattctttaaaaaaaaattatccttttacttattttgtaaaattttatcctaataatttcccattttactcacaaaattctttccatttattttatttcaaaaacttaaacactctctctcctctctctctct

SEQ ID NO: 162450 - DNA, 3254 bp, Cannabis sativa
tatagattagggcgttacaataggccagttggaaaaacatcccattctgccaaacctcctagtcgtgaccatagaaaagggtcgcgactactggagccaaattgacagcttcagcagatttttctccagaatgtcccgtcttttccccaattaataaaatttgaactgtaatgcatcgggaacctgaaataaggaaaaccaagcataaaatcattccaaaaggcaacattaactgagaaaacgcttatgaaatcgacccgaaacttagactaaaaatagcttaacagtattccttctagagagttgtccatctcatagttatatcattttctctttctttctttctttttttttttttttgtgaggccatgagtgtctttcaagactctcttcttggcctaccaaagatgtagcgctttttgtaatactgagcccttaagtttcaacctcaatatttttctttctcttagagatggggaagactgaacatccactattaagtattcttctgaacacaataacataactccaagatatcatttttctttcatcccacttttataataaagagggtccaaagatcctcatgggggcctttcccttgtttacaatgagctaaaagatagacatgacaattggggtcactcgaggggttttcaccttgatttaaaacaaattaaagtgagagaccaaaaagatatctcggtggcttctttcttgtgataatacttcattccttttgattttcctttagtcttccctttggttctctctggagtacccacctaagtacccttgctataataactccttgattttaatcttgagatctttgtactcctccgtaaaattcaaacgtccttgtggaacttgtaatatttgtttgggtctcttctgggcctatctttcttcataggggtggtttcttgaattgttctcttgagctattaaactttgtatagcatgtgtattcacaacattgttgttccatctctttcttgaattttttgcatcgatcatctcccagtgatcgaactctcttctctttagtggcttattagcaagagttgtcttgggatggccacttcttctcacatctaggttatcatgtccatcctccacttggacacacctattggctcttccgtagaagtcttccaaatcgcataattctctcttgagaatgttgttccataaattgcttcttggcttgactccagtctgttcgtctttggagtgtctcacaaccttggccgcttcagcgttgaagtgttgaatgtagctttctaggctttttatctctcctaaatttatgttggccaaacttgtcctaaggatgatgtagtctcacgaggcgtggtgttgggccaagaattcattagtgaattatgtccacaaggcaatagatttgagagccaacctcttatactacttatacgtcgtgcctctgagcgtcatggcaaagtattgacacctttccttgatcgccaccctcttcattttcatgatctcattaaaggtatctaagaggtattttggatcaataattccctcatagggcagtatgttctactccttgaaatttgtaggtagcgactcatattggatttccctcgagaaaggtgatttatcatcaaattcatccttatcccaattacattccttggagatggcggacgctatcctttgtcgaaggtcttccatctctctatcaagttcttgtcacttcttgttcaactttttttgaaggtctggtgatgtgtgctttggcctttcttcatagcaaggattaatcggcgacagtgctcgcctttcagcaatggcccttcggttgagtttctcccttagatggccaaggattgcctttgacacaattttctttggtcgcgacaaaggttctaggtctttgcgagattgagattttggcagtgaagattctgacgtgttacatgtggagtattttgtcattccttctcctttagttcactcccacctttccttcaggcttctatctctccacgcctaactaggggtgttttagagcgaccttttcgagtattttttacatgtttacaacagtttcttctaatcgtaagttgttcatccttagctcgttcatctcctcatggtgaacatgagttcgtgagcttgaactcattgagtaaacccctttctcctttctgggtcaatggtgtgaggttctgggatctctcgatgccaacgtcgtggggtttcttattagcgatggtactctatgccttgactcaccttcaccctcaagtgtgacggaagcggtcactccatcttcttgtatgtccactaggacctctttaggatggttgtcctcttctctcacctgagtccttccaacattagaaacttcttctcctgtgacaggtgtgggggattacgccttgagatgataagctgatcagtgttgtctagctgaatctccacaccttgaagacaacgagagcatctagacattttgcgatgattatatgtaagggagcaacttagcctgagcttgttgttcccatagacggtgcaaaactattgacagtgaaagcttatcaaccaaattatagccaaaaaatcaaaacttggatgtaagacctaggacaaagatgaagatctagatatataaaaacttaaagaagaaatgtagaataactatggagaaagatagaagtgtatatttctctaggtcaagtgttacaatgattttccaaccccctctctcacttgagaatggggtttttataggctctaatagtctgagatacacttttggtcctcaagggacaagttggccttatgtggctacaagttgccggtacaagagatggtcttgcgccttataccattatcgagtgtcaggtggtctcgagttataggagtagtggttgtagagtacctattgtcgggacatcaatccactacgtgttctatctcaccaccacgccacgttgaggaagtgattgtactcagtctcgtacctctccttgtgcaagccttgtccttcgattccttacttaacagtctcctcttcaacacatatccaaattctcccttcacttcacatttataacactaactcatgggtctcgcacgtgagcctcgcacacaccacacgcggcttacatacgagcccttcacacaccacacatggctcgcatgcgagtgttaggctatttttagcctaagtttcgggtcacattttatagttgtttttcttctttattgttattttt

SEQ ID NO: 162451 - DNA, 3376 bp, Cannabis sativa
ttttcagtttctacaagaatgttatgaagattaaggccctgcacgcaagagaaatttgaaatcatgtctccactccaatacaaacaaattacaaatttcaccaacgttatgggcaaataattgaatattatcattcatatttatctagttttgtctcttaacttgagcgaaatgtgaaattttcaaacgaatataatgttcatagtgcgtttatgtttcttggtatccagaaatcccaaaaataaattattattttcatttataatattttgaacgttataaatatgttgtacagaaaaataatgaaattgttagcctaagaatccgcaaatggttcttctacaaattaaaactcataagagtaaagggaatggacattgttacaggacctgagttccaaggctcttgttcaaggcttcatttcacatgttagcagcatatgcaggttgcatttggttccaaactgtcataacagatgcaacctacagtacaataaattctacaattaaaacttactaatcaagaattttataactttgaatcatgaacttgaagttgaaacaaacacgagagagggagcgaggaacaatttaatgattgctggaacaaagttggtgtttatatgtttgggcaagacagtaacaaagtaaaaagattaagtcaataccctttctaagcatgtttatttgaatcattatgtaagttacaatgtagataaaaaagaaccgtgcaagaattaaaagcaaatttaaaaatatttcagtgtaagaaaaccaatttggatattgtgacatatgatgattggtacaaactgttcgaattcaaaataaaatatgtaaattttttataaaattgcaccagtaataacttctaaaaatagagtttcagtttagacattttaccatgaaaataaggccagctagcatgattttttaatcacaaacaagaagacatcaacaagtggtggtttcagagatcctacaaattattaatttttaaatagcatgttgtcaagttgttgcagttgtgtaaaaagggatttatattatacaaacagcatcatgaatgttagaagaggtaattaacaaatttactattcaactaattatcatggtaatatgaaacactcaaacttcaaatgctttgttaagagaattgctaagttaagagaataaagagacgaaacttaccaatttctaagccttctttggaatatcttttagatcagcaagaagatccatctgccccctttcaaaaagctctttgcctggtggaccagttgctaaagacacaacaaagaattatacaaatatgctcccaaaagaaagggttaaatcatcatataaaagggcagccaagtgatgaatattttatcatgtcagcaaagatcaaaagaaataaagactacaaacaattgatgagaattagatagaacagagcatggaggtagacattttaacatggaaataaggccagccagcatagttttttaatcccaaacaagaagacatcatcatgtacgtgcatttcctcagaccaatctataacctaattatcaagaacaccccatacactgaacaatgaagctcaatctgaaattaaaatcttaccgaacgactttgttgtagttcgacccactcgcctcgtctaattgactgcttatcgtactaaccttgaacgaattggaccaatcgtgctccattgtattgaagaaatcgactgctccaataggaccaacctcacaacaattcaatttgaggctgaaagaaattccaatcacagaaatttgaacaatttgactgcaatgacatttctatttgagcttgcacaatattggatgtgtagaagaaattccaatcgcagaaatttgaagagcttgatcggaggggaaaagtacctgacgattcatgagattgacgtagtattttaggggtttaagttatatttatatttatatattgaattaataaatacaaaatcagaactttaatttattacaaaatttcttgtaaaaaaatgtgatttgaattcaaaccgattagatattatcatattatacgattaaatagatatgttatagttcattaaaaaaagatagatatgtgataatgctataggttattatatttggtgaaaagatactttaaatatcaacctaaaaaattacttccaacttcatatacttatattaggattataattatatttgtggttatatttattgaacactgtctcttattaattgaaagtctcaaccaaattaaccaaagtagtgatatcttattaatttctatatataatgatgattgttttcagcattattatttgtcgcaccaaattaataatgtatatatcaaaggtaatctctttttgcagcaattatataattcatagttatactaaaggacatcaacaaaagaaatatcatcacgaagaattagatgttatggtagcttattttaatctatgtcgcaagttgatggatttcatcaacttgatcatagaagaagaagatcaagatattggtgtgtcaataattagagttggccaagtctttggactattcaaattaattcttgatgaagaattaagagagctagataataatgttaaggtggttgataaggtgttgttggtattgaatgacttgatcaaaattaaaaaagtaaaccctatttatagtgtgaccgttgcttgtgaatttactcatcttgtttatagattttgttcactaattatgaatttggaagaaattgccaagcgcattgatgatggtgatgatgatgattcaattgcttttgatcttcgtagatggaaccaaaaattggattggatttggaaaaagatcgagaatcttcagaggattaaaatacatacaagtctaaatctaaaatagataaattgtattgtttcaatttagtttgttttttattcaactttatataaatctttgggtagtaatttcttttttgaatttaatgaccaaaatctttattgatgaaaagtgtgagaagtatattggtcaccataatacaagaaagaaaatttttccaactatgtaattgcattttttatctgtattatacatttaataaagtaaaatgcaacaaaatcacacatacactcaataagatcagataataaggatttaaaattcttaaaacacaaccagaaaaagaaagagtagtagagttatatccactagaaagtcaagctctatgaattcaaagaagaaaggctagctgacaagaaagcatctctgttacacaaagcggaaaaggaactttcattttagaccaaattaaaaataagcgatatacatactctgcaaaaaccaattttcttcaagatataattctttacttgaacctcatca

SEQ ID NO: 162452 - DNA, 1926 bp, Cannabis sativa
  modified_base (1828)..(1835): a, c, t, g, unknown or other
tacgaatcgatcagagccaccgtctcgtcgtgagaccagcacggcggaggaagccgccgcgaggaagacggcggagttggctggacctgagctagaggcgtcggttgggtctgaaccgtcgaggaagacggcggcggagcgggtaacgccagtggaatggcttgaggagggcccaatggaagaggggattccggtggcgacgatggggaggccatgaccggatctcagttataaaagaaaggcgtattttaagagaagagccggctcacgttagatcgaaagagaaaaagatgtaaaagaaaagagagaaataaaaaaaagagagcgagagagagagagagaatggtgggtggcggcgaggtgtagtggggatttggtcttaggtaaatggtaggttaaggagggggggtggtgaaggataagggaggcggcgcacaatagtagggggaggaaggtggttgttggtgtggtggagggataaggttgagagtaggataaagaagagagagaaagagagtgagagaaaaagtggtggtggatggaggggagagagagagagatagaggcgtttggtgacatgtttttgggggtttgggccgtgtttgggttaaaaagttaaaaaggcaaagtgagtgagtggaggagcaagggaggagtgtgcggctgattttgagatcttcttttggatgatgaatgggatgaatgaggccaccggttaggtgggggtgggcgattgaggtgcgtgtgctaaaatgcgcccggcccatggtaacctgcgcacagccaatacacaacaaccaccaaacagccttctctcctctctcacgaggtggggaggtccacacctctgacttttttggccattatagggtcgtcatcaatattgaatgaatagtggatatagttctttttttttctctttgataatgtccaccgcctcaggtaatggggtttttggaaattgggtatgtgaaatgtgatgtgttttttcttttctttttttttttaaaaaattatatttttttattattattttatattttgctgttttggagttgaatatgggcatggtgtggtggtggtgggattcggctgtttagtttatggtgattttggtttggtttttgtctttttgaccagatggggcaacatggggtgggtggggtgtggttgtggtggtagagtggtatggtagtttatgcagcttttttttttttttttttgagagttattaaagatagacaacaaaacaaacactaggcatctattacttttgggatagtctcctaaaaaaaaagtgagccaaattgagtaaatgagtgtatggtaccagtttttttttatagaaaggtctacaactagttatcactagctttctaattaaacaaaattggacttgcgaagtccctcacctcattttgagttgtgtaacacttttagtgagacaaataaggttttataattaaaaagtcttttaacttcttaaacccggttttttaacaggataatacaaatttatttgtcaaataaataatttacaaaataaaatatataatttcataggactagtagtataaatatatattttggtgagatcatgtattttcacttaagtgatatgttttcagatagataaagaatgtattagtatgttttatataacaacacaattgtatttgattatgtgttttctcattagtcattacatagtttttgatgattaataacaaagtaattcgtttgaattactcttgaattgctatataatttaaatgcccaaaagtataatacatatatatttgggtatactcttaggtggcgtttggtnnnnnnnnatgaaatggaatggaatggaaaagaaacaattttcatttcattcatttgtttggttgcattttaaagtattggaatgacattccaatggaa

SEQ ID NO: 162453 - DNA, 2662 bp, Cannabis sativa
ttaagaaaaaattcaaattgtatatatgttgataagcctattaaggattaaggaaacaaaaagtattatgaattaaggggccttcaatatgtggttggttgcttatatttcaagtttttttctttttggtaataatttgaagagtttttttattaatttatttgaattggaattgggacatgttatggttgaggcctcgtgggattggaaggctaataatatgttctttggttgataagttactctatctgttcacctttttcttattttgcactttttaatttatttaatcgtattttggaagtaaaggattctgttttgtgaagatatcttaatatatctttatgacagttctttagttcttctatgtaactttcagcatgttcttttttatccttttctttctttagttttggaatcatttaatccaagcttattagctaaaacacaaatcactttattaagcttttgagactgaattaactgatgattctttctttctttggcaagactataaatgattctaaaatatgggtttattaagatttttacccaacgaaatttgatatgtattaaattgtatccccgaacttttcagattggtaaaatatgtgtttagtgtagttgttgagcattggcattttggtggtccatatggttatgagattcacctgcaaattcttaccctttcccagactttttcttttagtttttctttgatttatttgtcacttaacattcgtatggttgaagttgaatgtttcatatttttgatatatactaaattgcgcccccaaatttttcagcggttaaaatatgtgttcagtgtagttgttgagcattggcattttggttgtccatatggttatgaaattcaattgcaaattcttaccttttctttgatttatttgtcacttaacattcatatggttgaactgagtattttttccttgtttattggagagaattaaacattgtgtctgtttcgtatctttgatttttacaggaacaagacgaaaattgttgaagccggagcattagaaccaataatcagtttcttaacctccgaaaattcgaatctacaggagtatgcagctgcttctttgcttactttatctgcttccgcaaataacaagccagttattggtgcttccggggcgattcctctacttgtcgaaacccttaaacatgggagctcacaagccaaggttgatgctgtaatggcactttcgaatctctctacatatcccaacaacctcagcaccattctagaatcaaaaccggtcccatccatcattagtttgcttaaaagctgtaagaaatcttcaaagcctgctgaaaaatgctgcgctctgatagaatctttggtgagtttcgacgagggaagatctgccttaacgtctgaagagggtggagttcttgcagttatcgaggtgctcgaaaacggctctcttcagagccgtgaacacgctgtcggtgccttactgacaatgtgtcaaagtgaccgttgtaaatacagggaaccgattctgaaagaaggagtaatcccgggacttcttgaactaacagtacaaggaacaccgaaatctcagtcaaaagcacaaacccttttgaggttactaagggactctccgtacccgagatctgaactcgaaccagacactctagagaatatcgtgtgcaacattatctcgcagatcgatggagacgaacaatctggaaaagctaagaagatgctagccgagatggtgcaagttagcatggagcaaagcttgagacatttacagcaaagggctctggtatgcacaccaaccgatttacctatcaatgctagttgtacttctgaagtttcctcaaagtaactgtttttttttattttcatgatgttttgtgatatatatatatatattaagttgtctatagaaaaaacgaaccatccctcttgataaaaatgaaactatagtgatataaagtaagagatgccagtccaggcctttgtggtggtgtcgagtgactggtgagtgtcaataaaattatgtttatgtcagtttgttttgtgtttgtaaagaaaacttgttgttgtatcaaattatgaaattcgagggcttgtgtcgtttttgttttagtatataatctcaaacacaattctctatgatagggtttaagtttcagactattgattatgagtatttgaagtcaaaagatgacttttgtatcatattatattgattattcgtttaagattttaatgacttaggagtggacaagacaattaagtttcatgactttcttttcttatccttctaataataaataactgtcaattgttgggtttccacctaatctaatctgacttttaatttcaaataaagggttatgattgttaagttgggtaaccccatattatttaaaaactccattgattatttcaattttgagaaagttaatccatttgattaatttgtatatacatgttattaattgatgttattgtaagatctaatactaatacatttacaataagtcataaaagagggcacataacactaataagtcaaaattttgcattcgaccggagttagctgaagcaattggagttcgagaggctcttagttggattaaagataagcaatggccgaatgtgatcttagaaactgattgt

SEQ ID NO: 162454 - DNA, 6247 bp, Cannabis sativa
aattctttgttttctcattctgcgccattagtagataattgataatcgaagtagattgattactttactctatgtttttttttttttgttttttaatgattttctgtggccaaacagggtttttagggtttcatttctggtaattttggatttggaggatttgatttgatttgtggattttttttgtttttggaataggagttgttaaatttcgatgggtaaaggaggtgaaactcatggtgttggatcgttgaatgaggagattttcccggcttggtcgaaggatgttcgagaatgtgaggagaaatttgaggtgagtcaagaatttggattgtcgttcgatgaggtcgagaagcgacgggagaggtatggattgaacgaattggagaagcatgagggtcaatctatttggaagcttcttattgatcagtttaatgatactctggtgaggattcttttggctgcggctgttatttcttttgttcttgcttggtatgatggggacgaagggggtgaaatggagatcacggcttttgtggagcctcttgtgatctttttgatattgattgtgaatgccattgttggaatttggcaagaaagcaatgctgaaaaggcattggaagctttgaaggaaattcagtccgagcatgctagtgttattcgtgatggtagaaaggtgcctagtttgcctgccaaggagcttgtgcctggtgatattgtggagttgagggttggtgataaggtgcctgctgatatgagagttttgagattgattagctcaactgttcgagttgagcaggggtcattgacaggagagagtgaagctgttagcaaaacggttaaacctgttcctgaaaattctgatattcagggaaagaaatgtatggtttttgctgggacaactattgtaaatgggaattgtatttgcatggtaattcaaacagggatgaattctgagataggaaaagtgcatttgcagatccatgaagctgcccagaatgaagaagataccccattgaagaaaaagttgaatgaatttggggaagctttgacgatgataataggattggtttgtgtattagtttggcttatcaatgtaaagtactttctcacctgggaatatgttgatgggtggccaagaaattttaagttttcatttgagaaatgtacttattactttgagattgctgtggcactggctgtggctgcaattccagaaggtctgcctgcagttatcacaacttgtttggcccttggcacacgtaagatggcacaaaagaatgcccttgtccggaagttgcctagtgtcgagacccttggttgtacaacagttatctgctccgacaaaactgggactttgacaacaaatcagatggctgtggctaagcttgtagcaattggttctagggtcggtactcttcgagccttcaatgtggaaggaacaacatatagccctattgatggaaagatacaagactggccattgggtaggatggatgctaatcttcagacaattgcgaagattgctgcattgtgtaatgattctggtgttgaacaagctggcaaccattttgtggccaatggactgccaactgaggcagcattgaaggtaaaatggaaatatagtttgcaattccttgcttctttattatttatttattcatttttattagagtattgttaatttcttgtaatacttgtataggtttttttcctttttcttcttgtctctctctttcgttaaaagttctggaaaaagtaaacaaatcatggtattataaatcatatgcttggtcttctcttaggtccctaccttgattggatttagcctccattcttcatgtgattttcttaggcggcgcatgaattggcttagtcgtaaccagtagactcttttattttacttccatatatttagttattggctacttgttgcatactcacacaaaggagtcctttattctgcaacgtgtttatgaatgtgtattcattgctatagatcaccgctcaatcattctgtattcattactatatagatcattccctaattttctgtgaaagatgctaaaaaaatcttttttattatggattttttttcatcatatttctttgttttttcaggttctcgttgaaaagatgggactccctgaagggttaaatgctggttcaacttcaaacggtgatgctctacgtaagtttcttagctgagccactcataatttgatacttttgttttcttggatgctaagctactttttgttggtacttctaggctgttgccaagtatggaagaatgctgaggaacggattgcaacccttgagtttgaccgtgatcgtaaatccatgggagtcatcgtcaattctaggtcaggaacaaaatccttactagtcaaggtatgctatctactgtctccttggtcacttgtattgactattgatttctcatttagtttaaatcatttattgatggctaatccactctatgtattctcctttaccacttaaccccctccctaaatagtaaaaggaccttaaacatctcactagtatcttgccaaacgatgaaaatttaaccctgattggaactttaactgtttttttctcctgacatgacaatgtcacttgttaatgtttggggatttatttttgaattgttttgttttgtaattgttctcgactttactgcttgtttgattctattcaattattgtggcagggtgctgtggaaaatttattggaaagaagcacatatattcagctggctgatggtacaataaaaccattggaccaaaacataagggatcttattttagaaagtcttcatgaaatgtcaacaagtgcattacgatgcttgggttttgcatacaaggaagacctggcggatttttccacttataacggtgatgaagatcatgaagctcaccagcttctacttaatccagcaaattaccctcaaattgagagtcaacttacttttgttggtcttgttgggataagggtgagttcgcactgtgtttagctgttggaaatgtatttttaattttcgctacattttttcactcaaaataatgaccatttaatgttacttgtgactttaaaggaccctcctagaaaagaggttcgtcaagcaattgaggactgcagggctgctggaattcgtgtaatggttattacaggagataataaaaatactgctgaaactatttgtcgagagataggtgtatttggggctcatgaagatattagttctagaagcataaccggaaaagacttcatggagcatcatgatccaaaaaactttttaagacaaagtggagggctcttgttctctagggctgaaccaagacacaaacaagatattgtgaggttgcttaaagaagatggggaagtagttgcaatgactggtgatggagtaaatgatgcgcctgctctaaaattggctgacataggaattgctatgggaattgcagggacagaggtacgtttactcagatggctttgtttttgtttttttggtcttttaattgtttgttgctcttttaatgttgctttgaccgttgctgaaccactaattgcaggttgcaaaggaagcctctgatatggttttagcagatgataacttcagtactatagttgctgctgtcggtgaaggaagatctatttacaacaacatgaaggcctttatcaggtttacttcttctctatttatgtctgacagatttcctcactctttaattcaacccaattgccaagaagaaattgttttaaaaaatctacatataaactctaaaaaagagtattcattggctcttggttttaatggaattttctgaaaggtcagagctctaacatacactcgtgacccagaaaaatcgataacgtaaaacataagcctcttttgacacattcggagatgactagtattttaagacatctcccgtagaatcccttcatgtgcttagcctatgaagcaaagacagaaaaattgataaagtgaaacataagcttctggatacatgtggtatagggtaactttttactagataaagcatccattcggtggttgaattcattaatgatacatttatgaagtttgattttgaaggacctcactaattataaaattgtcattattactgtattgattcccctgtatcctcctttttactaaatgtcacgcaggtatatgatttcctcaaatattggggaagttgcttcaatatttctaacagctgctctgggcattccggagggcatgatccctgttcagcttctctgggtcaatcttgttaccgatggacccccagcaactgctttgggatttaatcctccagacaaagacataatgaagaaaccccctagaagaagcgatgactccttgatcagtgcatggattctattccgttatctggtactaataaactagctcatctctcttgcttagtttacttcagttgagtttggaattagcttgtacttaccatgaaaatcttttcaactaatgcattctttgtcgcgttgcaggtcataggcctctacgtcggaatagctacagttggtgtgttcattatctggttcacacacagctcgtttttgggcattgacttgaggggagatggccatactcttgtcacctactctcagctcgcaaactggggacaatgccgtacatgggagggattttctgtctctcctttcacagcagggtctctggagttcaactttgactccaatccatgtgactacttccagtcaggcaagattaaagcttcaactctgtccctctcagttttggtcgccattgagatgttcaactccctcaatgccttgtctgaggatggcagcctcgtcaccatgccgccttgggtcaatccatggctgcttctggcaatgtctgtttccttcggcttgcactttctgattctctacgtcccattccttgcacaagtcttcggcatcgttccactcagcctgaacgaatggcttttggtgttgatggttgcgttgccagtaatactgatcgatgaaatcctcaagttcatcgggaggtgtacaagtgactggaggtattccgttacaaggaaaactacaaagcgcaaagcggagtgagtttttgttgttgggggaaaaaatcagacaatctttgaaataggttataatttgtcttggtcctgttgtaaccttcattattttgaatctgagggattatttggacttttaaagatctagctagaatttagatcgtcggagatataattattaattaaagttccgtttcactagaatggtacactgaacgaaaaccaaaaatctgttccttaaatttgagacattttatataaaaatagcatgcgctgacatcgtaacaaaacaaaagaacactactttattaactattcagcaatgctatcaagagaacctcaaaaaaattttatgtacccatatcataatattgacacgaaactgctttaaaaaaaaaaaggcagtccatacataagaaaaatgaaagagatgaatatttttattattattattattattattttctatggtgaaaaggtggtatttgggtagaataaatgaaatcaaatttaaaatacatataaaaattattattaaatttttttttcttctattttaaaatgtactaatcattttattgaaatgatattctaatactttaaatttaaaatgcaactaaataaaaaatagaataaagttattttctttctattttatttcatttttttaccttcaaccaaacatcattgctgatagtatgaacttgtcaactaattttttttggtcgaaaaatcaaaatctaacttcaaaactcagaaataagatcaaaatgagatttcaaagcggagagaaaactatctttctattgctttcaatgtgtggattacaaaattgattttccaatctcttctcagatttataagctttaatggcctggtagataataatgctttcaaaagacatagtgacatccatggtctgccaattgcaggttgcaggaggtggccttgtactgtgtacctttatctagtgttaggtggtcctgggtcgcaggagtggtggttagtgtgtacccttggtcaggttgtcaaatcttgcaggtgtaatgccttctctatgttatattattttataatataataataaagtagattaaaatgtgataaatatatgtgaataatatatattaagtgtatggtaaataaatgtgtaacctatgatttta

SEQ ID NO: 162455 - DNA, 2016 bp, Cannabis sativa
  modified_base (1973)..(1991): a, c, t, g, unknown or other
gaagaccttatcagatttgcagatagaagtggatacctcgatcgaaccttaaataggaagaagaggagatttcttgaagctaaagcagtcatatcccctttccatgcagaatatgaatcatcgtgttaatagccttaataatggctatcgtctcagttcccaacactcgcacccccaatttgatccaaatcccctcccacaaccatctcaagatacaattattacaaataaaagggaggaatgtcaaaagacttccaagtgtaatgagttgatcaaatgacaaggaaagaaaaatatttaatggtagcagagtaattaataagagatttaacaagggaaaatacctgataagaatcattaagaaaactattaatgcaagagggaagtgaagagagacttggggcagaagaacgaaaggattggatattttgaatgtttgaaccttgtactagaatatttgaaaatgtatattaagattaattatgttaaaataacatgaaagtgtaaattgtagaacaatatgattgtaaactgaactaaatatataaaattttcctaaatttagcttaaagtaataattgatatgtagtcttaactatatgtttataaacttgctacaattttatttcatctgtttgagacttgagttgacacatcaaatcctacaaaatattttaatacaaattcaccgtttactgatcattttttggaagggtattgataattacttaaatattacaagtttttcgtagaaaaaaaaaattgcaagttttagaatgtggttcatggaaaattgttgttgtggatggtagaaccaacttaaataaataaaaaagaaaaacagagaagatataagacaaatgacacttaatagtagaccttgtttgagttgtacgttatgaacaaaaaatatccaaatatatatatttgattatttgtatggttggattggttggttggtagatagatattttgtttgatggataagcattgaaaacaatagcttatttgttcaaaagtatcactacactaaaaaaaaattgtacatctaattattaatgagggtaaaattgatatattcaacaaagaggagggtacaatgggaaataagtattgcaagtgacatatttggacaactcattgacttggggaaaatagataaataagagcatgatgagatttgaatttgttggtttctttaagggcggggacttattttattttgaattaagactatacttaatagcttggactaggactagtctatgaggactatgtctcaattttttaagttatatatttgtatacatgtagcatgttactatggctaggactaggtctcaatttttattattttcttgaaatgtactaggtctcaatttaataatacataagacgattccatttaaaataataataataaataataaagataattacagcaaaaatctctaaaaatttaagattgatgtagattagtgtccaaactcaaaaattggcagtaatagtccttaaagtcaagttttctgtaagtccgttagtccctttttctaacggatccgttaaatccaaataaaatagcacgtgttaaatttttattggtctaaataataatttcaattaaaatcttttaaaataataaaaaaaaaaaactaaaaaaaaattattttaaaatcatgaaacagcttttttttttcttcttttgtttttcctcttggtcttctacctctcgctactcccttgcccatcccattttgattcttctttcagcctgccacacaatacccatcctcaaattttgctatatataatagatccaaatatatattagtgtagaaaaaaaaaatacagtaaagagtcaaaatgttcttcttccagtcccagtaaacccaaacccattcccagtaaaaaaaacccgaaatggtaaatcaaattcccattctcaaagttttgtctaattttagtaaaaaaannnnnnnnnnnnnnnnnnntcagggagcatgatttagtacatat

SEQ ID NO: 162456 - DNA, 3300 bp, Cannabis sativa
agagagagagagagagactgagtgagctgaggatatatagtgtgcgattgagagaactggggaggagaagggtggtcgacggtggtaagagccccaccggtgctggggagagagaaggtgcagctaagagagaaggtgcggctgagagagaatggtgtggctgagaagagagaagggtgcggctgagtattatgtgtttagaaaatttaagattttttatttataaggaaagagaaataatgagagaataaaatgagaaatatagagagaataattgaagcttagtaatatatatatatatatatattttatgaaatctagcatttgttttttttaaaaaataataatttaaggttattatacagtgacatgccaagaatgtcacgatacatttacccaatcacacatgtcgcgtcactataagttaacaatttttttaaaaaaaagtaatagtaattatgggaattactctacagtgactcttcatatttttagtgacacgtattgtaggacactaacattaaatttttagagtctttttgtgtgtgtcactgaaactcaccgctaactttttagtgacccgcacaaaagtacgtgtcactaaagtgtgtcactaaagcatatttttgtaataatgctaggtttcactattattttttctagaaaataacgtaaaccaatattggggcacaggattttttatgtaattttaattttctaaaaattgttttttatgtaaattatttttatgatgtaatgctcatgaagcacggagctcaagtttgaacgaaccccagccatgtattacatctacaaccgccaccaccattagctcaagtaatttgaccccaacttgcatgatgtcgatcaccttccgtggtctttggtctcatgctcatgagttagtaggtctgcatgcatggagacgttaaggacgtttaacgtctcgattgttttcaccaccccagacctccatggtctcactcctctaggtagtgacgaacctcgacaagggccgatcagtcctccctcatgctctcgttgatgtcatagcttctcatagagcaatagttagggatttgaatcctatttgatcttatgcgaatggatagacccattatgggtcttcgggtcttgtgacccgtgtatgtggataaagggacggtggtccttgttcgtactatggctggagaagatgactcgtgagggttatggccctattaccgtccgacgatgacgaactgtgagggctcgggtcttgatgacttgtttatcacatgcgccattctgattcaatttctcctgtgcccatttgacctgtggcctaccatggccaccgtggccatggtggctctcggagcagccgaccacgggggaccatggtggtcgaattcccatacccgagtataatatatatacacgtatataaatgtatatctatgtgtgtatataatatatgatatatgtaatatgtatgatatatattacatatggtgcatacataggtgtttccacaaaaagtagccataatgacatggacatcaaggtttgacacatgacaagaaagatgacatctcagagttaagtagtcccgagttatagtaagtcgacctgggaggattccgtaaccctacgcccaggttaactttgggaactctgggatggaagttctgacttcgataactcgtttccaactcactatcatttagtttgtaccatgaagacatggagcaatcaaatccaagccttaggagctaaaattacatgaacatgcacctcggaagccaacctcggcacctagggtttcacccaatgcctaggttaacattcccaactatggttttagtttttgggaccgtcttagtaaaaatgggtcaaactttacattcagacatgaactagacatagcacaaacatgttttaggaatctgattagattcgaagcaagttcatttttgtgcattgggtgccttccaagtattagattgactatccgacttttaaatcatctttgtttttatcaaaacaagatggtttctcgtcaatacatgaattgatagtttgtacatccttgtctcgcttaataccatacagtcgatgagttatgaatatactctatttattcaatatttaatgagttttttctttttgcatttaatgacataattatcattatatctgttggttcatatttcacgagattgacacgtgtcactttctgaagtacaactgaatttcaggtataacagtaactgagtccaccataattggatttcccagttgcccaataattttgaaaagagatttctctcctcagtatgttagctcaagattctccagttgtacccaaatgggtatgacatttaggtcctccttcctgaaattgacattcaggtcccaggctttcattataacatggagtttgttgaagaaaatgtatcctccattaaccacaacatccctattttcttttgttgtgaacctaatgagaaagattccatatgaaatcattcccacttttgtccaccttctccttccacactcgcctagcaaatccatcaattatggataatggacagttggctcccaatacgtagcatacaattgatgaattccaaaaattgatctcttcctttatgtcctccatagtaattctaaccttttctttcccatattgcataaaagaattatcaagatttcgctgtacacttctagatctcgaaattggaggaacagagttcttaccttgtgcaatagcactgttacattggatgtttgcatccaagaatgctgcaaaatctgctcaaatctcctccaggtattgaattgatctcagtgatgatttaggtgttagtggagcttggaaaatgtcctcagctggtccgaaatcttcgctccactaccagttcctttcccttcaatatcatcctcatccatgaaatttattggcttaatacaaagaatcgaatctatagacttcgttttcttaatatcagttgtagatgttggtcccctcttacgagttttctttgatttcgtaacaatttgttatctcccgttcaccttggatcttgtctttgccatggcaccaactcaagagctgcaagagcaaagagctagagagaagtttggaattcatgaaaaaaaaattaatagtcaataaagttcaagagatataatttattattgttatacccgaaagtcagctatcgtttcaaaggaggacacgtgtcaaattaaggaggatatgaattaatgaatgtaacggtaatcacgtttgaaaatggaataacttattaa

SEQ ID NO: 162457 - DNA, 4842 bp, Cannabis sativa
agggctatggagtaagaataccagactgaggaaaaaatatgattggagccacaaaagcaagttagaaatttttttggccccaatcatggactatctaggaccaagacacaagcaaacaacaccaacacctccaagactaatggaaaatacaagaaaatgacaaactgaaattcaaatgaagaaaaccaagggtttttctttcaaatgtgatgctaaaaggtttagagggcatgcatgcaaggataaacaactacgttgagaaggaggaagaacaaccagaagggtaggagacttcacactacggctcaattggctgaagtagaggatcagacattgtactcaacatagtagcaggtttaccatctcccaaaacacaaaggttgaaggatcagatagacaaccaagaacttgtcatccttattgacactgaagcaactcacaattttgtttctcaagatctggttcacaagtttcatattccaagttaagagagaaaattatggagtaaatgggaatgggagaaaaagttctaaggaatgggatatgcaaagacatcatgtcgctagtacaaggattaagaatttcgaaaggtttctagctgccgaaactgggcaattcaaatgtcagtttgggcttacaatggttcgaaacgactcacatggattggagaccttgacctaactcaatcattggtgccttgataaaaccacttctcttgagtatcgatttcagcaagcatgcaatggaacaatatttgtaaaataaaacaagtgtagtaggaaacaataagcctatttagccatagctttcattgtatttcgaagaaggaattacagcaacaaaagggaatggtccttcaggaccattgatgttgagaatgatctatgttccttgcataatctcaccaactctcttacccacctatacacaatcctatccccactcaaagaccctactcagtacaattgagtcctatccttttttattgcctacactcttccaaacccttctgatcctagggtccaacattaccggctgccaaaactaagcaacagacgagttctttgcaactaagtgaaggcataaagaatacaaacccgagatagagagttgagcgtttcatgggcatcttcaattcctaatattgtttggtgtgctctctccctctatcaaaaatccatcgaagggctttgagcatttatttcttcaatatctaattacccgtagcaaaatgctgctctccatgaacccaacaagcaccaaacaaagaaggaacagaaggtacataaaaagaaggaacagaaggtacataaatgatgaggcaagcattcaaagctagacacaaggtttggagtaaaggacttggtgtagtcacgacccctccataatgtgcgaaggtacggctagcaccagccttccgccttggattgttctgcgatgcaagtcaaaagttgtatcccaaccaatcgttcacatggagtgaagtctgagaggaagactcgtgtacaagagagttgaccctttacgtggagaaggaatagttaaatggccttttgaaggttccatatgcccagctcactaattgtagtagttaattttagggtttcacttatctaggtttagaagaaactatcaaatggacttgggggtcacattggactagcccattcacttgagtaattggggtaacgtatttgatgatgtgggccaaatctgaaacataagtgggttgttttgatattttcatatatggaccatatatattttattattattactattaatttaattactaaacacaacatttacctaattacgcaaactttatcatggagttaaggcttcatagctgctaaggttaatatacgtgatattatcttatataggtcatcgttgaaacaagagtaagtatgttggacttgggccttaagcgatagggttttactcaacccttggaggaaatcacacttcctaggaaacgaccttcgtggactatggtactcgtaccttctccaacatcaaaatcaaccatctcgtcgatggcaatgaacccacggaagttatcttaaaccccttcgccattgaagcaatttatttggtccctaatagtgacgacttctccatcttggtgatggttccttctgtcggcaacaacaccatcctaaaagccttgcagctctccccctaaccttgttgttgacttgctgatctatcttcatcttctatcaatgggagtttcccaagaccattcgagttccaacttgcacacactcctcgtcactataaatgcaaacaacctgtttttgagatggaacaaaagctatgaacagaggttcaaagttcaaatcgtcaaatagttatgtaataagagagtagggttgctgcttatactctacatcaattagcacacccaccgaaagctcaacctaaaccaacccataagagagattcaacagtttttcggcaccaccgcgaatactacgaatgagggtagtaaccttacttgcccaagaagtgcatgattgattcacttattcatatgttctaacctttgcgtaactcttcaaaacacggatgccggatgccacaaattcaatctcgactccattcgccgaacgtaaacagggaatgagttctctaataccaattaaacaaaccacttcacttgagtaccgatttcagcaagcaaacagtaggaaaagcaatagaacagtagggaaaatcaagctatttcaacctacttttgagatggaacggaagccgtgaacagcgatgcaaagctcatatcgtcaaatggttatgggataggggagtagggtttctgcttgtactcaagccttgcatcaatcaacacacccaacaaatgctcaacctggaccaaccaatcagagagattcagcagtgtttcatcaccaccacaaatactacgaatgaggcgtagcgtagtatcctcacttgcctaagaagtatttggtccattcactccttcacttgttttagcatttgagtaactcttccagccaaagatgtcacagattctacctcgactccatttgtcaaacgtaaattggcaacaagtgctctgataccaattgaaacgaaccacttctcttgagtaccaaatttagcaagcaaacagtaggaaatcataggagaataactgtagggaaaaccaagtcatttcaaccatgactttcattgtatttctaaaagaaggaattttcatagaaggaattacatgaggaaagggaatgatccttccaggtcagtgatgttgagaatgatgtctattcttgcataatcccaacttttttgcccacccatgtaaactatcctatccccactcaaaagactctcctaaaatacaatgaatcataccctcttttatttgtacactcttccacaccctactaatcctagggtcgaacatgcacataaagaaatttatgaagaccattaaataaaaaaagatggggtacacagtgcagcagaataatgtgaggaaatcccctaggacaaccaagaaacaccaaaatttctacgagtttcaggatgtttatcagccaccaaaagaattacaatctttaagaggaaatgaacactcaacactcaaagaaggcaccaatcccattagtgcacgaccctatcattatcctcattttcaaaaggcagatactgaaaaaatattagctaagatgatagagggtaagctttcaaagaagtggcagaaccccaaaggaaaggttagagtttgttcactccgatgtttgtggaccaacaactacttcatccattgctgggaaatactacttcgtaacttctatcgatgatcacttttatggctttactttctcaaacataagtcgaaagtgtttgaggcttttaagaaatggaaaccagtgattgaaaatgagataggtttaaagattaaaaagttcagaaccaacaatggtggcgaatatgaagacaacacattaaaaaaattttgctatgtacacgaaaacagaatgaagagaattgtgtcaagcacaccttagcataatggtagagttgagcatatgaatcaaacattaaccaaaattatgtgtatacagtgtctggcctaataaagaagtttcaggcaaaatcggtaaaacacaacaacttacttgatcaatcgaggcccattagagtacaaaacattagaagaggtgtggaacgggaaagagttaaaactatcacatctaagcaaaatttggttgtgtagcctatgtggatattcatattagtgattaaggaaggaataagcttgactggcaattcatgaatgagaagatcaagagaagaatcatgagtaacttgtgtttttaacaaagccaagtgcagttgataaattgatcaaagacatattaacatgatggggaaaatgatatctaacgataggtcgtttgaaagatataacatcagcggtagataaagacccaccattaatgttagatcaaacatacatcaccatagcaaaactcataattgcgagtgtactaaagcatgttgattataactgtaatatttatgatatcacaaaacaatactaacaaacatggagatctaagagcactcccgacaacttctcatctccatcagtacaaatacatcaccaaaaccccccacattaaatattttatctcaatttttacattacaccatacatcaacttctttaaaatacatcaacttctttaaaataaatataaatcaacaaaacctcacttttatcaagttttttatatattttattcattgcaaatatataatattaatatacatttagagtaataaatagtattctatataatgtagagca

SEQ ID NO: 162458 - DNA, 3069 bp, Cannabis sativa
tggttctcttttaatctattttttttctagcccctatttgagaagtgttatgagccttatttttctaagtgtataatttttttgtttaaattttgatattctgttatattttttgctttcctcctagagaggataacattgtaatgtaaaactaataaccgttaaaaaagaatagggttagatagttactttttggtcaatctaaaagtggttattcactctagaaataatgttaatgagtaataggcaaataaaactttatttataatattattttgaaagttatagacatacaaatttggcctatcatttgaaaaattttaatatgagatttcaaattgtttatctagtttgtttagactgagtcattttttacccaaatatatttataattgtcttaattataggtagtcaaagtgattctagaactaatttcggccccaaaaccaagctccaacgacccaagaaaaaaagagcttcaagagttggagaatcaaaaagtcgagattgacgagagggtcgagtccatgatccgaaaggagttgtggtgcggtctgccttacctaatatttcttcttccttgttttattttctctaaatttgtttccttcttatacataattatttataattcatatttattttttttttctctattttctagttttgtaaaattatgattatgatatgagaggtcttagaaagcttttaatttgatactaatttttttggtgttctgttatgttgtggttcttgttggtttgtgttagagcaagtttgtactataatatatgttaagtgtaagagatttcttgttagtgcataaaagtgttgttatacaaaatgatattatgttatttaaacatttgttgacaacagccgcatggaatatattgtatttactgttatataaaattattatgtatttaatttattttgttttatatatttactgttatataaaattattttaaaaattaaaaatgcaggtaggaaaaattgtatggaaatctgtaattttctttaccttatatttatacttcattttataaccgaacgcaataggtaaaaaaaaaatatttgagcaacttatacgtcatttaaaaactgacggtataagtttttagtgacggtttctaattggcacaaatgattttgtgtcatttctaaactgacggagaatattaaaaagaacattgtatattttgtgtcggtttcaaaatgaagagaattgttatttgcgtcacttaagaaacgacgcaaataaaatctatttgcgactacagcatatacgtcgattttatagaccgacgcaaaaactatatatgtcacttagaaaccgacgaaaatacctctttttgtagtagtgagagtaacacgaaaaatgaatgaaagcattactcaatagagtagcttagccctttatttatacacagagattatacaagaggatccaaagcaaaatagaaatgtaacagcattaacagaagtagttaagtatcccaactaacttaaccactaactaataaacccgtgttagctaacagagcctaaaacatgcttaatttccccctcaaacgaaaaggtgtctcagacatcttgagtttggatcgaaggtacaaaaatctctttgttgacaagggctttgtgagtacatatgcaacttgatctatggctggtacttatcgaacagacagtttcttggacagtatgtgctccctaacaaaatgcatgtcaatctcaatatatttggacatggcatgaaacacgggatttgttacagtggcacactttgattatccacccataggacagggcaagagggagcagtgatttgaagttctaaaagtaaggacataagccatttgatttttgcagcagcattcgcaagagatctgaattcacttttagagcttgatctggccactacattctatttctttgctgaaaccaagttccctccaaaaaacattgcataaccacctgtactcttcctgtcatcaacacatgatgcctaatcagcatcagagtatccctcaagaattaaataggttgttggtgtgatatgaagaccatgggagatagtgcctttgagatacctcatcaactttttgtaggccttccagtgggtgttatttggagcatgaatgaactgacttagcttgtttatgataaaagctacatcaggtttgatcaaggtaagatattgaagggcccccaatgtgtttctgtacaatgtcttatcaataaatggttctagctccttccttaagggagagtttgatattggcactagtaggccaatttcaattatcaatatccatggggagcttcacaagtaggccagagatatatttggtttgtgagagatacatcccagtagaatctctgtagatttccacacccaggaaatagtgaacaaggcctaagtcctttaaagaaaatgacttatttaagttaagaacaaatttgttgatgagctttatgttgggacctataattacaaagtcatcaacataaattagtaaaattattgggtttgcaccagctccataagtgaataatgaagtatctgatttgaagagtgtgaatccccattgtaatagggtgttctttagtgtttcgttccaatcacttagagcttgtttgagcccataaagagccttgtgtagtttacagacatgagtaggtctagactcatccacaaaaccttctggttgattcatatacacaatctcctgtaagttgccattcaaaaaggcatttcttattttggatttttgtgccctaactaaaactctatttcaatgtaatcttgaatattcaattatcaataaaggaacaaaattattttattacttatttaatatattgcttggttcacatgtttatttcatgatcatttatttgatttataaattcatattaatccttatcacattgttattcatgattgatgtgatgtctacacagtggaaagtaatcaagattatgtgattaaatatagtcccacgatttatcagtacataggatttccactgatacgataatcaacaatatagtttactt

SEQ ID NO: 162459 - DNA, 3956 bp, Cannabis sativa
  modified_base (3857)..(3861): a, c, t, g, unknown or other
  modified_base (3909)..(3921): a, c, t, g, unknown or other
gtcattaataataatctgttttacagaagagaaaattgtaaacaacttggcaagattcgtagtaatcatatggcttttcgtggtgttaattcttactcaaagttacacagctagtcttacatcacaccttacagtccaacaactccaaccaacagttactggtgtagaccaactcatcaagaacaatgagacagttggctacattgatggctcttttgttcatgggattttgagaaatcttggttttagtgagtctcaactcaagatttacgagtctcctgaagaatgtgaccaactattttccaagaaaaagtctgatggaggtatagcagctgcttttgatgaattcccttatacaaagttacttcttgccaaatattgctccaaatatactatggttgaaccaagctttaaaaccggtggatttggctttgtaagtaacactcaaattcttatactactaactttaatgaatgaaaaaaaaaaattgataaaaaatgtttcttttttcatcttgcattatttcatgaaattgtaagtaacattctattactttaacatatacccttattaatttatttagcattaatatataaattattataagtatctttgtacaaatatgatccttcttacatatatgtttttttatatatatttttactaattaagttataaatcattcatgtatgcatttagttaactaaattttgaatgtgccgctaaccattatgatgtcttcaggtcgaattgccaaggtaaatttttttaaaaaaaattatgtgtcttataatatcaccaaccactcatcacaaagtactataactactttacaggtctttccaaaagggtcacctctggtgtgtgacgtttcaagggcaatcctaaccgtgactgaagatatgacaatgaagaacatagaaaataaatagtttggaagccaaaccagttgtcctgacccaaacacacagatctcttccaacagacttgggctcgaaagcttttggggcctatttctcatagttaccattgcttcattctcagctcttattattaatgttaccacttttatttacgagcacaggcaagtttttctgctaagtactagtactattgatcatgatgaaattgaagtgtcaatatggagaagaatttgtgtagtgatgatgagaatattattcaatctaaaagactttatgagttctagtacttttagaaaaaatgtgatctcggtatgtggtggtgaagataaaagagcacaagatcatatagcgaatgtagttgtagctgatcatgatcatgatgagggcttacctgagtgctctaacgttacaagcccctcatcaagttgttcaaaccatgcataagagttgaaatatttatcttcactcctcatgaacaataagaaattattaatgcatgaaatttttaattatagatgatcaagaactccttagtagcttgttgttcattatgttcttcttgttaaaataaagtttcatggctcacatgtatagttacaattaattgatttaaatatttttttttgaaaactaaattcaaatgtgattattatttaggcttctctttacaagaagattactcctaggttagctaaaatatgtatgaatgatagtttcaattcttttatgttagattgaattccctcataagcaaaagtcagtataataaattcaatggacctcactacactcaattattttgtttataactaaatcaagactcagatctcctaactaaatctcagctggcataactaactccagctgagcttaaacgcatctaactaacaagaccaaagggatataactgttggaaatacttgtacatgatcatattacatttcatgtaaattatattttaacataaataataattacctataacatgttatctaaaaccttagagttatatatatatgagtttcagaatacttacagtggttgttgcacagcagaatatgactccttctgttcaatggtctaacccttattcctttctatcgcaaggtattatcaatcattgaactcgaatctccatagaactaggatcaaagaaacaatttctacatagtctttctcagtgatctatgtgttataatagaactgtgtggacaagtgttacaacactatatggctaccccaaaatttagagagaagaataaagagagtatatggaaatttgagagagaaaggagagagttttccaaatttctgagactgaaaactgagttgtaggagtggggttaataactcatgctcgagtggggttagtttttcctctgtaacagttagaaacctcatctctcatcattcccatgtttctcctcctccaccttcttctctgttctgctactcccatgatcccacttaaccatctccatttgctagttacctagatctatcctcacgatcctcatctcatgatggcctttctctgcaactcatctcctatatatacccaattatggagtctttttgctccatatctttgattcttcttctcacttactaaacctacaaattttatggaatctattattaatgacatgaactctgccttagctttgtctgaaaaggaaagggtcattcatactttttctgaggcaaatttacgagatcctaaccaaaccccgaaattcttccttgtagcccggtgtctctcaaattcactcaaccctaagaccttcattaaacgaatgggcaatttctggtcgaacaaatataggtttgaagttgtagtttcagaaatgcattaagacttgttcttgatcactcttggttgtgcaggggatgtttacaaggttctatcaggtgaaccatggcactttaataaccaactggttttgcttcacacccaactgttctacataatgtcactaaggctaatttgtccaaagtccagttttgggttcaaacacatcgtcttcctttccttagtaagtctcgagctcttgttaaaaaaattagtgaatgggtgggtgagtatattgatgtttatgaagactctttccatgaaggttagggccctttcatctgtattcaggcttggattgatgttaacaaccacttatgataggaaaacggtaaagctacctaaggttcgagatgagcattgtcgtgagttttggtatgaaaatattcctatcttttgctaccggtgtggcatactgggacacccctttgagagatgtgcttattttcttaaattgattggcaatggtattgatcctgatctcccttatggtcctaaaatgatggggggaaaacttctaaattctggttatgatcgctatcggtatgatttttcaaaggctaatgtctaccctttcctcaaacgcctctctaagaaagccactggacaggcgattcttgctattaattacaatcaaaacttggctattggtactattcctcacccacatccttttccaaatgctgaatcatcttcccaagctttatctaataccaattccctggaaactatctttgaattcccatcacctttttcttcttattacccatcacaaattccatctttggccaatgaaaatattgatgtcattactattactccatctaccagccacatcaaatctccttccatttccaccaaccattctctccactttattgctacttatcaacctactaatgtcagttttaccaattctcatgtcactttagcatcaagcctgagaggtcaaagcaatgtttttggttcctcgactactccaaacaaagggaaagccattgtttcatgtgaagaagaccatgattttggggtgaacagtagaattttcaagaggcatgttgtaactgttggaaatattttannnnnatctagatttactaccaagtatctttcattaacatcctaatatgaatnnnnnnnnnnnnnaataaacacataagagtttaaaaaaaccttacatt

SEQ ID NO: 162460 - DNA, 4244 bp, Cannabis sativa
cgtctcactggcatttacaagaatgtcttgaagaattctggtgtcactttgattgaaggccgtggaaaggtgggacaaagccatcctctttgggtgtttaatgactagttatctgtttgttcctttcttgttatggctttgcagagttggattttcaatattttcctttttcataaacataattttgtttcaacgacacagatagtggatcctcacacagttgatgtagatgggaaaatatattcggccaaaaatatactaatttcagttggagggcgacccttcattcctgaaattcctggcagcgagtatgcaattgattcagatgctgcccttgatttgccatctaagcctgagaagatagcaatcgttggtggtggatacattgccttggagtttgctggcatcttcaatggtttgaatagtgaggttcatgtatttatacgtcagaagaaagttctgagaggatttgatgaagaggtgggtgatccattcttaatatgatcttttttattatatcataaagatgaagatgggaattttctgggctttttttttttcgattgtgaaatttgttattatgattttgtaggtcagagattttcttggagaacaaatgtctgttagaggaattgagttccacacggaggagtctccccaagcaatcactaaatccgctgatggtacattgtctttaaaaaccagcaaaggaacaattgaaggtttctcacatgttatgtttgcaactggacgcaggcctaatactaaggtatgtattttatttaatttacttgaagtgcctggaggcatctccagattcatgaaattgttgttcgtcaaggcttgtgtgcaagtagtatatctaaagatactagttcctgaagtatttaaatctgtccttaactgcttatctgttatgggatgcaagaaaatttaacatattgcattgcagaatttaggactggaggctgttggggtcaatatgaacaaaaatggagcaatagaggtatttttcttaatatagtcaagttttataacctctctttgtttatcatgttggataaaccttttttatttttattttttgtaggtaaaattaactagtgtttaagcaaaagggatagttattcataaatattttgatcgtagggtgcttctagaacgcactctaaaaaaaataggtgtattaatacatcatcttcatgttttatccagatagttctaatcttattttatatgagagtgtgcattataattatttaaaacatcttgtacatttttgagcacttcaaaataattattagtacaaaaaatagaatttaaacaatctattttacacacataaaataaatcaagtacgtgtgcaatggacaatttaaactttttttttgacactataactttttttttgaatttcttaaaaaattataagatttcttaaaaatctacaatgtacatcttcatattaaaaattggaattatagttatccggataccaaaaacatgaaggagtcaatcgatacttccatttttgggagtgcattctagaatttatcatgtatcttaaatgcttttctccttcacttgtttctttaggttgatgaatactctcgaacttcagtcccttccatttgggcagttggagatgttacagaccgtctaaatctcactccagttgctttgatggcgggaggtgccttggcaaaaacactattcctgaatgaactaacaaaacctgattacaggtattctttttttgtgacatatcattttataatttttttgatgccttaaagatatgttgcaagtggactatgtctctgaagagttttctcattcatataaaattttgtattattatttattattattattatcagctgatttttcaccattgtttgttctaattttaatacatattctaaattttgatatgtgtacatttggaacttcaaatctgattatcattattttgaatagagctgttccttctgctgtgttttcgcaaccaccgactggacaagttggtcttactgaagaacaggtaagacaattatttgacgcactaattcttgaattgacctttgattttaaattgctagtacttgtgcaggctgtagagcagtatggcgatgttgacattttcacagcaaacttccgacccttaaaggctactatatcagggctccctgaccgagtcttcatgaaacttgtggtctgtgctaagacaaacaaagttctggggttgcatatgtgcggagaagattcacctgaaattgtgcaggttaataatgttttattctctttagatctcattctgccttttcagtttgaaatattacgaattatgtacttatggttgtgaagtatttggaaattccagggatttgcaattgctatcaaagctggcttgaccaaagctgattttgatgccacagttggtgttcacccaacagcttcagaagagtttgtcacaatgaggactcctgcacggaagattcggaaaagtcctccatctgaggttcatttttgacaaatcttattctcttcttttttatatttttgcatcaccaactttgttatctttaacaaaaaaatattagattattgttacatgtaagtgtgcttcaccataatttaggatgcgagatttaagatgtccaaatccatgcctaattttataacttgaatacttataatttgagtttggatttgtcattttatatctatacacgtatatataatttaaattaaatctgtacagggaaagacggattctgaggctaaagctgcagctggggtatagatgatgctcttgcttttaaccaatctagtgactgctcgataaaggtgtgaaaattgttatggtgacttttgaaaacttcttttcttcgttaggctgcccttttgtttggctgacattgacaaagtgcatgtaatgcgtgcttaaggatattaacacaaaataattgcccttcacaataatgcatcttagttctagtcaactattcgtacccctgtcaattgaggctaaattttaataatcttaacataaaatgctttgtttcccttactgagaaattgacatactagtgaatagtacattttgccatagtaagttatgcttcttttccaattcactaattaaagtaacaaaacatgaacaggtctccatctatcgaaatcactgataaagttccaaatggtcacccagaatgtaatatgtcaggcaatgcaccatgtttgattagaattctcacaaatgctttaaagagaatgctggtttggcttcggggcaatgagtggatacgggaatggaattcttgaggatcaaagattgttctataccattggcatgatacatatattgtttttgcttatatttcctactttctgtcatttgcagtgaggatgagatatggattgcaatcaataatcagcatttccattccacccttcaataataattgttgttgtggttgttttcaaagtcgaattatccgttttgtacaatatattacagatgttgagagcaaaccaaaccaagccaaattgagtgtacaaaggtagagattcttcactacttagtattgtattttggaatgggagttttttgttcatttttgttaattgttctgcatgaaacatttgtagcgtggaaattacgaaaaactacaggttggaactactgttttatttatttatttagatttgaacaacaatatctttattttgtagagatgaacttcaaatggacgatgggagttgataatagtatatattctttatcaaaaaataaacataaaaattatgcaaagtattggatcaacagtcttgttttttttgcttaaatattggatcagcaaactaaggggtttatataatccgcaatttgtgatttcaaacggatttagacgtttaaaattttttggttattttattgatatttgagaataattttaagtagaatattgatgttgattaattataaaaaaaaatatttataacataaaagttaataaaataactaaaaaatgaacaattattgttaaaaaatttgaatatacaaattatggttttaaactaaacttatttttgagtagattggtttgatcatttaattagtttaatttggtttaaaaaggaaaaattccgactaaattaatctgtaaacactcttacaatctattttgttttttcaaaaaaaaaaaaaaaaaaaaaaaaaaaccttttttgtgtttttt

SEQ ID NO: 162461 - DNA, 4218 bp, Cannabis sativa
tttttttttatggaatttgtacaaaaaccagcatcttatcgaccaagcatgaatgttactggtacaggctcctcaaaaaagaatgtcctgcatgtaataattttatgtgaagcaaatattagataatttatcattgaggaaaaaatccctgatgaaatcaacatcaaatttgtaatcattaaataaattgtttattgatttttgtacataattttttgaggtcaaaatattgatatcctgatgatgcttcttccatgatgacaaaacaatgcacatgcgtgttaattttttttcttttttttgaattaaattttctaaagacaagttatagcgtgttgtgtttgggaaataaattaaattttgttatgacattaaaccatgggagcatcattttaataatattattttttgcgaatgtttttttgatataaaaatgaagtttccgtgggaacatcaaatcttgtacgtactgtcttaagtaaatattttcttaagttcaagttttgaatttgatttttcaatcaccgaaaaaataagtgttacaattttattaaagatggattagattgctttcgggaaaaaagaaagatgcattagatttgcttcaaatttgtaaggatgcctatgaaacaaaaatgtttagagaaagagaggaatgcataatcatatagggtcaaactacacgaataacttcatctaaaaaacttgtgccaacgtgaaattcaatcaattaaattgatcaagctaaaaaaaaaaaccttagtaataaagaataatggtggaactggaaagggaaatttgatgataattgattaataacccataaccatatgaaatgacgtgtttgcatgttgaataaggtataaagaagtacctctctactttgctatgctactttttatattttgtactcttcaagatgcagccacttagtagaagaccacttgtttccattaatcactgggcatccccctgtcaacaaacatggttaaaagaaaaacgattagaaatattgtaaaaaaaacacctctagacaaataaataaataaaatagttctgaaagttagttgctaaccatgcaaacttgaaggatctaaagttgcatcaggtctcatactccaaaatagtaacgcgtcgcccattctcggtttcactgaaagtcctgtttttgcacattcagataagtcattccaatttggttgagaactgaagtttccctgggcagcaggaaatactgtctcgccaccttcttcaacatctgacctgcgtttgtttgcagcagagaaaacattagaaaaacaagacaagtttaaatgctttagcagattcattaaacatgagaaaagattaattagcatcttacagatacatcaaaacagttgcaaccctttggccaccattttttgtgttaaactcatcaaggaaataatcataatgtgcgtcatacttttgcccgacttcatagtggagaacttgaagtccttcgccatgctctgaaaaatcaaatgttagcatacatatgatatgtttatgcttaagagactactgtgcaaaagacagataattacactattaatcaaaaagaatagtgaaaaatcgtaacgaaagacacatagaaaaacgtcgttaagatttatagaaaataaaaatgacaaaacgaatataaagatgcaaggatcatattgaagaaaataaagttactgcttcaaccacactttaaataacacattttcttttaggagagggagaaaaaaaaaagttaaaccagtatgatgacttaacgtgtatgtaatcacaatgaattgtttttcttcaatctatcctttattttgtgtgatgatgttttctatactttgactgcattgattatgttacacgaaagaattgcctgatatgaaactagattgccttgaacacatatctaccacaacaaggaggatcagaaaaaaatgatggaaaatataaataacagaacaaggaagaaatatgtgacgtgcataagaactccaatactacacagaaaaatcagttagaagatgcgaatttagaattctagtggaactaataatctgcatcacaaacctataacagcgacattatacctcaaaaactgctctagtaccagctaccaacgacattttaccaagtttaagagaccataaaagttttaaaagaagaaaaacaattgaagtagattatgcaaacgtgtgagcacttctatagccacacaaatcgacgatctaccataaactttcacctaattgttaagtaagctaagcataaaaattaaaattaaaaataaaatagaaagaagaactgggattttgtgcatatggacacccataaatgtggaaattaagtggtttttctttttcctacctactggaatgaatgtaaagtcagctattcttttttctatatctctgactatcttatctcgccctctcttgagaaacattcctgaactggtgcggaccctgcatagtgtattaatgcatacagaacaacaactatgtcacctaggtcttcatccatctaattcatatctaagttgaaatataaagatgtaaacacaaacctgctatctttgctccgtccagttttactatcaaccactgtcgactttaccatatgtggcttagcaatactaatcaagtattcgcattcctccttcgactgtttcaaatcatttcaagaactaacattattgagcaaaaaaaatatccgtttaatgcacaaccagtaaaataaaaacacatactagtttaaaactgaggtcaccaaataagacaatgaagggtataaattcacaactaattggaaagagataatttcaacaagatgagataaaacagacataattttggttgatatgagaggttctttattgcctaccatgtcttaatgttttaaaaggatgaataactttccaaattcagttgctgttgacgtgctgttacttgaattctacttatattatagaatagattcgattcactactgttttggctaaaattatttgaattttatatgaaataattaaggaagaagtgtattcactcctaatagcaagggcgatggatcggaacgcaatgagtggaaaatttcatttaagataaaatcaatacagaagagagtagttatgcacaatcgagtagttcaataaaacaaaaatcaatagatcaatgccaattcctttcgataataacaaatcctaatttcagaaaaccacaccagatcagattaagaagacgaggaaatcgccaggattgcattcaaacatgtaactgaaactatattcggtagaagaagagcaagctcctgattcaacgaaataaacaaataaatattgagaaatttaccaaaaaattatgatataagaaagctcttggctcccaagaaagaacttcagtccactgctctcgtctcttccccagaccaccagctctgataaattcaatcaaaatgtcgatcaattacaatctaatctagtccgcattaacaacagaaaaaggtcaactactatactaatcgaacatgaaaatacttatgaacctctcaacaattctgcgcctaaaagagctgagatcgttaggcggagaatcatcggagctgaccggaagcgatactattccaagagccaaaagcatcagaagcagaagcgataacatgaacaaaactgagaagaggagcgtgaacttggaccattttctagcgttgaatcgattataacgccccttggccattgttgaaggagctccaatccaaggcagtaaagctcgattggaaaataagtaagaaacccaattgaaattgtataaatctcagcaccgaattgacagagtcccaactcccgacagatatattttcttgggtcgttgggagggcggaatcaaatatttataagttgggcaaaggagctaattaccaagtttgctcctcaaatcagttcgttaattatgggccttttcgtaaattaaagggctcctggtttagtggtattgtgtgctgcaccatgtttacaaccaaactggaaactcctattgttgactattaatatttcttaaaatacagtcacttattcttacaatcttttagttaagactaattagtaatttttcttcttgaagtttgatatttactaaatcgtgtctcctgaacttttttgaccgttaaaaattcccccgaactattaagattgttaaatttaaggacttt

SEQ ID NO: 162462 - DNA, 1311 bp, Cannabis sativa
aaattacaaaaaaaaaaaaaatttcttcctcttctctctttttctttcattatcagttgatcaccaccaccaccattatcactataccacattcaccattgtgctaccacactcaccattataaaaccctaaccagattccaaatcatttaaggaacaaaaataaccagatcaaaatagaccaaagatgctgacacatataagaatcacactactataggaatgtacatatagagctttgaatatatagatataaaaatagtgaaaacaaagtgtaccgttggaacctctgaatcctattatggctagatccaaccttacagcaaacaattggtgtacaagttactctcgagctctatttctctctcttctctatccatcatcatcaccacttagagagctctatctctcctctctttttctctctattgtaaccaagaaaaaattccaaaatttaccataatcaaaatttgggaaaaaaaaaaatgaaatgaaagggaaagaaaagattatctaagaaccccaaagcttccgaccccttttgttgcaatctcctacttattctccggcagtgaacgacgagaacgccaaatgttgttcacctccagagaaaagagcaagagatatataaatagtaaataagaaaaaaagaacaagggaaagagatatctaagaccacctagcgttggggatctcagatctaggagtttcagtaggggatctcagatttaagattaccagacccttttgttgttggtctaaggtgttggggttccttggggttttgggaacttggattagacacttacagtcgttcggggttaggataagcatcgatcgattgataagtgtttaaagttaccattgttctaaggatagtagaagaggaagaagaaacacaggttaccatcaagaggaaagagaaaaagaaaaagacaaaaaaaaaacatatattttttattttttttattttttaaaaattacttttaattaatttttataataattaaattatgtggactaataaaacaataacacatgtataattatgtatatatataatccacattggcacttaattgtgaaaatctaatagaatagtaaaaagcaaaacagaatgtgagtttggagggtttaaccgccaaaaaattaatttatgggattaagtataacaaattgtatagttaagcccagacccggatagcacgggttggcggtcacgggttggcgggtttcggtaggctgggttgaccggcttggcgggttgactcggtcaactctttaaaaaaattaattttttattcaaataatt

SEQ ID NO: 162463 - DNA, 7118 bp, Cannabis sativa
  modified_base (4480)..(4481): a, c, t, g, unknown or other
tggtaatacaggtggtaggtttggtaactggtttctgatgttgatgattgtagcttcaggttgttgtgtgggaggtgaggaaacctcagtgacctcaatatttggtgagggaaccacatcatgtagtggaatcacaaaaagtgaagcagtagtattagtatagagatcattattagatgtgtgaaaggtaaaagaaggagacggtgtagatacatgtacctgagagttttcaccagttggtgaagaggctggaaagtgtgtttcattgaatgaaacatctctcgagattatgaccctgccatctggatgttcacataaatatcctttgtggtgagaggagtatccaaaaaataggcatggttcagatctaagctccagttagtgggcattgtaaggtttgagatgtgggaaacaactgcatccaaaaggtttcaagatgttgtaatcaggttgtttcttgaatagaaattcataggggattatgtttccaataacaggagttagtagcctattaagagtgaatacagcagatgacattgcatactaccaatactccatgcttaagccaacgtgagccaaaaatgtaagaccagtttcagtgatatgtctgtgctttcgttcagcacggccattctgttcacttgtttttgggcaagggtgttggaaatggatcccatgatcagccaagaatcgagcaaaaggtcgatatccccctccccaatcagcttggacacttttaattggcatatcaaattgcttctccacaagacttttaaattttataaacacatcaaaagcttggtttctagtggatagtggaacgatccaacaatatcggctaaaatcaacaagaaagtgaacataatacttgaagccatacttagaggtaatgtgtgatgggccccaaaggtctgtgtgtattagagcaataggttgtgtggctctgcttgtggagtttgggaaaggaagtttgtgacttttcccttggttacatgcattgcagagtttttaaggaaccagtatatgatacgtggggaaggattttggttattgtggtcaatgttggatggcttagtttgcaatgctaattattaatgtcattgtgtttagatacagttaaaacatgattcgaataattgggaaatgaattaaactttgttttattgatttcagcagagttacaagattgaacagttgttattgaatgacaagtccaattacacatgtaagattcaacagtatcattagacacagtagcaagaagacactggagtgttgtggtgggggcttcaccaagctgatacagaccatctttagccttccctttgaggagcactgtccctgtttgtttgtccttaacaaaataacatgatttgtgaaactcgagaaagacatcattgtcagaggttagttgagaaacactaacaagattcttggtcattgaaggtacattaaggacaaaatttaagtgcagtggcgtataaggtaaagatgaaggaaaagatgtgtgaccaatatgagatataaagagcttcttaccatttccaacaacaatggtttcattgccattgtaggtggtggccatatccagattagaagtggcaacagatacatgattagtggcacccctatcaacgtaccaagaatcatcatctccaatttcagggagcataattgttgatgaagcctgtggatcataataaaagcgagtttcaactaaaagagcctgggtattatagttaccatatttgggtgtgatccaattcttgtcacaccggaagtggcacactacaccagtgtggccagtgcgaagacagacttgacagcgtaatcttgcactagagcaacaaccataggatcaatttcgactgttatcagtaggattgccacgaacagttccaattggaggtctatagggaccatttcttgcagcaagatttgcttgcatctttaaagaaaggtcagtgagcgagttgtgatgttcaagtcgagtctcatgagagagaagtaaggcttgaacttcttcaaatgtaagtagatcaattcttgaagtgatactagacgcaaccaggtcaaattcaagaccaagaccattgaggagctgcagaataagatcctggttcgacactggtgatccagcaatcatcagagcatcaacaatcgactgagctttgtccacatattcagagatggagagattgttctttagtaggtgagagaactatccttttagttagagaagacgagctttggtttggcttgagaatcgttgttccaaggcgcgtcagacaatgaatgaagtatggaagtttgccacagaagccagaacaggttctgtcattgatgatcgaagccaggagaggaggagctggtccttctttttccactgagcatattcaggatttgaagctctcgtgaccagattccctgggggagaaacattagagaagagaatttgatccaagtcatgaccaatgactgtgggaaccacctgagactagcttccaagaaaggaagttgttacggtcgagcttcaaagttaatgaagatgtcaaggaattggagaagggattccagttgttggtgaattgattctgaggagtagcgacagctgtggtgtgaggatcggaggtggaagactccatggacattagtcaagggacgatgatactatgtagaagatgaaatgttagagagccagagaaaggaaaaacagagtaaagaaagggaagccttgactcaactgagtaggccattcgtttatttatagcacaagttcagtacaaccaaaatcaggaaaacaataatagaaaaataaactaatcataactaactaacataatagataactaatagttagttattaggtgacatcactaagtagccataaaataaaaaacaatagcaatgaattatgcacaggatgggaaggaggagaaaaaattgacgatacttataagtacaattccaagctcgcctagaatgcaaagtactctaaataaagaagaaccaaaccccttgaaaaccatccttgactaataagacacaaccattagtctaaacttctcaagtggattaaattttagtaaattaataagtacaattccaagctcacctagaaagcaaagtgcacgttagatttggtgggaataggaatgaccaaagaaatttattttctaagtttaattgatagtaatattatcaatataaatttgagctaaggaattgttggcctattcgaggggttttagtgcgatattgatgatttgggctaattcagtttggaatttctaagtttcggtccttgtttagaagacagtcataagagagtccattacatatataatatcgcattcaatgcatcattccaaacttaacaaacatgataagcatgagaccagaaactaacaatataaatttaagagggtttttatttttatattttaaaatagtttttttttttattattttgtatttttacgaaaaatacacataacaatcaacgaagcaacttaaattgtaatcaaaattcacataacaacccatataaaaattactagagcaactaccagagcaatctaaactataaatttgtagaaaaaaaaaataataataatatataaggtaattcccctaaatctaactaagtaactacatcaataaatatagtaataaattacctccagggactaaatcatgccatgagtaatctaaatttctaagcccgacaattgtattggtaggactaacaagtggttgaatctgcaataaggtccataataaagtagcttcagattccgtatttaagccagttagtacatcttgagagacaacataaagtcgaaaaaaatagcttcttaatctagtgaagacaaaattataaacaaactagcttgcctggagaaagtatgcaaaacaaaatttgcatatgaagaccaccaaccaaaagagcacgtacctaaatcaattaaataaattgattaaataatatttttaaagaaaatataaatcctcatttacagtacgataaggactagcaatcccattattcttttcaggattacacttaaaaaagcctccaaatgcactaattatgaatcaacgtctaatgaaattagtatattcgaaaagggtaaaattagctgttcgagccatacttccaacagatagaagcatatttcaaagcacaatacagatgaaatccaagttgtttaaaaacccttttctaaaagaatggagagatgtaactttgagcttaaagatatcttttaatgtaataatgttatctgtacctctccaattaataataataataatgcccctagagtaggataccagaacatactccagaattggatacgtgtagtgaactacaaccaaggagaacttatataccccagttgataaaaatagctttagaaggaaaaggactacctttttcttttcttttcttttctttttctctctctctctttttttnnttttttttttttgaaagaaagcatattcatcaaaaaaatattaactattacaggagaactagtaaatcgaggacaaacatccgtctattcagattcccctaaactaataatagaattagttagtgcatgtacatcaccattagcaaaacgcaaaatagtattgcaaaagccactaccaacaactgctaataacaaggaaatattatccattaccttagaaatattatattcttaaaaaaaggaaactggaacaataagcagtacaatatgacagaaaatatcctgacatcggtagatttagaaaataataaaaagtggcaaagccagaaaagaaaagaagaaaaaaaaaactcttctgttcttggtaaagggtggaggattaaaatgttaatgataataagaataattcatttaaaaaaatgttgcatactcgagattgaaacttggtggtcgaactaaactaacattcttttgcaagcaaaaaacccaaacaggtacttttttcaataaaacccaaacatatttctcagttgatcctcattaagaatcaaaatgcatacttgctaaccaacctctctattctcatgcataagaaaatcaattcaatcaagtagtaccctaattttttgttttgccgacgggccttcttccaaattaatctttataagatagcaataaggttcaaaagagataacaaaatagtaggataaagaaaccaactaaaatgcactaacagcaatagtcccatgagcacgataacagacctgcaataatcactcaaactctcataaagatcacgtccaacatagtagcactcctgaattatccagaaagagaatgggaagaaacaaaaacactatcagtaatcattacattgctaaatcttcacggttactctgaaaaggtacaaagaggaaatacctgataaatccttttaaaaaatttgaagaatgattgatcaggcattgcaggtaatgagtgggataccggaaattttagcaagagtccaaggactaaacgttggaagaatgactgatcagacattgcagataatgagtggcatgctggaaagtttagcaagagtccaaggactagatgtaatccagcatacacacccagtacaagaatatataatctgaagtaaaatgaattgttagagttgtggctatttctttcatccagaaccttcctgaaattcattaaaccattattaaagtcataaacagaagaaaataattaatttatgttcttgctcatatttaaaacaaaacaagtcaagaaaatacttacaagtaaacatatgtcacaaatgttgtgcacagaccaaaccagaaaaacctaattacttgtcttgagatagccatgcctcttgccgaggtgtaagacccaaacatgagtatgatatccaaaaaacctatgacaacagcaaagaatacaatgtaaacagaaggaaggggaggattctggaaattttgttcttgttcttactaaaagattaagaatcacatgaaagacggaaaaaacttactttcaatgaagttcataattgaaaatgttggtccaatactaagtacactcttaaaagtatccatatccaagcgcccatcattgaaagctataattgctaaagtctttggacagaaacatgcacaacagttaaatcaatattattaaatttaagaagaaaggtgaacttcattgagataacaatacacaggcagataatattcaacctggaacatcaaagccagaaagatccacaaacgatgaaaacttctatacaggtgaagaaaggtccgatgctcaacaaaagagcattttccaatctatcaagcaaaagacaattaaaaatcaaacagtgcaagtaaaagtgttcatcaaaataaggtgaaacatgatcaaaggagactaaagatagaagactccccaacatcactttttcttttgaaactaggatccctgcataatcctacacatcaaccacattagtattttgttaacggataaaacttaaaaatcctatacttcacgattgtgaatagttcaagaagaactcttaataggaaaaatattcaagggagaacgatttggtagttccaatagttcaaggctaataatcctaacagccatttaaatcaaggaaaacatttgtagcattctcaacagctgccactatacggaatttattagaaagggaaatcctaagtctcattgaattgctgcaacagctagagattgttgatgccaaatcagctttccactggtttactttagatcagaatcacaacagtgcggattgaaaaaaaaaaatactatggaaaagttgtttttctttcaaaggttaaagtctttggctaattggtagccttatgaaagttgattgtacatgatataatgcaaaaaagcatccttacatcgccatctcacgtggttggtgtgtttgttgtaaggcaagtgggaagagcattgaacatttatttttgaaatgtagtttcactcaaagattatggactgaactttataaggagctttagatgtgtcacaaatgatggtacatgagattattggacgtaaatgttgtggacattatcccacatagaataaatggtagagaattgagccatatataagaacatg

SEQ ID NO: 162464 - DNA, 3800 bp, Cannabis sativa
ctcagacttgtgggagcaaaccaaccatatgcattaagcatattcatctgattctaacaaatgaggcattgcatgatgctcttggttaaggatcaaaatactaaaaggctaaaggatagaccaattttactaatgggatgatcggttgacatctaatgcagtgaattcaaacacatacacaaaatggaaagatacaatttttcatccaaaatcaagaaaaattgctagtaatgagaaaaatggctagtaatgaacaagatgataatggtaaataatttataccttgcatccatgtatggtttaagatcaataatttctttgaaagtaacatggccattcaatttgcttaaccgaccccgtgcatcttggctgaacctcttaagatgaatcgtcaaaataggtggaactttgttgataaggacccttttggtagcatccctcttgacctttaccaatttagaatttatttcctcatcatcatcattttcctcggtgtcaaggttcggggctgataccttagactcgccctgctgaactttatcaccgatagaaccagcactactagctccatcaacacagcatggatctattgcttgaccaattaagctttcttgcttgcaagtgtgataggaggagcctgaagaatccgattgctcttgtgcatttttcatcgcaacatttccttctcccgtttgaggaactaaagaaggcaactcatctgcatgaccattctccttttttatgtgattttgactagagcagtcgatttttgaatccacattgttcaaattagaaacacattcgatattggtatgctcgggatcactttggaatgttgtttcacatccatttaccacagcttcgggagcagattttaactgcttaccagcatccaatttttggcgtataagagctttggaacagttttcacaatgccaagcattttcattggagagaagctctggctttgtgtaatgagacaaacaagtctcaacagaaactggggaattcgaatcatcaacttcatcgggatcagactcgctgctgttacttttcgtgacatcattcttaagagatggaccaatcataggccctgtagttacttcaggctcgtcaaataagccaccgaagccttcaaaatcttcctgaacaaccgcacaagctgacgaagaaacctcccctacttcaaactccacagcagtagagtcctcctctttataaggaagcaataaaacctcagaactttgaacttgtaaagggacttcatcctcccaaggattgacattagaaaactggactgttgcaactggctccccactaggtggtagaatcggtagactagattcaaaatcattctgtcgttgttcggcctctataaatgtatctttgttttctaaatcatgatgagtttgtgatgcaatatcatatgaagtcaaattatagtcatccaatggagcttctggctcaaggtaatccaaccatgaagaaatatccattggagctgatgttttctcagctacatcctcaaccacttgtttattttcactttcctcaatgactgaggaatcctgtacaaccgaactgttttcttcagccaacgaagtagggccaaccgagccaatttgtggctggcaagaagaaatttcattgctagttgaagcagctgaaatcaaatctttattaacttttggccggggctttccagctctcttcggaggcaatttagctttctttgcacgggaagactgctgagccttggccttcttgcctgtgggcttcttagttggcacaggcagtgagagatctaaaaatggctcgtatacagttgaagaatgtccacattcagtacagcaaacagtactcgatacttgacctccaaatacagcatccacgaaagtaggactcgggccattttcattttccttggaagaattactttgctttctcaaccccaactcctctgaagatagtccatctagtaagcaacgaagcaactcatgactatcgtgttgttgaaaccccttaaattgaggagccttggtacaaacacacccgaaaaaagctctaggatttatcacatttttgaagcctgcctctggttttgtttcgttatagatcttcttcaaagccatagtgagaggtccaacagatacatccaacttgaaaaagaaatcccgcaacttatccatagcaataaggttttgtaaaaccgaattaaagaaacaagtatttccaagattaactaaacctcttacaacataaccgccttgtccatctaaatcacccgacacaacactagatttgatttcagctataacactaccagtccctaaccatgaattctcaacatttacatcttccccctcctctgttgtatgccctttaatcaatttcacaacatcagaaaacacatccttttgttcttcatcaccattttcctcactcttttcaacagtaacaagcgtgttacacgggaaacaccatctcatctgaggtttctcaaactgaataaccaatggatgacgagtctgtcgggtatgtctaagcgcatgacattgaggattagttggcaatccaacacctccacaagcataatgcccacattccaaacaaacccaagtagctttagaatcaacagaaccaccccctttcttcttcccatgtttagcctttcccttactcgcccttcgatcaactaccccttccctacaatcttcacacctaacatgttctcttaactcaattttagcagaaagtttctcaagattaatacctttatcaagatgagtacaaggtttggtttttctcactactatagttgcactatctacattctcagcactttgatcaattgattgagaattagttgtaactttcttctccttttgaggaattctactcttcttcttaactttcttccccatcactacctaaaacatactcaaattacaccaaaatgacaccagtaattaaaacaaacacttaataatcaatacaggcaaaactgaaacaaaacccatcacagatttatcaaaatatgaaataaagccaaagaatttaacaataattcgagattctaaacaaaacccagaaactgattttaactaaaacagctgaaaaaaaaaaaaacaagttgtgaagatttacacaaacttttaaccaagaaacgaaagaaaataaaagagtgttggatttgaataacgtttcttacctaaaaaaaagttggaagagaagaagaagaccctggattggtggagtcacatgagagagtgaaaatggtggatgttgaaagaagattgattaagatctaaggagatggagatgaagcgccgcaagcaaagcaaaggttgagtttttattttatttttttatttttttctggttatttgatgatgtaatagtctcttttcattggaagaaaagaaaagaaagaagaaaagttagtgaaatacagcaaatatggtaatgaaatcaatgattcaatctggtctactctaccaatacaatcaatacagattggattacagaggaagaggaagagtttgagttagagaatagagagagatgaaagggtttttatttatctatcaaaatgtaaaaattaataaaagaatacactaatttttttattttttatttttttttgtaaatatttaagtttaaatttcaattagagatttttctaaaaaaaaaatattagttagagataaatatttaagtgttaatatgttaagttatatttctacaatattctactaactctttaagtatcgaattattatttttattagtatatttaa

SEQ ID NO: 162465 - DNA, 720 bp, Cannabis sativa
ctcatggtcaggccggtcgccgatagttttgagcacggatcgggtctgggccacatcggtcacagcacgggtcatggcctcgattaacttcgggtcggtcaaacggggcatctgctcgactaactcgtactgacctgcccccgatgaagaagaagaacacgacggatcagagtgggcttcggccggcaaaggttgctcgatatcgaccggaggatcatcgggcctgggcccaaaggtggggatccggcccatgatgtacgataggatagggaaggttttcgggttcggatccatgttttcggatgttgttcttgttcttctagattcttttgtctttgattaaagacagagagtgaaactgagtgagtttgttggtatcggatataagaggggttttcttcttgggtggatgtggggccctactagggaacggaatagagatttataatttatttatttatttgtttagcttccacgtgtacaaaacgacaacgtatgactcgggctacatagtcagtttaatctttctcggatccggaaaacaagaagaaaaagggcttttctagaatggaggatgaaatgaaatatgggactcggaggaatctgttctggccatttattttatatatagatatacataggaaatctatacataggagaagtatacttaggtggtgacgtggcggtctcaaaatgctctaaatcttttttttttttttt

SEQ ID NO: 162466 - DNA, 2340 bp, Cannabis sativa
tataccataattgccaacatagcaccagaagagaattcatacatatcttgggtcaaaccttttgcaattctcatgaggaaggtgatgacatcctctttccccaacctttgtgtttcagctttgaagccactaattttccagactcccttatttgccttacacccccatagagcatggaaaatagttgcacttacccctttagagcaacgttgacatgttggatcgatagccaccttcctatgagcaagagctgagttagtaggcagccatgaattcgccaactgtgaaaattttgagttttaacgcataattttacaccaaaattaaaaatagataatattttttacaccatcttatatatgttcaaattttagtgtaaatccaaaaatatacctgtattaattttatcccatcactttccttccttctcttttttctttccctctttactcttaatattttctctcttctctgtacccaaaaaatataaccattagaccaatttttggagtagttatatttgaaagaagaacaaatttctatgaaggaagagccttaccacaagataggagaagaaagtcaaagttttcaaggttttgggatgattttggctgaaaagaaattggtatgtgattttatattaaatttattggtagtgttaattttgttccttgtatatacatttagttgtgtgttttgccgatttgttagttagaaaatcatatttgcgtttttggatttctctcatttctttgtgtaaaatttgatgtattcgatacgtgttcgatgcttactcgattagtagtatttttagaggttagggatgatatttcaataatgttcgatagttgcttgatataaattagccatattacctattcgattgttacacgatgcatatttgatgtaaggtaagttgtgtggtttgttcaattgttgcataatgcatgttcgatggtacttgatatgtattcgatgatgtatgttttatttatacattttgtattttcttgtggtatttattttattttattttaaattcatagggtcaactttgtatggcttttttttttttcaaaatcaaaagagcgattgtgtacattggtgtatgggagcacaatagaagagattgaatttttaatggcacaaaaaataaaaatacattaaagttagagtcaaacataacttacttactattagttgagcttgtgtactcagaattggaggtcgacgaagctcaacacgacctaaaattggaattcaattataaatacataaaagggttaatatattagcctgaacatgtgaagagtaataagagtgtaagtttatatttggaaatgcttcagaagaagcaaaatgaatttgttcatctctttgtgattttggtaaagaagagtgtgattgtggaacgtagtgcgaaggatacacgcaattcggttggtacttgtgttccacaagtaattttgaagcttgaggttggaaatttgttcggaaaactaatctggacattccatttgatgatgattgtaatccatactacaaaattgagtctgtgtttgattttgatggtgaagatgatttacgagagaacattgatactaagctaccttctcaaatattgaaaattgctccactttcctaaataccaaaacaacaaccacctcaaagaagagctcacacagaagcatgtcaaactccgggtactagaggtagtggcccagcaagaacgagtgaagttggggggatgtagtgatccattttgttcttttgtagattgctcaaaattcaaagatcaaatatttacaagagaaggcattgaggagagtagtaaacatacatcttcgagtggcacaacaaccagagagacacatattggaaagattttttagaaacaaaaagcatttggtaaacgttgttgggctattttccatgaagaaaatttttaagtttattgtaatgaagtctggtacgaatgtgtggtacattacgtgcaaggatcgtaattgttggtggaggttaagggacaaaaagaagccacagtgtgacttgtttgaggtcgctgtttttgaaaatgtacacacattctggttaatttattgcctatgcttctaggaaacttaaggagtataaacaacgatattccacacacgacactgagttggcagcagtggtgtttgccttgaaagtttggtgacattacctatatggcgaaaagtgagaaatttacatggatcatacaagcctcaagtacttttttcactcagaaatatttaaatatgagacagcgacgatggttagaactggttaaggattatgattgtgaaatcctctaccatc

SEQ ID NO: 162467 - DNA, 3899 bp, Cannabis sativa
acaagaaaagtttgttcttggtgtcttatgcttagttactttggtaatttcaattatagccattgttcttgtggtgattttcaaaaagattaaggatagaaagattgttgttattaccaacaccatatcaacggggaacactacttttggtgttaatccaaggaatcaaaccagattatcagggaccactacttttgctgctaatccacggattcaaaccagatcatcagggaccactaattttgctgctgagaggattcaagccaacagagtcccagcaagattgtcactagcagagattaaatcagcgaccatgtgttttgctccaaaccgaatagttggggaaggagcctctgcaactgtctacaaagggtgtcttcctcatggtcctcaagttgctgtgaaaaggtttcaacgtgtgagtgggattggcagttggcgcaatcctttcaccactgagtttgcaacaatggttggttgcttaaagcacaagaatttaatccaactccagggatggtgctgtgaaggatctgaattagtgcttgtgtacgagtacatgccaaatggaagccttgacaaaatcctccacaacaaaacaaggtcagccattgtccttacatggactcagagacagaaaatagctattggggtagcttcggctcttacttatctgcaccaagattgtgagagacagatcatccacagagatgtaaagtcatgtaacataatgctggatgaaaatttcaatgccaaacttggggatttcggtttggcacaagtgtacgaacacagtcctggtggtgggggtggtgatcatgagtcgagaaatgcgaccataccagcaggaacactgggatatctagctccggagtacgtgtacacaggtgtgcctagctcgaaaaccgatgcgtacagctttggagtggttgttttggaattggtaacagggaagagggcagtggatgaagatggtaagtctgtagttgattgggtgtgggagctgtgggggaagggaatgatagttgatgctgctgatgtgaggcttagggggaaagttaagaatgaggagttgatgcggatgttggttgtgggacttgcttgtgtccatcccaatcatgtcaaaaggctaagtgtgaaacaagctgcaagggttctcaaaggtgaagcctcactccctcttcttccaccatgcaaaccaaggtttaagcttcgacctgttaatgctgttccctctgaatcatcatctgctgctgcatctcacacctctaagaccacctctaacactgatccatttcttactcccatgagtaattttggatagatactgtttcaacaaaagtatgaaagtgttctagtgagagtgtaaagtgaaaaaagtcacatgtagtatctaaattagtgactttttattttagtttttaccatattttaatactcttaaaaacagtagcttttgagctactaattaagttgtaattaagagtagtttttaccatagttgtgtttaagttgcattgttattattaatatataaatacgcaatttaaaagtaatgaatttgtctttttgtcctatttatcttgtttttttatttattttctgtgttcaacactaaattaggagtgcagagtcagttaggaggtttgcctataaataatatatttgcaatggtttttataagttcacttcaaaactttacaagaataatcataattgggagacaaatcccatttattctatttataataacaaatttaagaatctgatatatccaagaaataggaagaagaatcgttacatgggggaataggaatgtctactaaagtgtcttcaaacatggagacaaccttcttcattgtaggacgaattgttgggtcttcttgtatacaccaaagaccaatcttcaccaatctatgaaactcaacctcatccacttcatcatcttgaaaaagaattcttaatttattgatcctaaaacactcatcaacccaatcaactaagatggcttctttctcaggaacacttgcatcaacactaggacgacaacatatgatcaccaacaaaacaatgccaaagctatacacatcaactttggttgtaataggctgtcccttgtgccactctggagcaacgaaccccctcgtccctctaattcctgtgttcgtctttgtttgatccggcatcaacaactttgctaatccaaaatcagaaatcttagcacaacggttttcgtctatgagtatgttgttgggatttatgtcacaatgaatgatcttattttcacattcttcatgtagatatctaatgcctctagccattcccaaagctattctcactctttcatcccaatgtggtttcatatctgatttgaagagaaatttcgatagtgatccatggctcatgtaatcataaactagaagcttatttgatttttcatgacaataaccaatcaaacgaactagatttttgtggtgagttctaccaatggatctcatttcatttaagaactcaacatctccttctacagcaactttttctagtctttttacagcaatggctctttccccatatgggaatcttaagtttcctttgaaaaccgttccgaaagagcccttacccaactgttgtgcaaaggattttgtagctatttcaagctcattataagtaaatgatctaacagccaatacttcatctacaaaaatgacttttttactagagttgaaatgacttttccaaaacagaaacattgaaatgaaaaggataatgattgaaaatactatgcacacaataccaatcactaagatatgcattgcctgacctttcttgacttctttcaatgatggggtgtcactgtaattttcattacgtactttgacaatggttgttgctgtttcaccactttgtgaatcaacagctttggagtatctcagaggaggaagaagtttgttgcatatgttgttagcaaacaaagcgatttcacagttacaatcatccaaacaatctttctcacaagcaaacttgttgtttattggaacagaggaagagtttgagccattttcccacaaaactccatccaataccttaaccgaaaacattcttgtgttgtgatcattatcactgttatccattgtgcaataatttatgttggtaccattcctttcacagcctaaacttttctggttttgattaatgaaatcgaaaccaggaagacatatacaattgggttcttcattttgaataagatcacaatatgcattattaccacacaagccagttggagcacacctattgttagttgaattccatttaatactccaactgctgttattaaacaaattgtgagaatataatcttaatattccatctgcatcaattgttagacgataagtaacattattaatcctcccattgagtaaatctgcagcatgaattgtctttatgatactcttacttgtagaattcatcaagtctaattgaccattaaaatcaagattcagaattgtgttctggtttccatctgtactcgagtaccaatatgtgtgataagctaaaacaccactgcttgttggacgcaggattagattaccatcggcctgcatgataacttggaatcttccggacgagtgatttgtgttggaatcagctgagatgagaacttttcctgtctctaaacgctgtccggacaaaatggtatcggttggatgtttaaagctctgccatatgggctcggaatctgagttgtagaggacaaaattacccgaatcgagcagtgaagctgaggcagcaggctgatcaggggaaacagagttggcgaaatcattcaaagcaagtgttgggctctgtgggagtggctgctgttgatcccggtttgctgtccatatgactgtcttctcctttat

SEQ ID NO: 162468 - DNA, 2723 bp, Cannabis sativa
gatgctggccagtgaaggtacgtataactagaaggctagcagcttctgattttttctatttttttgttattcatttaaagtttttcgtagaagttaaactaagaaaatatatttataaaattttgaataattacaatgaaaatgaggtttttcttagtgaatcatatgattgctcaacaaaaatatatagtattgataataaaatcttataatagctccgtgagtgcttagggcggctgaagggtacatatgacagccttatacaaggcaacgacctttgggtgtgaatttcagacgtgtagttccacatttttgtgttccgtgattgtgcttccaaatacttataaattagtcaataggacatatttttcatttaaaaattttatgataaaaaaagttaataattataattatcatataaatttaaataataaataattcaatatatgaaataattattcttttcaattaaagtaaaaataatatattaatatttattacctaaattctctaccaattatacagcaactctttacaataaatagtacataactaataactaatgaaaagtttaagaataataattatacctttctattttgttaaacggtaattaagatctttttttttaaaaaaaataaaaaatagtataaattagacttttaacttaatttttgtcaaattaaaacttagtaaaaaattgagctaaaagtgtaatgactagactgattatattttttatatttattcgtgctaaaaagttacttcagttacaaaaatagtcttgaatgtctctaccctctaagattgacaagggagcaaaagttggtcccaaactattccctttgaaaaaaaatgaaaggacgctgtagcatgtctcttctatactactgaaaaaggtgagacttttcgagatatatgtacacacccactactaaaatttcatttgccatacacgtaatgtggcgacttgttttgcatgaacttacctttggagatatatgtacacacccactactctgaaatttctctttttcataccgtaatctggtgacttgttctgcatgaatcacatcacaaaagataggtcacatcagctcgcctactatcccaagtgagctagcccaataagtcaaattatgcatattttccttcgcaaataattgaaacacctcattagaagagatatttacaccacatacttaaatttgtaatttttttactttttttttactatggggtggaatttttttcaaaaatactgtgtactgtgttaaaattttactgctgttttttagttgttttgttgttgttttcagttgttctattttgcgtttcattgttgttttacaaaaacacagcatttttgaaaaaagaaattgtaggacagtatttttgtaaaagttaacctaaattccagtatttttgtaaattttcccattagaaggctttaataataatcaattacttattgggcctaactaatctagcctaaatgtgtgactttttgcctataaatagagttgcacccctattgtaaaaggatcacattcgagtacttagccaaaacattgtcggaaagtctgaaacccactaatccattgttttaggcttcataacttaacaatgatttttagacctctttaatgcctcaaccatgtaagaatattaatcttccttaaagctctctaaaatatctattatctttttttacatagttgcgaaagatagtcaacaaatttattattatattttaaaaaatatataatattataaattttaaataaattattgggattaaactcacttaacctctcaagtcagtatttccatctatttgctcatcagataaatctgaagaaagctgctgcaagttataacagttggctttatataattccaacttaaaggagacccgctagaaactatatataggggttcctctattctaaaaaggagttctgagttctaatctccaaagctcatactttagattaagtttagagagagagtccaagatcatagtgagtgtgtgtagagggatgtaaaagggagtatcactcttgaagtaatttccctcaatgtgaggcatttctttgtaattaattactatgttgagttgtaatcttggcctcattttattgtgtactactgactactcctattcaataaagatccatcattcattcattattaagctaagttctagttttagttttgtgattggttttagttttgaattgtgtttcttggacattgttactgctgtaacaacttgctttgagggtgagaattcaccacaaatggtatcagagctcaaggtttagagttcaagaatcacattcaaccgatcaagactcatctttaacatttcaagaatcaaactcgaactttcaagaaccagattcaagcaatcaagaactggtttaaatggcttcagcaaggtttgaggtggacaaggtcaatggttcgaataattttagcctatggagaatcaaaatgaaggcatttctagttcactaagggatctatgaggcacttgatgatgaagctgtgaaattaattgaagactaacaagaagaaacttgagattaaagtgaaagcacatagtgccattctcatcagtcttcataatgaggctttgagggaagtttcagatgaagacaaggcattgggtctttggaacaagttggcatcgatctacatgaagaaatctcttgtaa

SEQ ID NO: 162469 - DNA, 5340 bp, Cannabis sativa
aaaaaaaaaaaaccctaattctaaagaattatatattattttcttcttttattttttcattttattatgaaaaaatgtataaaaaaatgatatttttcaaaaataaaaatgccagccttacccaaatccgaacaaaacccacccggactcggttcaacctgaactcgacccacctgcacctaaaacctgaaaactcagtcacactaacgggcgagttcaggttattaaattctatacacttgaactcgaagaccaaaaatccagtaaaacctacccaatgtgcacccttagtagagaagcatatgaggttcactatatattattttaatatatttaattttatcttttgtgctttctctttctctctcccattaattattttgttattatcttttttatttcttttttcatttcttttgtactttaattaataatattgtatttaaaaaatataatatttaaataacgtaagaaaattatagaaaagttgatatatgatatattataaatattcgatataaaatagagaaaatagaattttaatgatatattttaaataataaaaaatagaaactgatgagagtggcctaaagcaaattgtttttgaagagattaacaatatatgtatatgtatgtaaatatatatatttagagaaaacataaatatattgtaatattccaaaaatttaatagtgattatttaaaatatattatgaaatatagagtaatatgtttattaaagaaataaataggtaaaattataatcttactttattaaatatgagaagtttaagtttattgtaggaaatgggcaaattaaatgtaatttattaattacagaaattttattggactatgtaggtaatttaaatgcgatatgtaaaataaaatatttttagatccaacaacattagaaacccaattaattggccaaaaatgtcacggccgtattagaatgtgtgattgtggtatatgaaacttttgttggtgatagaattaatggggatatacttgtttatgatcattttatccttaactttagaggttactttaaggtgaagtaaatggtattttagtcttttacttaaagctttatattagtaatattttttgtaagtgtattttctagaaacaagtttattgctgaatatgaagttgaattaagtttgaattgaggataaacactaaataaagaaaagtctctctctttgtggtcacccaaaaaccaaaggagcaaaagatttctttcattttcttgttgaattaaagtctcagaaggatagtttgaagttgtataagtatgtaagttattttaggttttagctttgagtttttaatggttttgaataatttaaaaaagaattttgaaagtttaggttatgtgcttaattttttggttagaatcaatataaagtcaacatttagctttgttttgagggttgtatatgggtgtggggctgctgtttttattttggagagtaagtttggagcttttgaactcaaagtttggctctcccatggtaaattttaatcttttgtgtacttttactttctggaaggtagaatatgtttagaactcatgtttaaacttttttggagtaatgatttgagtttggaataggtggggtaagttttgagtttggaaaactcgagtttttgtttcctagtacaaactggttagctgatttgggatcctgttacccggatggtcaagtatgcacctggaaatccagttaaccgtttcgagtctggttacctggatgaggccagttgcaggtgcctcagttttcatattttttgatatttagggtattgtcatgttatttatcgataggaaaactttcaattttgagtttaagtcttagactagattaaaaagagttatttactggtttacaactattgtgacataaggcccggatcgtcgagcgatttctacttaggttgaccagcacacttgaatttggacttgaggtgagaaagtataattgtaccacatagcatgtcaatatatgattcggtaattattgtttataagaaagagttattactctaatttgaaattatttttaggtttatatatattggttatctcattaggcaacaatataagagggggttattactttattttggaattattgttaggtttcttatatatcagttatctcattaaacaacagtattgacattggttatctcattagacaatggtagaaatattgtttcattaggcaaccatattataaaggttatcttattaggcaacagtattggaaaggttgtctcattaggcaacagtgaataatggttactttattaagtaacaacattagtttatcttattagataaatatttaatattaaagattatttttcattggatagtgtgattttctacttatggattaagcatgtaattatttggtaatgattaaatgtgtatctgtatttatctgtgtattgatatgaaatgtttaagctatttgttttcttgttgagtttttatgatttacgggtgctttgtggtgtaggtaagagaaagaacaagtaagggcaaccatgagttagaagtctttctcgacaaatgtacatatcgacttatttggctagcactatagagttgttgagattttgtgaatggagcttttgacttgtgtatattttgatgtaatactgtttagttatcttttgtaaaattttaaaggggatccccgaccctaaaaagtttaaaatgtcttgaattttatattttaaaataattagttaagttttcattaaattacaattttatttaaactgttagtttattatttataaaccaatttataaaaccacacatgtggcattcctacgggttagggtattacaacatggtataagaacgaccgcggttttaaaagtcctaaagactggctagatatgtacattagttgtgaagacaagctcaactcatggtataataaatatttttttacctgtaatatatgattgtgaaaacttcaaaagcatgagctaagttttgttttacagtattccatgactatgtgtgttaacagaaaagtatgataaaagtatgtgtttaataattaagtaatgtataagaacaaattatttttagcattattattttggacgagaatttcgatcggtgtaagttgaggatcgcagaggtattaagcaatgcctccaaagcgatttgatagaattaactaagaactccctaggtttgggaatggttgagaggatgagaatccttcactaccatcgaattgggaagcgatgtacgctaacatacagaagactatctgacagtaccttgagcagataagagagttgagaggacagtaggctcgtcttgttaatgaacttatttctttgacatctttggtttcactacagaatgtggaaaccctttcagagtcgttgtatgggcgattcaggaagcaaaacctttatatttcgagggtggtctagatccactgaaggcaaaataatggatgagtgtagttactttcatttggattttacgcgagtcgagggcaatgatcaagtgggttgtgcacctctattttatggaaaacccataattatggtgggagtttgagtctcagggtcatggtttggatgccatgacctaggatatattttggttgatattttatgagaagcactataatgaatctatacatgcaacaaaagcaaatgagtttgtatagttggctaattcaatatgtcagagaacaagtgtgctaccaagtttactgcttgacttagtttgtctttaatggagcgcctactaaagcctcgagaaaggcaaggttcattcaaggtataaaggaccacgtagttcgaaatgtgattgtgatggataataaaccaagggttgtgtggttatatgatcaagtagttgggttggctcttagcgcgtaagagattaaggaccaactattttttttgatgaatcaggaattgtattagcacaagaacatttgattacaccctaatagcacccaataagggcctataataaagaacaactatacattgacaatgtatttacaaattttgaaaccattgtgtgtctatctttgagactatttttggccaaaacatctcaattcttagtttcaaattagcttttaactcattgagtagggctgtaagtgattgctcttctttggtccataagaccttgtttctcatctgccaaatgctgcaaaccagaccggctacagcagctgtaaaaatttgcagcttaaactttgtctcctttgattaaggaccaactattaaagaaaagtaacatcagaagagatttatggaaactatcagccagtaccagtttgggttggggttttgaccccaatgattgaaggacagaaattcaaatgacccttcagctacaagttttagcaagaaatttcaaggtagtcaagattactgtcaaggcaggaatgagaattagaggacttattcagaatgtttgagctgcatgaaggcactacttgagggaaagttgagcatgaacatgtactatgttaggatagtaggccatgtgatgtgttattaagcaggtatggtaagttgttatctactagagaattgatcatctctaataagtgggattaatctctttcaatgtacgtagaaggtagggtagatatggttgtcttatttgagaacaagagataattggttactttataaagtaatagtgattattggttatcttattagataacagaattttggttgttttattaggcaacaaattacataattggatgtgatattaggaatgaattggttaaccaagtataatgctaccattgattgtaaaagaaggatggtgatgtttgaactagagagtaagactctgttcatacatgtgggaagggtgcaaggatcctgacatctaatgatattagcgtttaaagtaagagacttgctataggaagaatgtatcgattatatagaggataccacaaaggaggtactagtgggacccaagagtgtgcttgtagaatgtgaattatggatgtgtttccaaaagagttaccagggttccaccaaatcgagaagatgactttgagatataatttatatcgaggcagagccatgggtgcaccagttttatttattaaggaaagggcatatcactgagaatttgtgttggttaccgagagttgtataagttgacgattaacaaaagtatcctttattaaggagatattatttgtttgataaacttcagggaaagaccatcttctctaagatcaatcttcgatctgtttattactagttaaggattcaggaagaggatattcccaagacagc

SEQ ID NO: 162470 - DNA, 618 bp, Cannabis sativa
ttggatcaataattaattagatcagataggatggcaaattctaacatttaatatataattggattaaatctgaatagacctaaaaatattagatgtgttctaataaacactcctatatggaacatagattttgttttatacattctcattattcttattatctcaaaacatcataacaaatagaaaaatactaaaagacacaccaaaagtatctaacactactaagagatgttatgtgataatattaatataattaagtctcgagtctcacagtttaataattgtgataaacaattactaactatttctaagacgttactttatagtaatgctaaaaagtattagtaacatcggataataatgctttaacaaatactactatggagttttacaaggttttctaactaagcaaagcaaaatcacaatattgattttgtttgccaacctctactcgtgatcgcatggatgtgtattccattatgatctttgtccatcttatgttggaccattttttcactttttatgtacgtcatttttcaacatgtagtgtgtgtctcctcaattctctataatatgtcttctttattctttcttttatttattttgaagagctaataa

SEQ ID NO: 162471 - DNA, 4506 bp, Cannabis sativa
  modified_base (4288)..(4292): a, c, t, g, unknown or other
tttatcttctaaccagatagaatgattcattttattatacaaagtatcattatgttgcacaaaatttcatatgtaacaacatttttacccatatcattatttgatgtaaatattaacatatactttcatatattaataaaactattgtgcttgtttttggtgccatagggcaaaaataaacattccaaaatgcttattacaattattgtgctgatgcatggtcaggctgtggttttaaattttctaagtttcaaaatttatggacctttatccaactgagaaaacctcctggttctggtttgtgagctgttagtagataaaaattcattttaaatctttaatcactcggggattagtgtttgttgccttaagtattaggccaagtcttatttaaataatgaggcacagtgcaaacaatcaataataataaactaaagtgaaaagaaaaactatccaaaatcagaagcaaaatgtaaatggatttggataacagactccaactatccaattccaagtgttccaagtatacaatggtacatcattaggtgcaaaatgcaacaaaagtatataatgtgaataagtggacaaagaaagccacttctttaactatagtccccatgaaaatgtcatccagcttaatttttcagtaagtacataagttgcatttttctatccagacctcctaggaagagaagacaaccgatcttttgaccattcttcaagagacttacggtggagagcattcatgcgaatataaggacgtttttctttgattaatttttcagcacttttccaatcttcagccacaccaagggccaccaataaggcacacataacagcaacacttcttccatgtcctaaacaaaagaagcaaaagctcaattagaaaactcaagtacttgaaagcccgggaacaattttgccacagaactgagcagacagcagaggaatagaaatgtaatctgctacagaaaacgtatcaccctcagtcgtttatcattgtcatttctaattacagaagtaagacaaaagccctatagcaatttcaaaataacttcaagattggtgccaccatcttaaggagattagtatgtgagaatattgaaccattgataagaaaaagggtaagtgcacagagcttctacaagttaaatatctcctctccatcttctaagtgattcaaaatgagtacagattatatcttacacttcatgcaaagtaaacaagttgcaactgctataatatggggttgagacagtctactacatataaacaatgcacatacaattaaaagacatatacttgattctacaagatcaaaatgatgaagtatcatcactctcttaacaacacgagttattggctaagcgatggtcaacagttttttcttttacaataatacaacatgaaaaaaaaatatatatcaacaaggatttagcagctgatgaacttaccatatgcacagtgaacgaacactggccttttcagttctctctttcgacaagcccatttcacagcagtttcaatgtcagctggctgaggggatcgtgtatcccacgttgggacacacaagtaagtatgcccagagaattctgacattcttggaagttcacaagtgcagtcaataatggcagggttaccaggtggcaatttgtctggtgaagaaggccatccaccaacatacaaaccatcacaaatttcagaataaggagcttccccactgaacaatctccgcagtgccgagaaaccccggacaaaatacaaatatgggctgaagataaccattgcccacaaggggaagctcccatctgtgctctttgctaaaagtatgggaagattcacagccggtaaagatgcaatggagattaaaacagataccaacgaggcatacagaaatggtattgataacagtttgaaaccaaagttcctaaggtacacaaaagatgagaacagaacagcagccttcaaacctatcaagcaggagatacctaaacccatcttaatcccttcccaaaactacaacttgtgacaaaaatcaagagcaataaatcaccaaatcaacagggtttctaaaattacttggtttggtggattttccacacgggattcctgatatctaacacaacagaggtcaagccaaaaagattactcaaactaaattctaggcagtttgtttattgtcacagtaaacaggaaccaaccctcatgatccgatcgtggttttagcgaagtaatctgtacgaaacagaaaaaggatgcgagtaaaacagcaagaacgacaagggttttccctcttactctttccaaaatgaaacctttactcacagttaacgcggaagcttcctgtaatgcaatgctattactgaatcaaatttcaaagatcctacaccagaagtttcaacccccccccccaaaaaaaaaaaaaaattgaagtgagaaaagtaagaaaaaaaaacatagaaataagattaaaaatcgtagaacaggaaaaggttaagttaagaagatatacatttgtgaagaagatttctccattgccaacttcttcaagattgttttttttcaatcctcaacgcgttacgaagtcttcggattcgaagcgcatcaactactcccggtaccgttgcacgtttttggctcgctcacgagctcgagattcacatagatgatgtcgtttgtgaatgaaacgacagctgaaattatttgatggctgtaaaacgacattttattttttgcagcaaaacaatacataaagattctaaattcaagattttctttcattcttttttgttccaagcatatagtttcaactttattctaatactaaacaacaaaaaacaacactaattttgtcataattatagcaattattataataatgttaacattatccttcttacattcttagagtatatacatgccaataagaaaaatgatttcattttgtttgattgaaattagttatcagcacaaattgcttgatgtgaatgtaattcacaaaaaacaaagttgagaaaaagtagcagcaatatttaacattgatgaaagtatagacatacaaacattattacaacatgaacaacaaaatatcacttagtatagtataattgttgcaaatatattattataggatagataatgtcattatttttttggtagaacatgattagtaatagtacaactacctaaagccaatcgttttgaatttgattgctggagttgcctagctacaagcactttctctatagtttctataagattgtttgattgcattattctatattcttcttcttctctttcttcttttactacttctgatccttcacaaacatttctaaaatcattttcgtagtgttgcttggttttagaggtaatggcggcgagttctcctgaattttgtctgtgcttgttttctggtatcaaagatggatcatcttctctaagcctgcacttgtgaagctttacatacctttttgagaattttctcaacatttttttttttctaaataataataatagtaattgtagagaggttgggctttgtttcaacttttcaattgagaataaaaagtaattgataactcttatatataggtggatttaggtgatgattgatgaagataaatatataacaacattggtttaagacaacacatattctaaataagtataaaattgttttttattttactattttaaatttagcttattttgccgttttggttacggtgattgtttattgtaataacatatatatttttttaaaataatgtttatctattacatataggtctttttgtttgatacttttggtttgaaattgattaacatggctttggtttggccaacaaattaggtaaacagaaaaaattgcaatttttatccaagtttaaagtcaatttgttatcggtgcgtttgaatctgatgaggatttacacttgtacgaatgattgtaattgtaattgattactagtttggttaatgataatgaatgatgagaaattgttgaagtttgctttacatttgaagtgtgagaaattgtagtgaagattgaaaagtaagggtggcaaaacgtatcttcttgttctgtttatgtcatattttatgtcatttatttttatatttcgtgttaggtgtgttgacactcgttttttatatttggtgaaaatattagaaaacatttttctttattaaaatttattatcaatcaatatatatataaaggaaaagaatgaggcggtgaacactttaaaatctttgtaaaattatttttctcttctctccttannnnnctcatttttaatattttattagagtaatttacaaattgatattttactattattttaataatttttctataaaaaatcataaatttacaaattgatattttactattatttgaattttctttaaaatataaaatatttttaaaaaaagttagaaaataaaaaataaattctaaaaaaatattaaaacttaaatcaaatataattaatcgtaaat

SEQ ID NO: 162472 - DNA, 1619 bp, Cannabis sativa
atgtcgtttcttcatcattaagtaataagcaacagttctcacctcagcctattgaaacaatctctaatcaaccagaaacgacaagtcgtttcaacacaactactagttctactactagtaatggtaatgtttcagaagaagcaattgttcctatgcctcaaaatcatccccaaagaatgaaattatcagaacaaaaagaacaaggacgagaagaagtagaagttgaagaagaaaaacgacaaataccaccaccaagaaagctagtgataatagtgacaccaacaagcacaaacgacaacaagtttcaaggggtgcttttgagaaggatggctaacactctgcgcttggctaaaccaccgttgctttggattgtcgttgagggacaaagtgagtcaaacgacatgtcgcagatactaaggaagacaggtattatgtatagacatttggtgttcaaagagaatttcactgatattgaagctgagctcgatcatcaaaggaatgttgctctcaaacacattgaacatcataagcttagtgggattgttcactttgcttccctttccaatgtttatgatctcgacttcttcaatgagcttcgaaaaattgagtaagcaaatctttaatctgcctttgttcttcttaattaccaagtttaataattgaaaaaaaaaaaaataaataaaacaaatacacaaaatcatttttgtatgttgcttgaaatagtgttttaactttaatatttgttgtgcctactttctttgattccaaaaggttgtttaatttgtataagtagacaagaagaattacttcattgattcaagcctcttaaccactttagattcttttaatttaattatataaataaaaacacagatcatgataggtgtggtttttattatatattgttgtgatatgatattatcattgctaaaaatttacttatagactcatgatggtatgttatgttatgtttcatatatgtcataattgtatcatgatgatcattatatatggtactaatttagttgtctttaatgtgttccacgtaggctttagatgaatcgaccctatatataaacaaataaataaagtctatgaatattattatttgtataattattataaagaggtgttttgggatattaatattaaaatgtatgcaggggttttgggacatggccaatagcagtagtgggagcaaacaggcagagagtgatcatagaaggacctgtatgtgattcttcagaagtgataggatggcatctaagaaaaatgaacaatgaaactgatgatattgactccaaacctccaattcccatttcaagttttggcttcaatagctctatcctttgggaccccgaaagatggggtcggacttcccctattcaaaccacctctcaggtataattttaatttatcaattttgatacgagacttctatattttttaatttaaattattaagttaataaatgtaatttataggatgcatgtcacattaaatattattttttttttaattggggaaggagggtttctaacttggaccatcacattaaatatttgtgttgagcaaattacattttataccctttttatattatcctcttttatttttac

SEQ ID NO: 162473 - DNA, 4680 bp, Cannabis sativa
  modified_base (4648)..(4648): a, c, t, g, unknown or other
atatgcacatgcttaccaagagcaggtaggccagagttaaggggagtctgctcgggaggagcgattggaacatgagaaagtggaagttgattatcggaagcaacagcataattactagtaccaacttggagttcatttctaggagcatttagccttttattttgcttgaagcccaaaagtgattttccatcatagtcgataacttgatcccagttctcatatgccttcttcactaaagtatctacataaacctgcaagaacatgagaatcttcaagattaatatagttcaagatagaatgaccaatcaagaataatttgaaaattcattccacttattttatccaccagttgagagaggaggggtttcttaccttttggttatcatcgagagaatcggcagaataatactggtcccctgcaataagaccactcagctcatagatgttgttgaagataacaccaacgttccttgtatcttcgggataataaacataatgcttcccactcaaggcacaagtcttagcatgttccaatagagcttcccacatcttatttgacatgccacttccaagtatctgtgagcagcagagaacaaagtaaccaaaatcaaattttgatcaacgagtttctccaacttacaaccaaacatttaaacttacattccgcaacttctgagaatctcggaccacaagccgaagaaagtcttcaactgtgagtattcctgctttagtaagcctcttgtggaatgacccatctttgccaatcttctccaatctccacacctcatcacccaatgctggtgggtaatgtttcttgtatactgttcaagggataatacaagtaaaaaaaccgataaacataaatggtggctaaaaaaaaggaacaaaagataggacacaggatgacaaaaacatacattcccctctgtggtctttaacagtaaaagcttcagtctttgcttcacgtatgcgtataccctcacaaaaacccgagacaacctttaatccaagtctgaatttcctgcttcttatccaacttgagttatctgtaaatataaagtcacctaatgttcctaccccatccttaagggtcagctgaagctctccgtgcagcaaaggtcttttcccttcacgttctttcactacgtgactttcaaattcttcttggctccaaccttcttcatcttcattgttaaagtcaccttcaagcacaacaacctcaagtttcacagaggcttcaggtccagttgttacaagttgaccagtgctgccatcaatcaaaacaacatgaattgcagcaccctgctctccttcaacttttccacccgtgaagagaggaagagacaacctagacctgaaatgcagctgcaagtttcgaccatctggaccttcaattcgttttggggaagacctgaaaactcccatgttagaatttagaaacagattatacattttcagaaagttaaaccggctacacaacagacaacaatttctcacaccttccattaagcattgcaggccctatcttcgccaaagcacgttcaacttcctcactaacctattaaacatcataagaaaaagaaagtgtaagacaaaggtgctgaaccaagacagaaaataaaaaacaatagccagtatattcataaaaatatatatatatatatatctttgtcctgtttcatatgggaatataggttgattaagcaaaattatcagaaaagttcagccacagaaaataaaaaactgggtattaatcacttgcgtgcaaaaagtaccgcatacaatcattggtaaacgagattagatatatctttcattatattacaacagatattacataaattactagaatctcaatagccaaatagaacaatgataacaataattacaactttattaaagcaattcaagcacacggtggggaacaggtagcagccactcctaaggtaaaaactagaccacatagatagggaaatcataaaggcataagtcttacaactctccgaagaataggttccaaagatgagcagagcttctgcagactgtccactttaagagcctcgacaataacactgcaagccatatgtttcagtcaaattaaatgaatctatattaccagaaaaaagaaaaaaagtatatatagccaagggaaccaaacaagcgcatatttaagctgatcaaactttgaactatattaagcaacaaaatatcttaaattaatcagacccaagaaagataacaaaaagtgagaacaacaacaaatagaaaacatcatatattgcttgaaaacaataactataacccacgtgaccacgtttatcacataatctagcttacaaaacatcacatgaatcttggtaatgaaaagaaaattcagcactttcattcattcagttcaccttttctcaaattcattatgaacattgaaacgtttcaaaaggaagtttctaccaacttctatcatctataactcttaaaccacaaaaaatcaattgacatataacataaatgactacaggtcgttgtccataaataatttcatgtttggaatggtacttcagttacatactgcaatagtatacttgttcatggaaaagagatcatcattcacttcatgtctcctatttcaattacatattatgacattgataaaaggttcaagtgaaaaggatcaaaattcacttcatgtctcctctacatgtgtaagacactagtgacatggataaatttctaatggaagctcattgttgcaacctaaagttctattcaaaatcaaccaaaaagaaaatgttggatcctaaaccagatatataattgagttatctgcagattattttagtctccaccaactgagaaatgtgagcaatgttgaaaatcaatagtgatacctgattaatccataaaaggctcatattgttaagagtaaatttggaattacaaagccgcaaacttttagtttcatattgtgctccatagccatacaaaactgctttacatatcttgctaacacattagctatgccaccaaattagacaagcaaagagaatgaacaaactgatgacagctccaagactatccaaacattaaacaactaccataactaacaaaactaagcttggcagatatgtatttgaatccaactaaagtcccaaaagaggccaatcaaacaaaactacatttaatatagcccacagttagctcatgaagttcattaatgctatagcaaccttggcagatgctgcaacaaattgacccaactaacaatccaacaacctcaatcaaacaaaacaagtcacacccaattaaagaacaattatcttaatttcaaaaaatagaataaaaaagtaaaaaagacacgagaaaaaagaaaaaacaattacctagctaaagcaggccgctttctctcaggctgctcatcttcacccccttctaaaggcctctttcccctcatagaattggttctctccattaatctggtctgcatttttttacacaaaaactcctaaaagaaaatacacccaaaatacccaagatctgaaaacacgcaagaaaatcaaaaacaaaaaaaaaaatctaaacttcgaattgagatagtaaaaaaaaaaaccctaacctcaatcctcaccactcttcacaaacacaaaacaaccaattaaacgcaatagatccaaacaaacactcgaattaaacaaaacccccttaaaacaaagcttgaaaaccccaaatccctcactgatctctgaataaacactatcccctaaccccaactaagatcaaagagtcaaagtaaagacgggtttgactactcttcttcctccttctcactcaaagcacaaatctttacactaacgaaaccccatccaaagataattaaggataaagcgggaaagtaagagagaaaatgagggaaaatgattttctgtttggagagagaaagaaaaaaagttttggaatttttgagtaaatgaattgaaggcggacagtcactgtttggtcttcaagtctactccggcgacttatttgttaatatcaatttgaataatcacctgcgccgcagtccacggtatgactattgtccctaatggacttttcaccctttacaacaaagattcctccacgtggcgatatattattggtttagagaaacgtattgtgttagtggacgattcatccagatccattgacatatgggtcaaagtaatgtattttgatgtggcagcttggctcggctcggctcggcctttttccatacgttggatagtaacgtcaaatactgaccgtacgatctgccatatattttagtaaatattattgtttttgtctacgctgtcggctgcactcgccacgtcacttgatattttcttttttgtttttttaactccgactttgtattatgtcattccatgacgtcatttcccaatttcttttttctttttttaaggagttttatttgtacccatacattctattattataaaaaataaatttagataatttttaaaattatttttaatatattttaaaataaaaaatttatattattttatatttttatattttttttaaatcatgtatatacttttttatattttctaaaaaaaattatataattttttgttcataatatttaaaatataatttatctttntttgataaatatatttttttaagaatatgaat

SEQ ID NO: 162474 - DNA, 4167 bp, Cannabis sativa
gccattaatgtgatcagaaggagttcatctcaaggcagtaagtccgcctcttgacaagcatcttagccgccgttccaaaaggctcctcaaacgccgttgaaacccaagacccatcagaaacttccttcttcgccgccgattgctcgctaggcctaatagcaaccaaggtggcgcctttcaaaacgacaccgtccggtaattccaaatgaggagcataccaaagtctcatgttgagagctggtacaagggttctcttagaagctgaagaagccgataatggcttaaccctcaactcctcgagctgatctctgttcatgcacaatactccttgaccatctgcatctgtaaggaccaaattatccaacgttttgtgctctgagattattggttggagtaagtaatgcctcgctgaagctgcaattaaggagctaattgtccaaaccactctcaattttaaacccccatttgtgtaaaacgaatctggaatgcttccattatcttcaccacaaaccccatcagttcccccattttcctgaccaccattaccaccaccaccaccaatcgagggtttcatcgatccaggcgaaatcaccgaagaagcaccgagaatcacgcaattatcgagagttgagccgaaatcagctctccatttcaacaaaacgccgtcgtctatacccaattcaccactgggaagctcgattctcagaaacttaatctcgttaaaattcttcaaaacctgagtcggagaatggtgtgtgacccctgcttgatcaatctcaccaccatcgtcttctgttccgacggcgagcgagccgaaacccgaacccgaaccggaagaggaagatgaggaagaagaagaagaagaagaggaagaagacgaagctcttttgggtccgagaaactgactaagagcttgaagaggcttaacaatgccgctaaaaacgaatctgaagagattagagaaaggaccacgagacttatccgatgaggaagcagaggaagatgaatcatcatcggagataacgcaatcaacacgaacgacgacgttttcaacctgaggaacaaggttatgaaaacgacgtgaaacaacacagcaccgacctaaagctttaacatctccgatcttgttgaagactagaagaagaacagagtcaggtaaacgatctaagtggtcgatttccatggaatctggttctgggtatactctacaagtcagatctggacgcatggaagacatttctagagagagaaagtgattaaaccaacgaagtgggtattgcccagatcgaactgtagagagagagagaagaaaaaagatgaaaactttgagattaatatgttggagaagagaagtgggtactagacagatctgaaggttgatattgcatgttgtttgcttagaaagaaagtttagagagaaaatttgtttaaaaaataaaaatagaaagaaagataagaaaaaaaaaaaaccctaaaaattgaatttttattttgtgtccattggaggttaagaggtagagagagagaaagctttgtttgttgcagccctttgagtattattttgtgttcatgttttatgtttttagagagagaaagttaaagagagagagagagagatggtgggatgagatagatccacggttttgtctttacacaaaacaaaatattaataataataaaataaaaggagaggatatcatgagcttaaggctctacttgatcttacatttatttatttagaaaaaataaaattaatatatatatttttaaaaaaaaatataatttttattaattggtaaatcaaacatagttagggatgcttctatgttttaattcttgttaaggattttaatctttattttggcttattccttattggagattaataaaaattaaaatactataccttaattattatttaataaattaatttttatccaaaacgcaacttacatactaatatattaaaaaaaatacaaattcataaattataaaatataaatattattaaaattataaaataaaatactaaacgaatttccgaggagtgtcattatcgtccctatcccgtttaacatttaggtacaaaaaataatctccgtcttcgcctcatttctcatttagacaagaaattcccgcctcataagggcaggtccctgtggggcctatctctatgggaaaaatgttcatttctagacatagttcattatatgtagatattactcatccaagctaaatcaataaaaatagactaattaaattgcttacattaaatatgacaaaaattgctaacagcatcttcaactaagtaactcataagtcatcatcaaaatgtaaagaatacaagatttacatcttgaatgaacatatgacaggtcacacttgttaataacaacccgtcaaatattttattttttaaaataataataattaggtttttttaaataataaagttaaaattgaattaattagagtttacaaatatgataattttattactagtattataaaagaaggcaatagatcttacactacttttttataatgattatagtttttaaacaatataattgcaaatattattacttaaaaaagatagacctttttttaaataaataaagtttttgttactctatatttgtaaaagaaaaatagaatataacgtagagttacaaatatggtaattttttttttattaatattaacaaagtttcttttctatttagttttagcaactaagattaactaagttgattagttgttaaagtaatgtatcaatataatttccaatctaaacaaaaagaaatgtgacattaattcaaataattaaatgagccaactcactcatatattgataagctataacttcttatagttttcaagcaaaacaaattttgatttacatagtaaaataaatatttaataaatgataataataattgatatcttaataattatttgtactttattatttatataaaaataaaattagtaattaaatatgatatatctatatccatctctatcacaatcataatcctaatccgtaatttggggcataatatgcttatagcacaaacaatataatcaccaaactttaccaattgtttccattttaaacaaagtataattaaataaataatatttgtagggtacctaacatggtatttattaatgtacaaactttggttaaattgcacctataaaatactcatacttattgggacttgtgtgtccccaattataattattgtatgtatgtatagtattgtattcattttttatttttctaaaaaagataattattgtattcttatttcccatactctatttttattttttaaaaaatattatgaaataatatttatatggattatttagtatttacatcaaatgggacaactcatgcatattgcccataattaatagtcctttttatatgactcaaatcaaaacaaaatcactctttataaatatttttttttttattaatattggattcttgtaaaattaaaaattatattttttccacctcaataaataatgtttagataagttatttattgatctaaaaatatatttttaaagtattagtgaaataacaaataaataaaattttggtcattctcagttatttggttgggaaatatgagaaaacttgatttttcttttgtatcataaaaatattaattttcctaaacaagatataagtattttttccaccacaaaggtctaaagtctaaactcagtattataaccacttaataaaatgaagtacttttttttttttttatttaagcatttatatattacaaccatgcataacttgggactcgaacctaggacctccaacacacacgcactcttctatggccacttgagctagcctcaagtggtttaataaaatgaagtacaacacttgataaaataattactatgcaaaataatttagtcttgagtctttaataaaataaattacttttttaagtaaataaaataaattattaatgacttgttattatttctcctcgttgtcggatttgtaatgtatttgttggagttataatcatttatttttaggtaaatattattttagatcatgtgttttacaaaagttattaattagactctctattttgttaaataacaaaatagaccatgtatttt

SEQ ID NO: 162475 - DNA, 1933 bp, Cannabis sativa
gcgtcagccattgacagatcaatggtggaagaaagaacctacgagtttgctaaaattgtactgtggtgtggggcttgatattggtgtgaaaaaaattagtgtaagggcagttattgatgattccagaggctgaattttaacttttagtacatggttttggaatattctattggagttcattgttgctgaagctatgatgatctattttagtgttgtgttgtgctctcgtcttggatgctctatggtggagattgaatcagattgtttcaatgtggtttgtgccatctctaatcatcatgtggatcattcctactttagatatattcttgcttattgtaataattttattagtatttattttaagttttgtcctaagatggcgaataatgttgcagactcattagccaagctagctttatcatttattgataattatgtttggtggtctaactatcttgattgtatctatgttgtccttcaagacggcatttcataatctatatatcttgagcactctttttgctctcgagatttcttattggatttactccaaaagttttaatgagatttattttctaaaaaaacaataaataaataaataaataaacaatagtacattttcaattacattataactatgttatacaattgttataattttagaataattactctttattaatcttatcttttagtttcttgcaacactttataataaaattgtttaactttatagtgctaaatttttttaattattcttttatttattgtaattataatttgataaaatctaatgtatttcttgtattatccaatcagtacatgtgttctaaatattattcttcttcttctttttctttttttgctataatgtgctctaaataaaattgataaagcacaaaacatatcttaatgtctaacaagtaacaagtctaatatagacattaaaaacaagttgtaattaatatttgtacggtgccttctcttcacttagttgcaagcatccaggtcttcactatcttcatcatctaaataataatttagatagaaatattcaataagaaacaaaacttgagatgaatttatgttatcaatttcattgcaatatagaatggaagcatgtacagtgtcatgtcaatacttcaaaaaaatataatgaaatttaaatactaaccacattcagtttcaatgttacaattgaaaagaatgatcaataaactcataccttataagatgactataattctcaattgacattagagctccataactccatgaattaagcttttcctttaactgtttaaaatatccaattgctgccgaaagaagtaaacatcaaactcaagcaaaactcatcaacatcaactaaatgaaaatgaacaaataactagcatacttaatgcacataataaactttgtttaagcttgaaacaaatatctaattattattcaactatatcaatgagtacgccctgaaccaccttatatatgtatacattatattttctcagtaacattaccaccaaacccaggaaaaaaaattgtatggtttttgtataggtaaagaaggtacataggatcttcctgctcaagaaaaatataagccaaagtatcataggtagtttggttttggttactgtaaaaagttgttgggctactctgctatgctttaaatttaatctattaaccatatcttccagtaaatggatcattgtacaaacgtgtcacaagtggcatggatctctattaacaaatttgttcaacaccaagctaactatatgcaaataagaaaatgatgcaaagcatttagattaaggcttagctgtatgcacatggtattagaatatttttattatggaaattattttctaattaagaaaatgattttctatttaaggaaataaataaataattaattttctgataaatgaat

SEQ ID NO: 162476 - DNA, 1475 bp, Cannabis sativa
tcaagcagtagcacaatcattgttagtacaacaaatgaaacatattcaaaatatgacaaatatatgcataagaaaaaagcatattcaaagtggcggtatgtaacatgatgaagattgttttggacacattgtcttcttccaaaaaaaacccataaggaaagaattactctattgaaagggcacacaaacaaatgagaattcaaaactttcctatcatgtaataaacatcattgatcaactatcaaaaataaagaattacacttttgaatgggttagctagcacccactacaaatcccaagaaaaaaaaaaccctccctaatctagttaatacgaattttctatgaaaaatggttacagggtgtataatgtcctcaatgtttctctcatctcttcttgtttttctatgtgacaatagtccttggcgcctcctttatgacacgataaccttcctcgaatttcatccatgaagaagggtagtctgcctgtcgattcagatcaatatgactccaaagacaaaagaatgctactcgtcctaatttagatgcaaaactaggacataaacaaattcaggaaaacttcaacgcagactgaccacgatgcctcatctattcaaatggtcacgcttccacaactcttcggtagaaaagaacataagcagctgaagactttatcttctctaggctgatgggattaacgtggctatcatcaaaatcgtaccagaggtcaccaccatgctgcatcagacaaaacaagcagatgtgtgaaaccttcaaaccatcaaaacacaacgaaatacagaagataatactactcccaaagtgcaaaatagactagatttctttgaactaggatcaccacttgcaccccaacatccataaccggagacacatcacaagtgcacaaatgggaatggcaagtctaattcaggtcatttggcccctaaataaagtttccctgatcatctgtcccgaccgtagaaaatagggtcttcccattttcctagacttgcatggacagaaaatatcctaacccagatcctatttaacaaaatgaactcatgaagcaggaacagtacttgcacacagtactggcaatgtacattacgaacacattttctaacgaacaatgaactatcaagcaaaaatgaatacttacgtgcacaaatgcagtataatgaccacctcccatgcttccaaagtgattactcactgcataaagcatataacgattacacaactgaccattttgatggccaatatatgttgacaaatcaagatcatcaacgggaaagtcaacatatgtttccagtttattcttcgaaaaccggctatattgaaaccgcttcaagtgaataaccaagacctcaggcagcctccaaaggtctaacttcttgctggcttgacggtgctctttgcagccaggacaaaacctgaagtacaaatagcaaataatgataaaaagaaatcaccaatca

SEQ ID NO: 162477 - DNA, 4395 bp, Cannabis sativa
tttttttttttttaatttctgttgactggagccaaaattactgtttttgactgatataatgatataattggtgtcaagatgatctctcctttcacatttgtatattttgaaatgtgctaatggatcgttttatgaggaattttatgtagatctgcaaatagcacgggctaataggaaaaaaatggtgattttggttggggtcggttttttttaattatacttcgtttttttttctctatgtgtattgtttggctcgctcttagcgactttgtttcatgtagagaagtgaaatctataaggtaattgactttaatgtgatggaacttaaatatggaggggatttttactacgtattatgttgaaccatagtgtatgttttgctttgagatcgaaacgggtgagaagagatgagaccccattttctcctctctggaaaaaaaagtgtctgggcactgcatttatcttcacttttaatcttttgttgacactttataattgtatcgtccagcctttgcattttctttatgtgttaattttttttttctttttggtttaattatagctgtatgccaatcgagccattctacaacaggagcatgctgttccagtccgcttctttgccaaagaagctggccgccctactgttcttaagggagatggtgagctaaaattttgttcttgctattaagtatgtgatagttgtatcaagctgtggaattgactacttttatctttgtacacatgtgggaaaccttgggtgaacatttgtgttgatgggatgggaggaatcttctcacaaaaattaagtatcaaagtttatttcaatgatgcatcaagcaattttaagtattgtagtcgttacacatgagtacaatggtatgcattctcttttacttgcaattctgctgacaatgtacatttgtttttgtgacaatagagatgttgaagaacatcttcctggaggtcaagaagaaattcgataccgccatggaagtgcttcgggcagagaagatcacaattgatcccgaggatccagctgcagtaactcattatgctaaggtcatgaaaacagtgcgggagaagtgagtattttcttttactttttttttctccttatttttcttttccgtttaaaacaaaataaaatcttgtattaccatatgaagcttcttgaatacaagaaatggggagtcaatatcataatacccaatagagtacagaaaaattataaaagttacatcacagaattccaatatttaatcaattaggaaaaaagaacttcttcgaattcttcacattgtgcagatcttgtgtcatattttttcactatcatccttatatcttcgaaaacccaaaaactgccatcaaatcaaggcagtgatcgcaagaatctgctcatctcttccctttttatatgaaacaacaatacctccatgcattgtgcttggaatggaacagattattctaaattcattcaagagcaattgtaacgttaaattgaataagcaattctaaaaacctaaaaatacaaggaattaaaaataaaagctaataaatcacaacataaaacaatactagaaatttaagagtataatttgaaattgcatgttcaaacgttcatagtttaaaatgtgtcacaaattgtctaacactatatttaaagataaactcttttttatccttagcagggcagcaaggcaataattctaggtgaaatattaatgatttttttttggctgggatgtcattactgttttaaatgatatttggttttgatgggcctattaaaaaaaaaagactgttgcaacaattaaaatgagccctctaatgaggaaagcttacgcctcccacaatacaggaggcaccatttcagttggcatgcctcacctcaggggggcataggccttcttttcagaacttaagccttaaggcccttttttactgcctcaaattgaggcctacctttataagcattgcttaaagagtttaagccgaatctgtaatgagtttgaccactatcctttgattatttcacttacacacgaaagcaggggaaaaaagagagaagagaactaaatgaatagctgttgatttgttctcactgtgttggactttaatttgcatgcaaaccatgtagggataattattcaattgctcctatgctattaccaatatatttattaccttataatattttgttctgttgtcactggtgggttatgtttttcctgtgcataatcttacagggcagacttattctcagaatctcaacgtattcaatataccattcagacaaagacacaagatatcccagatgctcgaacatatctgctgacattgaaggagataagaatcaagtactatttctattaatttactcttttgactgtccgaagtttagatgtgatttacatggatttgagtgcttcttttcgtttcctctttgttacacacatggacaccttctgaaagtatatgttaaatttcaaatacaagttttgaaccgtctggtttggtactctatatatgtttaatgttatgaatacattcacgttttgagagccaaattgttttaatattttccatttatctaaactttatatgatcacttattgttcgttgtctctttctgacaattttggcaggcgaggtctcactgacgaacttggtgcagaggctatgatgatggatgctttggaaaaagttgagaaagatctgaaaaagcctctaatgaggaatgacaagaaaggaatggctgttctcttggcagagtttgataaaatcaacaagaagtaagtattaatgcaaatttttatttatgattttataccaatttgaattgagaatatagatcttgctggtacccaagagggctctaattgtcagccatgtggtttgctcccacaatgtctgagtatcgagtcccttacctttatagcaattgctatactttcctggtcctcaaatattgtagggtttggcagggatcctagttccaaaaacagaaggaatacatgttactggtttaattttccctactgggcctagatttctctatttcttcttgctagttgatgttacaggtttaatactccctacgaggcctagatttctctattgtttgtactctattctttctttctatttgttttgtgctgcacaggatattgcatagtttcttaattgctttgtttactagactataaattctttcctctcttgctccgtcttcaactataagtataaaatttacaaaatataaatttagtatcttactatgttaagtaatctcaatcctctgtgaacttataattgttttgatcttgctttaacctaaccttattgtaatgacactatcttacattggcaacaaacaaacaccattgctttctttcccctcctaaattaattatttcttaattaatccaataatttcattttttctgtcatcttcatcttcagatatagtggtagtagaaatggatggtaagaatgtgtctcatggacaatgttttaatatattaaggttgacatgatctacctgatgaatacttgttacatcccttcactacctgtatgtcactgagtagtttagttattctcgtaggcatttgaaaacaaaatctgcgaattatagtggttgcttgcattgtttaagttacactatttctaactttctatacccttgtattgtaagacttggaattcggaaggaagatcttccaaaatatgaagaacagttggaactcaaaattgcgaaagcacaattggaggagctgcacaaagaatgctacgaggcaatggatactcaaaagaagcggtaatttgtcatggacttttttttttttctctcgtttatagcaaggaaaatttgatagacaatgggacacagtagatagtgattgtttgtttgggctgactacaatacaaattctaatatggaactcatgggcttttttattatttttttttttgaccatattgcagggaggaattcaaggatgaggacgtaattgaacccaagtctttggacatcagaaactttatctaagaatgttggttttcctaactggtggctccttttgaggtaaaagaaatgcttgtgcaaaacaaatttagggtatgaggagtgcctcaactatttcaataaagtcacttgagatttgagagtgcggcaacaatggcagattgatgagataatctgatgttttgtattttggtttattattgtttatgttgccaggagagaactagaatctgttgtcactggtcgcatttatcaagttccttgtttttttcaagccttaactttttcagttttaaatttttaagggagacttacagaagtacattacttgcaaattgcaataatcaatctgcaaaaaaaaaaaaaaa

SEQ ID NO: 162478 - DNA, 1248 bp, Cannabis sativa
tttttgataagtatgagaatatatatacttggtggtggagtggaggttggagaacgttgaataattgagaggtatgagtgtgacggtgcagttttgtctaatttggctacccaatttagtcgttatgatttccgtgttgaaatgggcaatatatagttttagaatattgaaataatgaaactacatgagagtgacaacatttgttttcctttgtttgattctttaattctgttaaatagtcttttgttagttaatgcatgataaattgaccgtacatttgtccacgaacttactcaatgtctattttcatatctattgccgaccccttctttatttagagtttgggtatataaatataatggtcaagtaaagcaaaagattaaacaatataaaacaataacatcatttagttatttgtaaggcaattaaacctgaaaacagattcttcccattattgtgttaaatcagcattagtttaagatagaaataataagtctggaactacaaaagttgtcccatgtacagaaaatgtcaaagattcgagtaggtgtaccaacagagttggtttgacggcaattccattacagatttacttacttattggttcattattaaattcaaaagctaatttaatactcaataatcctttttccatcaaagaagaagagaaaatctaagaccattcataactttctttcccttctgcaaatatattttcacttattaacattattaaatacatatttgatatatcattattaatcttagtgaatatatgcgcaaaatatttaaattacattaaatatgtaattactatgatttatattatttttaatcatggaatcattattgaaaaattacaattaacttaaaagttaattaaaattaataaataaattatttgcatgtacttctttttgggtaataattattcacatgtttctcaaatacaatatgacaatgaagtctttgcttgcttcgtgaattgtaagtatctcagcaattacttcgttaaaaaatgttgttcctgaaaaatagttaacacttgctgctaaattggcgtgaggttctagaagtggagtaaatgagagagaacacaagatttatagtagtccacttctcgtgtcgcgatggtaatagagctatcactacaacagtttttcttaataccggcggaggcatccgccggtattaataggccagaccgccggtaataattaatatcggcggaatccgccagtaattatc

SEQ ID NO: 162479 - DNA, 1737 bp, Cannabis sativa
atatatatatatatattattgtacgtactcaataattagtatcatctttaaaccaggattactattaaatatcctaagatgtctaatattatattaatgtaaagtattataaatgattaaccgtttcttatatgttaatgggattcgtgtcatattatattgcatgtaccaagagcaatatgcaatctcataccgtgcgtcgagtaccttaaagctccgtagcatgtctaccatatgcagaagcacgaaataaatgagttgattgaagtggatctagcatacgctcgacctattcaaattaaatatatttatgattaaactcctctctctgtgcatttatatatattatctacattatgtacttgtaaacaacatttcccaggttccaatacgaataatggaccatatatgatgtaagatcataacatcaggtctgctctggctccttatcaaaattaagctataataatagtacattgattttcatgtaagtagcccttgctctatttatcgacattaattcatattggtacgtaggtgtagaaaatatagatatgactaagattaatgaaggcctgaagtgtggaccatttcaattttgcatttgctcataaatgtttaggagcaaataatacgtagttgtaagtattaatgttagaatttagaatcaaacagcttaagatacaatggttgaacctcaaaattaattggcaataggaaaaatatttcattcatcttatacatattatacataataatttattttcacacattaacaatgtgcaattataactctaatgcacccttattactttttttgcttagaaaatgagtataatttaagagactacaagttcgaagatgagatatgaaagaatttaacaaggtcaaatatcgagaaatttgtgagtataggtgtcgagaaacttgtacattttgaaataggttaaagatctcaacactgaaaaatagcgcaaattagctaaaaggttccaaatagaggttaaaggtgagacaacagaagtttttaaatttggctcatcgttttggacaagcgatactttgggctcgcaacatatcacaaacgactgttttatggctcatctttttggacagcggtactttgggctcacaacgaataataaacagttttgataccgtgttagaaattgaaataaaagtggctaaagtacattggggtatatctcaaaactaatataccatgaaagaaatagcccataaatcttatatataacattttactctcacatattagtagtgtggaccaggaccacatctaataagtaatataatgggaaccatatatattagatatcgatggttcgagaaaaatcagattcaaatcttaaagctctcatttaagaagctgatcggtttatatggacagagactgacgcaagcaaggtgtttttcacctgcattactttgggtagggtcgtttgtaaattaaattaatgagattctaatagtattactataccagtttttatatatttgcatgcatgcaagctagcaatgcacaagggtttgcgtattgtttcaaatatttgtataatattgagaaaaagtaatgcacacaatgacatcgactgtgctgcaactgacatatatatatatagctatatagctatagcatgcacgtatatctactttagtaaataaaagaatctatataatatgctgggatctctctaaagaaaaaaaaaatatatatat

SEQ ID NO: 162480 - DNA, 4544 bp, Cannabis sativa
  modified_base (2297)..(2302): a, c, t, g, unknown or other
tcagcatttaatgaagaaagttcaacaactggtgtccaagttgacattgtgacgtcaacctagacgttttatgagtaggaaagcatgtcgaacttatattttttaattcttatatattgagattattacttggttaatttcttaattctaatcaagttgttcaccagttctcaaagatgtcactttttttgcaaaagtgggtagacacggaactattggaatttgcgactaatttgtcaatattccactttaccgaaaaagtgaattatcaaagtttgaatttgaattgtcacaagtcataactcttgtttacaacggaaaatagtcaaatgttcgtgacggaactagaatcgaataaaaagaacctagcgcactaggctatatgtcaacctgggggctaggtgctctttggagagcttctcgggactcgtttgatacttctatggcatttgagattgtgcatgaggtctcctaccctgttttggaccaagataagaagaattcccggagaaaattatatgttcgaggagcagaaacatgtgaagaaagttgaacatcaacttgggcacaaggccatgtcaacctaggcgctaggtccctgttttggccaccaaatgatctccttttcttctcaagaacaattgtatctttgttaattatgaaaataaataaaattatagggacacttcatggaaaaaatacttgaaattggcccaagttgaaaaatttttaacccatgcacaagaccaggcatcaagtcaacctggatgatgggtcctaattttgactaccagatgaatctgtatgactcctaaaaataatcgtatcttaatttttggtgaaaagagagaatatgcgcaaaagacttttcgggaaaaatgttttgaaatggtccaagttgacaatatatcaatttgggcgttgagttagccttggtgttgggtcttagatttggctcccaggtggatctatttgattcccaaaagtacatgtatcttaattattgatgaaaatgaagaatatgcacgaaagacttcgttagaattgttgttgtaaatggtcgaggttgacaatatgtcaacctgggtgttgggacctagcaccaggtcaacttgggtgctgggtcctagttttgacctctaggtcaatctgtttcttttccaaaaatacttgtttccacattttggatgaagataaagaaaatactcaggaaacatattcaattatgtggttggaagtgacccaggttgacaacatatcaacctaggcgctgtgtgcatcaccaggtgaactgggcatcgggtgcccaggtacctcaaatgggaagtgttttgattctaattctagtacctctagcatgttcatgacaggtcttactcatgtctaagacacagtttgagccatttttttgtactaagacaaacccgataactgaaactctagcccgagatgtcaacctagggcctggccgcccaggttgccttgtgggaggtcgtttcgacttttttcagttcttagggttcgaacttggattcttcttgactttttggttcagaatactgaaggatggtgagttagaaataacttggcagaatccaaacacccatttcagagttcccgaagtcaacattggcgccgggctagggacccctctaaggtcgactggtatgacttggggaacttaactctataaatgtttttcttcttatcccgtgtcaaacattgatgtccatatcactggggccaatttctaggtaaacaatcatcaattttattattatattaatatgtaaataataaaaagaatataaatacttcataatttaatgttataattaaatatactaataaaataataaaataaaataataaaaatgacataagtgaatgacataagtgtaaataaaaaaaagtaaagaatttattgtgatacaaatttttataatagcaaatattgtgtcaaattcaacataagattttctatgtgccaaatttacatctttttttgacatataattggagcatattttttgctaagtgagctatattttagtttttatcacttatttgtatcttcgttagagatgctctaatatgtattgattaaaatatgataaatatgtaatatctgcttttctcgaagggtaattaattttctttacacttagtttattttgtttgctaatggagataattaatttatcattttgaatatttataagtttagtggagtatgagattttttagtgacaataaaatttctgttatttcgtttatttttatttattattattatnnnnnntattattattattattatgtatagtatattacgtgggtttatgaatatatatatttattttagggttaagcttatagttaggggatatttgtaggatatttatgagatgcttttagggtttagaacgcataaagaaattgaaaagaggaggctgtgcgtagcaagcattgccgagaaagagaaaagtgagattttgagtttttatattttgagagtttatgggctgctctatatcgtttctttaattctatatcctctcatggagcttttagaatatgattaagaggtttggaatcaattcgttcgaaatcaccattgcatacgttcgaaaataccgttcttaaaacgaactcagatttgaacgtgtttaagttgtttcggagatcaaaggaggttgtgtttaaatttatggggccccaatgatcagttttgacgtgaataaatggggtaaagagctctgaaacaaaaaattacagttttggctccatgtttggcagtgtaccgtgtaatgagaagacgatctcaaactggccatttcgagacgaaatatcaatggaatttggcttctttgaggttaagggatccttgggaaaaaatttcaatcaaaaagacgcattgaaatagactgtggaaagagtttggagctcgtcgtcgctggagaagacgactacgccggcgtaactccagcgaccacaatctaggcaaatctgaagtgtttcccatctttttttatagatttcgattctaattatcatttaagggtatttggtgaagtttgataattttttgaatttatttagaattattataattatttggtttatttcctaaataaattatgaaaaaatacttaggttgctcataaaaatctaaatttattttagatgattagttatggataataaactgttacaaaattgatagattagatttttggtcgattttgtatttttcatgaattatttatgttatttctaaatttaattatgaaaaatacctaggttgttcaaaaaattgaaagttaattatttagggcttagtagagactataaaatgtgttagaatggttagatttggtttttgatcatttttatatttttcatgaatttatttagttgatactttttattatgaaaaatagttaagtgatactaaaagagtaaaatttatttttttaatgctatttactatctatgatacgaaacaaaaagggttttataatttattggttgcagtaggtatttattataattatttgtgactaattaactatttaattggattttaaatagaataaatagtaaaaattgtgttcactgtttggggaaccttcaatataatgctagaatataattatagtgtttggaattaattagagactatgttgtagggctgaacatcggtcggtttggtcagtttttttacaaataaaaatctgaatttcggttttcagtttggattggttcaatccgaaaatcgaccgaccaatccagaaacacttttaaaaccgaccaaagtgaactgtggtttggtcggttcaaaccgccaaaatcgattttttttttgtgttaaatataatcaaaatttattttataaacacattaatacaaactgtaaacacatcattctacattttctaagtgtaaccatacaaattataatgtctagttaaaagtccaaactctaaaacacaacataatacaacacaaatcaaatataagtccaaaaaaatattattccaaaaccacacaagcattaaaacaataatagaaattggagtccaaattcaacaagcaaccatgatcaccactttgcatctcccactagctcattcattgcactgtatcacacaaaacaaaacaaaaaataaattgaagatatcactatgcaacattaactattataatttctcacacttcaggcctgtaccacaatgaaattataaacatctaaggggctgtttggtgtacagttttccttactcatgaatgggaatattaaatctaacatgtgtttggtatacacttttaatttttttaaatggagttttcactttcctgtggcctactcttgcctttacattgagggaaaattaacatctctcaaaacagtgggttttatttagctggaaaattaacatctttaacttggtgaagccctagccgtcccctgtcccctgtccccttcatcttcatcccattcctttcctcttcagaattaggtctctctctctctctctctc

SEQ ID NO: 162481 - DNA, 5662 bp, Cannabis sativa
tgcagccgccgctgctcctcctcctcctgatgggttttgtactttatccatttcttgtggaagtttccggaagaactcaacagtcaagtatgaagcttccatgtcaaccaaccgtactactgtttttctactgttttcacggaacttttctagggcctcattagcagcagcagctaattctgcttggagagtaggaaagcgccttaactcctgttagtgacaaacatgaaagtgtgaatattctcaactaaaacaaaaaaaggcttctctttcacttttcatttttagctaaaggaataaaactgaaaataaccattccttgagcaaaatagcaatcaatcactttccctgaatttacctgagtttctcccactgatttcctcacaagttctttcaacacaaagtgaacctacacaataatttcaaagtaaaccaagagaaacaataatttatagttgttctttgaaaattaaaacgaaatgaagacgtgactacttacagcatcaaccgaagcttcagctggacccctaaaatagttgagtgaagactcaattaagcgcctataaccttgctcgggggcaatcaaatggggctgataaccatctgcctcagaaaccactttccttacattctgcagagaaagatgccgatcaaagggaagctttctcaaagcagcaggaagctggttatcaaagacgccataaatccggtcaccaccaggccgcctaaagattgaatacaaaggtaaggaaaatttgttagacaaattgaaatcacattctcagagaattttgacttccaaaaaatcactctcaaagactagtgataacataagatgggaaaacttgataaatgcattaccctccatccaaatgctccttgaatatccggtcaaatgcacgacaaagttccaaaatagtgtacaattgagcctaaaaaaataatgcttttagttaagcagttacacctgagaaatattcttattctacaaataatatgaatgaaaaatgaacaactcacccctgcatcaacagcaataggcctaccaagatggtccatctcagattcaagttcttcaatgcttttgttaatcaaagatgtgatgctaggtatcctagctctaattacagactccagatgctaaaaacaaacattacacagtcaacaagaaaacctatataacggaacaaaaattcagaacggcaataaaataatcattaaaagaaaaaaaattaattaaaaaaatccaaacctttgagagaagctttgccagatattctgaacccattttactagccaagtgcccatagtcaggactagttgcaaaatactcacgctccttgcgccttgcgataatcatgtctacatttttattaatgtcagcttgtgaacgattaacaattccaacccaaggatgttgcagcctataagatcttccttcaagaaccttacttgcagaatagaaaacagagtgaggcgagcacggataaagttttagaattactacttgttcataactgactaataaaatatacaatgacatagagattaatcacatataagagactgttttcatagatgacaaatgcattaatatgactttgatgtaaaataacaaagcctaaatactagctagctaaggaactttgaatataatataaagtactgaacaatccattaactataaaacgacagccatttacaatacagcctgtagttaaaggaatatgtgtagcctagagagagatggccatggaaatagatcttacatctaatgcattagttcctttgtccatcaaatcaagctttgtcagcacaccaaaagtccgttcacctgtgacagtttatgttataaacaggaatagacaaaatgatatggtaccccagctaatgactgccaaaacaattgactaagaaaatgatagatcatacctgcaggatcaacctccctagcaagtttgattgcatcagatgttgctatgtcctgattggctggagaaatcgctaatatgacacaattaggctacaaaaaggaaaaaagcacaaatttatctattagaacatcgatgatgtgcagaagaacttggaagaatttttattgaaattaattataaaggacagctgtaaaaatccagaaacaccagtacagaaaaattgaaccaacataaacatcttgtacacaaaaatagttatagaataatgagtcgtaacaagtacttgtacggaagtgcgcgtttaagtatttaaaacatattttctaagcaagaacctttgcagatgtctgcaaatgccaaatgttaaagcagaaaagaaggaccagttttcaacagaagaactcaattaccttctcaacgtaagttcgaaccatggattcgatatcttcaacaatactctcaggttgcccctctgaatagaattagcatcttttcagccacagaacttgtaaataacatacgcagaataggaattttaaattagcaattaacacaaacaacgtaccaatggcaacttttgtcaaaccaggtaaatcaatgagagttaagttgacaactgccagatgtataaaaccaaaaattagtgtgaaaaagaattatattgactgaaaaataaaaaaaaataaaaattcaagatgcctctcactaacttagttgagggacataaactaaaaacacagaacaagaactacaaaccataaggggagtagatactgagatggatgggaacaggagatatctgtttcgacctccccgttattctatcagtttcatcctgaatttctttacgaaccgaggctgtaaagacagtggaggaacaaaagattatcatgcaagtattatctcagtcatacacactgtaaaggacagtggaagaaaaggtgatcttttaaaaaataaaattaaattaagaaatgcttcaaaatcctagtttccatcagatattacctttaaataaaatttaagaatattgtaagcaaaaatgtacagggagatatatgaaagtataaactgaaattatttacatctaccaaacagttaataacattagcaaatctgtagatgaccaattgtaaacttgtccaaaatagacgcatcgaaacccacgatagattgaacataaaacagcccatataaactaaacaggtcaccaaaacattaacaaatcaactccaaaactacattagattcctaattgccagctctcgcggtaagcgtctcatgttttcgcataataattatgtaaaactaaaaattgaacatcaatttctgtttcatatacacgcatgttatccaggttaaaaaaattaacacaagaatgaatgagcaacaaatttgatcatgtacaaacagatatgaataaaatacatacaaaaatctgtgaatctcctcttgggtaggtgaagaaactcggcgtattcctgagttccatcgtctgtcttgtgaagctgcaagaccaaaggccgccttgtcacgatccctgcaagttttccaatccaaattccattatatatataaatacttgtaaaacaaaagagtaaataagaaggaaaaaaaatacaacaaaatttaaacgttaaatggaagctttgttaacctgatcctctaggtagaaagtcacgtccaacaatgctctccaacaccgaagacttccctgaactctgttatcaatttccaacaaaaaccagaacaatcagatactcatactgaccactgaaacagtcaaacgttctctctctcgctcgctctctctctgcctctaaacccacaaattcaatcaaccactagaaaacctcaggtctctgtttctaagaagaagaagaaaaggacaattttcgtgctctaaaatccataacaaaccaccacctttgcgaatataaaaccagaaattgaaattcagaaacctcaagaactcaaccaatcatcacaaaattccaagttttggcgcgctaaaaccctccaaaaaagcatataagttgttgataagcgaaataacagagaacgaagacacacctgaccaccaacaacggcaacagaaggaagagcctcccatagagaggagaaggtgttatcgccacctccatagtctccgagcatggtacaagcccgctgaatccgattgaccaaaccgatcaaactctccatagtagtcatcttgagctgtcttgttcttggtgttgtagctgagtcagaagaaaccgtagagaaaccgaaatagaatacgtaatcttagtagggaagaagaagaagaagaagaaggaggaagaggttggaaaagacggcaatggtaagggtaggggtaggggtaggggtagaaatggaataagaaaaagaaagtggatatttcagacaagaaagaaagaaagaggagagagtaaagatatagtgcgagagaggcacaccgttaagtttggaagaatgtcttgtgttgtggattggtttccagaaggaccggacgcgtttgaatttttgaattttgaaaaattgttgggtttaaaaatcacacttactgtgggtcccacctttttctattatattttcactgtttctgaggttgttggcggcggtccaatctatttcttcttattattataaataaataaataaaatctatttcttcttcttctttttttttttttaaaaaaaaaatttccagtttagtccttaaaagaaaatcaaaataatttgcaaacctcttacaattttttttttttttcgcaaatctcttactttagctataaaactactcagaatagagtagctaatatggttaagaggtaagttatttaaggtaagagtaaaaaaaaatgatgaacaatattgtgccatcaaataaactattatgtgtttcaaaaaaaataaataaataaataaattttaataattagataaatgttatatttagtgtaattttattaaaaaataaataaataagttattataactaaaatatttagctaaatgcgtgtcgtgctttaaatatagatcatgtcatattgtagcataaaaaataagggtcaagtcgggttgggtcataaaaaaaaaacaggttgtggcgtgtcgtgtcataaaaaatatagtctgtattgtgtcatgctcaaattcgtgtttatgctcgaatttgtgttgtattttcttatacgtgctcaaatttatattctatgttttacattttatttttgtaattaatgaaatagttactaaagttatgcattttttatagcttcaattatttgtatataatttttcacataaaattatataaaaaattcattaaaaatattaaaatttaaatatttactaataaacattcaaattattattagaattgttgccctagattttccccaaaatacatggacctggataaagatgacacgtgggagctgtaaggaccaacacttatggaaattaactaagtcttagacaaaagaagagtgcctcagggagggtatctcccggaggaggcataaagaatatcgtcattctccgggaggccgaaaacatgctaaggttgctccgggaggtactgagatctattgaacagtcacctcgcatttaatgctgcatgggggaggcgtattgaaatctccataaacgacacaacagatggcgtaacccccctttttcggctattacactataatcaataaggctagtgacggcta

SEQ ID NO: 162482 - DNA, 1851 bp, Cannabis sativa
aattgaccataaaatcaataactaccacttattattagaagcttaattattattaattattacaaacaataattaattaactaatttcacacttaaacctattacttaattaatcaatatttaaggaagagaattaggtaacaagacaatctcttgctcacatctagtgcagataaatacatgaggaacttcttcactattaggaatcccaacacaacgagtatgttgccaagtctcacaaatgtcacacgagacccttctttctccatcatcatctttggccccacaaacacaatccataacactttctttattactattactattactattagtgctattaataatgttgttattaatgctagagctacatgatgatccatataagcactcataactattgataatatcattacaattgtatttagtattatttctaccaacaaaaactagtttttgaccaacttctgaaaccatcccaagagccaaatcggttccctttgtgttcaagttatgaatagattccacaactaagctactcaagctccaataaatctctttgaagtttttttctacttctagcttcaattcatctatggtagcatttttattaatactcacacactcatatggaggcaatggcatcattaatgacttgttcaccaagttaccttcttcactttgagtagtagtgtctttcaacataattgtacaacacaaattaaattttccttccaaacttaactccatttttgatgaaaaatcattgtggtactctttgataaggtacttagtatcgagtacaatccttaccgccaatggaattgctgaaagaatattagtacttccatctccattcatagagcaaattatgttgttttggtctttgagaatgtacttgtacaaataaaacatgtctttcatcaattgaaatcgtgtgattttgtattttgagtattttgttttatcattattattattaccttcacgatgatggtgatgatgatcaggaaatacattcgaaatgtcttctaaacaatactcaagaacttttgtgacagggtttaggcttcgtcttaccaagtaattcccaacaatttgattaccaagtgatttgaggacaaaatctaataaaccggtatctccaatatagttacgagctgcatccctaacttgttgccttgaaacccatctaaattgagctcttttcaaggcttctacaataaccctagtggccatttcgactctttttggagaccaacgacatgtagtttcgaccaagattccagggttgtatgattccatgttggaagtttcgttggggaggcgagacttgagttctaacatgtaatggaatatgtcgcctaaggtagtcaaagaatgatcagaaagtgtttggtaccttgagattattaaaggtaagtcacgatttgatgtgcaaaaatggtggataagaagtgttaagggtatgcctcttaaggcttctagggctctttggtgcatttgttgtgtgacacaataggttcctcgaccaaacttgtaaccccaccttccgaaccatggctcgccataagcaactccatggattagcctcaattccatgcctctcttttgggcagtgtcgtttagactcactttcctataaatacaaaataaacatggtagtaagatgtcatattgttattgatgaaatttaatattaggtcttatatatttcaatttaataactattatattaattattctgtcacttcataacaatgttagattctacaaaaaatcttacttttagtcacaacaaaagttgtgactaaaagtaaaaaagtcatgactaattataaattatcattt

SEQ ID NO: 162483 - DNA, 1987 bp, Cannabis sativa
taagatatataagcatgtgctaaaatatatgttgtaaatatattagatgaatatatataattaaccggccactattcaatattataggtttgctcaaatatgaaaatgatattcattgatatcctatatgtaggtagaactgatcacgaaataatattataataatgatgcatgcaacaaataaggctgttataaatatagtattaatatttaacaactatacatacattattaatgttgggcaaaaatgtgaaaataattaatattaatataggataagattgaatcatggaaatcgcatttattattcccttttgaaattaattaagtactcgtggtattatatatattaacaagttgtgagttaaaaataaagaactaaaaatggggtgtaaataaatcagttcgtacgtacatgttaaacatctataaatagagttatcatttcctctttatttccaaaccaaaaagaaaactcccaagaacaatatataagtcatatatattatataaatattattcccagttacatatatatggctgaattagaagaaataataacaccaaagattttgcggccaagatatggaagtctcataacaattcttagcatagatggaggtggtattagaggaatgattccagctgttatccttgccaatcttgaatctcatcttcaggtaaatatatacatatgaacttaattataaatataagagtagtactattcgttctattttatatatatgttaatatatgtgtataggagctagatggtaaagatgcaagactagcagattactttgatgtaatcactggagcaagtacaggtggtcttatagctacaatgttaacggcaccaaatgagaatagacgacccttatatgctgcaaaagatattattgaattttaccatcaccattcccccaaaatcttcccacaatcaacgtacgtacgcgcctttatatatattattcatgttaataatatatatgttgtatgttatgtttcattaattataattaattattggatctgtgttaattaattaatgcagaagttatttccgttcggctgtaaatttaatgatggatctgctgtcccctaaatacgatggggtgtaccttcacaaactcttaaaggaattattaggccaaaagaggttgaatgataccttgacaaacttggttgttccagcttttgacatcaagaaactcgagcctattattttttccacttattcggtaggtactatatattatatatattatataaatatttattatttatatcaattgatcattattaatatattcatatataattacaggcacgtagcgacaaaggattggatgctcatctttcagacatttgcataggaacatcagctgccccaacttatctaccagcctattatttcactaacaacgatgaaaatggaaaacctagagaattcaatctggtggatggtggtctcgccgcaaataaccctgtaagaaaataataataatatttatattatataaaaatgattattaattaattaagtaattaattaagtaatgatgtgaacagactttggtagctattagtgaaataacgcaagagataatgaagaacaacccggacttcaacaagattaatgtgagggatttcaggttcctggttctatcagtagggactgggaataataagacagagaagaagtacaatgccaaatcggttgctgagtggggcccactctcttggatatatttcaatggaactgctcccattgttgactttttcatggaagctagcggtgacatggttgattatcatactgctgtcgtttttcaagcctttgctggttctcgagatcatttccttcgtattgaggtaacaattaataaatgctagcatggcatggctgttaataaataataattatatgtatattgcctgcaagttttatggatctagttagtgtacaagtttcaagaaaagt

SEQ ID NO: 162484 - DNA, 1489 bp, Cannabis sativa
  modified_base (1422)..(1422): a, c, t, g, unknown or other
ttaaaatgtaagttccttccaaagataaagaacaccgaaaaagagagagaagcttctacaaagaaaatcaactcattaatatgtctataatattcttttgatacatttatgagcaatataacatatttatgtcctatataaataaaaaaaattatatttacatataataaatataatatattttagagtgtatactattacataatttattagtgtgtcatttttgagtcaagtcgtgtcaatcctaatataatctaaatctgtttattaaatattaactaagttttcagatttttatctaaaatgagtttgagaataacaagaaattggttttaataatacacaaataattcactactaatactgtataaatatatatatatatatatatagtttacactaaatccatctactattaaactgcatatacataaattagcctaaattacctatccttaaaaaaaatattatatatacacacagatatatatatacatatatttttcatacaaaagatacatattgttcttatatttttttaaaaatatatatatatatatataaacacatagatatatatacatttttcttacatattaaaatattgaaatacatctaaaatttaaacatttaaatactgaaataaatcaaaaaaatcctaaatttaaacaataataacaaaaaaaaaaaagaaaaatcaaaatcaaaacttaatttactcacattatcaatgtcgactgaacctcttcaaaaaatatccctttgtcgcctatcaaccatcctcatagccaccctacagagacgggtgcatcgacggcgacagagacgagtcgacggtggctgggcttgaaagataggggtcgttggtgcgaaatggctgagaaagaaaagggctgggtttttttttttaaaaaaaaaatgacacgtggtggggccagcacgtgcgtgcccagtgtcgtgccatttaacttcaattggcatgccatgttaaggcatggggtccgacgtggtcgtgcccacctgtgcaagtgtaaaaattcccgccttcaacaacgagcatttttcaaagcggggcacgactttttcgtgtccattgggccacatgtcgcgcccatgtgcctccaaaattaaaaatatataaatatgggggcacgacagtagtggtgtcgggccaaagtataccaaaaaatgggcaccactttaggtcgtgccttagttggacgtgccaatatcccattattgttgtagtgttacagaagatgaagatgtaagctcttctagtacaacatatggacttcaaggcatcataaaaggagaatgaaaaattgagagaaaggcatggaaggagacatttgaattgctcgagaaggctcatagtgtcattattctacgtcttagggataaggttctgcgagaagtatnaaaaaaaaagagtgcatgcaaaaagcttatgaaagaagcttgaacaactttatatgaagaaatcatt

SEQ ID NO: 162485 - DNA, 2274 bp, Cannabis sativa
  modified_base (277)..(282): a, c, t, g, unknown or other
aaatgtaaattttccaaaaaaaaacatcttaggaaagcaattttggaaaaaagaaagaaacattattattgaattgattatatgttttgacattcatttgattgaggattgtggagactgtgagtaataaccactcaatccatacataacacataatattatatcctcactattaattatttcaaatcttcttctatacttattgttcataaacatcttattattaaacttattcttcaataaaaacccactccaacttattattattattattatnnnnnntattattattattattataagaaccataaagagaaaaagaaaaatgtgtacaaacataaatatgtattaataatcgaatagaatgagttattcggtaaatgatgtgtttggtgtgaataaatttattaaataaaatatctaataaaatgatattatatacatattatattatgatatttaaacaatattatatttttatatactataaaatatccaataaaatgatattgatatatatatctttaaacaatattatatttttatataccataaaatatttatctacttcaagctagctagttgtgctaccattataaggtattattctataatatagaaaattcttttgtagttataaaaataatagtcccaatttaaattagttatacacatcattaagatctacattttatttaataaattacaatgttgtaaatcttaaattaagaaccttgataaatgaatattcaattgccttataattaatatttaaaataattttaaagtgttttgtggctaacttgtgttttaactttttataaatatacatagatagattgagataattgtatataaaactatatattgttttttaagatacatatattttgcgttttattccaacaaatgcacatatgatttttttttttttttttttgaaaaacttattatttttaacaattttttttttatcattattattatttctatatatatatatatgtttatgtgaaaaaagacaaagatttcataatgatagaaattctatatacttataatatatttaaacaaattatatacttataattagattggaataatatatgcatatctcttcaattctttttttcagtctttatttattatattaacacattcaaatcattctttaaataatgcataatttattccgcaaattaagaaagggttgccattcctaaaataaataaatataaaagattgtggcaaacaactaatttgcttgatattgactaataataaattaatttgcttataaaattgcaaagcatccatcatttccccttcgagtaataattttttattttattttattttttttaaaaaaaaaaatcttgaaagttttgactccctaccatttaataaatgaaattggattgtcaccaattaatttataataatgttattgaaagcaatctactcttatttttgttctcttgaaaggtattaatagactatgatttgaaacattgtttgactgaaatgtctttcataatattaagagatggactatgactatttatttttatgtatataatcagcttagaatctatacacaataaaaattaattatatattaaaattgagtgaatataaagacaaatcactcccaattaaattatacatataatttggcataataaaaccacaaaaaaaaggtataaaattggaaaaaaaaaaaaaaaaaattgcacgtgtgataggcatagcataaagaaaaaaggataaaagtactaaaatagtgcatcctaatttgggataatttcaaaatatatatatatacatacaaaaatagcaaaaaaaattataaaaatactgtatggaatttttaatatttttaccattttttaaattttatttacataaaatacggtattatattcttgttattttattgtttattttttgttatttgtatattattttttatattgttttgatattattttattattgttttaatatttgttttttagtattttttttgttattttcttgcatttttatagaataccttaaaaatatatttaaaaaaaataacttttaaaaatataaaaattatagttttatataattattcttattaatttttgtaataaacagttatgagtattttaaggggataagttgaaaaatgcctcttttattaatcaattaaccaaatttgcctctaattttatatttatttgaaacatacctctttttatgtgtattgtacccaaaatacccaga

SEQ ID NO: 162486 - DNA, 4869 bp, Cannabis sativa
  modified_base (4828)..(4833): a, c, t, g, unknown or other
accatgtaaattttcctattttttatccaataatttttcatttattttcaaatgttgtaattttacgacccatatgtgattgagtgggcttttgcttagaatgtttcgggtatagtagagccctcctttatacttatcttattttttgtaatgacagaaaggtctaactcttctttattttataaacgctttattaaaaaaaaaagtgaaaatataggaaaaaatgaaaaagttcattgcattttgaaaaaaaaaaaaaaagagtaaaatgctcaccaagggtggttaatgcgcacgtgtgaggagccaaaagggtgaaagagtcaacaaggacaacatacgcgtatgtaaagtgaagttaaaagtttttgtaatacggtgggaaccataatttgatcccacggctcccgctctttacacaatcaaatatccaatccaagggggacaaacagccgctaccagcctggcccccaacccatcccaccctctctctctgtaactctcgctttgaccaaaaccaaactttgttaaattattaaatataaaattaagttgttaaaaacaccaacctttctatcttatttttctcattcgttcatttctttaccaacctgtaacacagaaacataccgataattccaataaataaagatttgatatcatttacaagctttaaaaaacttgagataaatcaagtgacatgctttaaatttattttggagaattattttaatacaaagaaagattgtgggaaattctcatgtgtttttttggaattctatgaataagcttagcctgcaacaaaagtgacgttcacaaattattttaagatttgatatatgttttttaatttcgagtatatgtatatgtagtgtaaaataaaagatgaatgaaatcgaatgggctagatgatatccccacattcgtattaatgttaataataaacatcaaaacaagaaagaaagaaaaatatttatcgagtgtccttttattgaagtgactttgtgccacataagaggtccacgtctcacatttcctaagcttccaatactaatattattttggtccccccttctaattaatctctcaatatatatatatgtaagtcatatataataataaaaataatattaataataattgtacctttttagtttttgggggtatacgcctctttctaactatatgtctcttatatataatatcaccgctaagacccctgaccatgcccaatattgcctctctctctctctcaaaaatagaacaccaaactcaaataattctcttctcttattaattttgtacttatacatttatatattatatatatatagcaataagaaatgggtgttccaccagttgtgatgaggtcgacgaaaaagacgaaggccgttgggattccgacggttgatctgtcgaagcagggtgacaggtcatcaacattaatggtttcggaagccatagtgagagcatgtgaggaatatggtttcttcaaggtggtgaaccacggcgtctccaaacatgtcatttctagattggaagaagaagggaatggcttctttgccaaaacctcagccgagaaaagaagagccggcccagctgctcctttcggctatggctccaaaaccattggcccaaatggcgacatcggcgacctcgaatatcttctccttcatactaatcctctctccatttctcacacaatcaaatccatctccaatgacccaacctcattcaggtaaaactatacacaataaatttatattttacatgtatttggcgtgttcatgcgtagtttgaggcgtgtttggttcgtttttatatatatatatatatatttgaattattgtttaatatattttgctcaatatagttagacatggacgtgttgtataatgtaatgtagagagtattatcgacacagagagtttggggcggagatcaggagtaaatttttatattttcttctataaatcggtgggaaaaagattgttcagcattaattatgcaaaaacatttatatatatatatatattctgatatttaatgctgattggtatcctagaaaaggacaactttccttaatatggaataaaataaagaaagaaagtataatttaataaaactgcttcacattattctaaagttcttctatgtggtctaccttattatgtcgatcatcatcgttattcatttaataaaaaacatatatttatattattattatataggacatggtctacgtgatttatattaatataaatatatatatattattagttgcacggcagtctttcatgacctgttcatgggctccatcttgttttgaccttcatgcagacactttctatttcgaggttttcatcaccttatctagccctttagatcactgactgtcactcaaattttacgggaaaaaaaaaacaaataaagataaggtggaaaaaaaaaatatacatgtctgtcatataggtttctaatttagggttccaaatagtgactagttcagcaacaatagtagatgagctgagatagccagctagccctggactggatatggcctcatctgccaagtgttttcttttgcttaaaatttgagtaaagtctattaggaaaaaaaaaaaaaaagttgtgctacacaccactgtcataatttttataatatttattagttttttttatggataatagttattaaattaaaattaaagttattaatgtatattttgtacagccggcagaagattggatatttaataatgggaatggaagatcagataaaaagagtagaaatattaagatgaattctatatattagtactatacttcattattaattgccctcttttactgtcagccactaacacagatgtaacatgcatgtcatctttcctttcaataatttgagaggcatatctctttaggttttagggcttagactctactcaaaattaatttcacttattttttttttaaaaattttttccttttatcttttttttcgtctttattcgtctatcaaatcatgagcttttaatgttctgactaaaatggaattcaaatatttattgcatgcatgggccggggtcctatgtataaaagagggtgaaacattgtatttataagcttagtaattctattatatgtgatgcgaagtcgaacaatattgtcgacaagacggatgggattttgatcttttttgtaagagttgacatagtcaaaactccatataaaacacaaacatattaattatctacagctatggctagctaggtataacatttggaccccaaattttgaacgactatgacccccatttagatccgtacacaaaaagataaatcattagccggtagtaataactgattcccacgccatgtcaacgatgtcattatgtgcttctagaaacacttattaatgttaatatttcataagcaatgacgacatggaaaatcttagttacttttacaaaatttataagatactctatgttatgttattgagtgattaattaataattgtttttttttttttgaaatgcattattagttatgcggtgattgattatacggaagcagtaagggagttggcttgtgatattcttgatctagtgggtgagggcctatggatatccgacaagttcagctttagcaggctaatcagagacgttgagagtgactcactgcttaggctcaatcactatccacctgtgactgtaaaggatcgggacccatcttccttcaaccaatacccacccggtaatgctactactaaccctattggatttggagagcattctgaccctcagatcttgaccatcttgagatccaacgacgtggaaggcctccagatctccttgcatgatgatcatggtgatggcttctggctctctgttcctcctgaccccaataacttctatgtcttcgttggtgatgccttacaggtacattattacttcataataaccttctctcatattaaaaaaaataataaaatgtcattttcctatgattatgtaatattaaaagagatgaaatttttgcctaaatttactgatgggtatttttttttcttcatatatgtgggaaaaatgaaggctttgacgaatgggagactaaagagcgtaagacatagggcactagtgaacacagcaaaaccaagaatgtcgatgatgtactttggggcaccacctatgaatgcatggatctcaccactacctgagttggtctcttcagaaaagcccagtctatataagccctttacttgggcccaatacaagaaagctgcgtactctctacgattaggggattctcgtcttgacctgttcaagaataatcattcagatatgttaccttcatccccaggaagactattactcccataatgagaagagtattaattagtcattgaactaattattattgttatatatgtagaagttgtaagtagggaggagcaatgagttgtcattgtatatatgccacatgttaaaaaggccctttcattgcctctcgatcgagcagtgagaggatattttattcccttcattattgtattttaatatataaatagggttatctcgttggttggtaaaaatgaaaggtatagtagagagttttaagttaggaagaagaataagaagttatttatattaatatgaagaattagttgttgtgcttgtattattaggtatgtatgtaagagaaatgtcttgtgaattgtggtgttaaagtactagaaatttcaatgaaaattctttttggtcaatgtgatctgtagctggacagcaatttattaatcttcatataaatatatatctttatatatnnnnnntgtctatctaacggcaattcttggtttaacagaata

SEQ ID NO: 162487 - DNA, 2952 bp, Cannabis sativa
ccattataaacatgctccattttacgttcatctgatttttgatatccatttatgtaaagctttacgtgcattgctagttgagtaaagttttcttaacaacatttcttcattgcagtctattgtttttatggctgtgttttatattatgaatgcatggcataagtagatcgtaaagtcctgcatacatttttttctaagtttttaatgatctatttttctttctaatttgttagttatgaagcatgggtcatttataactttctctcactgtgcctggcatgggttggtggcccaggagctgttgttcttagcttaagtggtcgagttctaaagccttcttggtatctgatgacatgttgcttacctcctctaccgttggatgggtaagtttccaaacaaactttatttctttctattagtggatattatgcaacacactgtttatattgtacaattgcaaaaaataagataattaagtgcaaatatatttttcgaagtgctagtaaattctaagaattctctttcttgggaatttgattctcttacttaagagaaatacatctttattgttcttgatttgagataagctttctatggcatcaaaccagaggggatcatcttacttttccaattcttgtagaaaaagagaagcaattttttttctcttagtaatgtgttaaaaccagtacttaaatctttttctaaacgttcgtgtatattaatattgcacaatgaagattgtttgattgactgacacttgtgaacctgttgatgcagacgctttattcgtaggtgcaagcaaggctgtttacagtttgtaattctgaagccaatattagttgccgtcacactcatactatatgcaaaaggaaaatacaaggacgggatttttaatccaaagcaatcatatctttatcttactatcatctacacgttatcttacacgatggctctatacgcattagcattgttttatgttgcttgtaaagatctgcttcagccattcaatccagttccaaagtttattataataaaatctgtcgttttcctgacttattggcaggtaaaaactgttcacattgatcatttcatctatattatttttattaattatgatttaggacatggtttcaattgtaagcatacatgaggtgtgaattctggagtaaggtttaaggggagttttgacaagaattttggagcttgtcaatagaaactattaattttctatgtagaatagattggttgggtaatcaagagtattattgcgtgctaattcatgcatattgggaagcaactgtgttattaagaaggtaaaccaaaatcgtacttcatttcaatatggttctgatcttgttgctttctatctccagggtgtgttggtctttcttgctgcaaaatcgggatttataaagaatgcagaggaagctgctcggtatcagaacttcattatttgtgttgaaatgctcattgctgccataggtcatctttatgcattcccatacaaggaatatgctggtgcaaatatcggcgctcctcgtggtttgacagggagtcttacacatgccgtaaaactaaacgacttttaccatgacacagtccaccaggtaaactgtgcatgctatgagctgatctttgcctgtggattctcacagagcactactatatttggctcaggctcaagctggctgatgagtatattgaactttttatttatttatttgttttattcttttgtagtttgcacctacttatcatgattatgttctctacaaccacaatgagagtggtgatgaggggacaaggaagtatcggtcacgtacatttgtgccaactggaccagagatggatgcagtcagaaaaaacaaacacatgcttggaaacaagattgatgacatacagctctccagtctctcttcttccaattcaagcactcctgaaaattctcaatcgatgcctgattctgctaactccgaggcaatgaaatcttcactgcttgtggatacatcaacagatttctctgtgccttatgacatgtctttaattgacttggatctttcaacttacccttcaaaggttcccgccgttaaggaaaacgagactaggtgacaataatggatgaagttgttgttagttgtgtaagaagggtgtctgtattctgtattagggaattcttttttggtttgttaaattgtgataggagagaggtgggatgttctgttcttttgcaaagccctaattgtgtgctgatattggtttgaattctttcttacccatcagcttaaagtcatgtaccgtttaaaatgtgatgcttccaagcgaagttatccttaaatggtcagtttgtccagtgtgtattgtttgtagataaggaacttttagttgtcatgaattaacacaccacagaatcaaatgtagaataattgaccttccattttattcaattcattgctttgttcgcccacttctcttatctactatgtaatttcacacaaccatttattctcatatgatatctataagttgttttgaaattgcagttaaatgcaatgttcttattcttttcaagaagtttcaattactggtatttaggtcttcaactctgcttctttcttttctgggctttctttttgttggacaaaactctgcttttttaaattgatatcaaaaaatgatttgatcctgctttaaatgtccacttgagctaatttggcaattttttataggtggaataaactggaaagaaaaaggaaagtaaaatagtaaaatgctagctggtctgtgaatgctcctgtcctcgacaaaaagcattggctatcttaagtaactaatatagttttaattatatttgtcttattgtacactttcattacagaatgaagtaaacaattgtaattttcataattatcgataccaattaatatatatattttaggctaattaagattttat

SEQ ID NO: 162488 - DNA, 6156 bp, Cannabis sativa
agcttcacctgttcttctctaatccaataaggaatccagcttcaccaagtgctgcaagaaagcttccttggccagcatcttttccagtaactgcatattcacttacaaaagcctggagaacacaatgtcaagaaaaccgacaaattgatttaggcgaaagatattttgatcaacaataaaaaacagcagatcgattcaagtatcaacaaaccttaggtccactccgtgatgcagaatcaaaatgacggcctctggagaacatgtcactggagcttgtataaacctaacaaagaaatgagatattgttacaacactgttactttacatgccaaatacaaaaacttgtgttagaaaattataaataggtctgattgtaaaaacatacatgataatcatacaaatcagctgggtgatccaacttttgagaagaaccatcacagtttgtaattattttaatatctggataggcacttttaatagcgtcatagaatttgcggtaatttcctggtcaaatgagaaaataagtacagaatccattttgtcatttaacaaaacagagggtccaactactctgtccaactactctttaattaacattcagaaatatgcaaacctttataattctttttccaacaatcctcattccctatagcaacatatcttaagtcaaagggttctgggtgtcccatggcgaaacgaacagcaccccatgtagaattggcctcacctctagcaaactcaataccatcaagggcttcctgtaaactcaataaattgattagattgatttaacataattagagcatgtattaattactatagtaggaataaaaacacatgcctgcacaaatggtaagacactagatgtgtcaacttcatcctggtgactgattcctatgatcatgaaacgggaaaatgaattatttattgttttcgaaagtaagaaagctaagcttgagttttgaatcgaatgaaaagtaccgttgttgaaaacccatattggcaatgtgccaaggtcttcagctagctgcagaaacaaattatgttatgttagaatgcaatggaggaacataaaacatcgaaataaatatagttttttttaaaaattccatacttgaagaaactcaaaataacccattccgtcatcagtccagtacatccaaacatcaccaaaatggccaggtctctcctcccatggtccaatggtttctttccatcgaaatgcattccttaaccattcaccttcaacaaaacagccacctaatccaacataaaattcagtgtgttaagttagaaattttcatggttccaacaaaacatcaccacaagtaggtttaggacaacttgaaccaaaacttattttaaatctgcaagcgttgacagtgacaatattttaattttacctggaaatctgaagaaacgaggtttcaaatccgccatcatttcaataaggtcagttcggaaaccatgtccctgtgccagaatgatggtgttagaacacattcatcagaaatcacactaggtttgatcaactataaggtttttatatgtctttccagtatggggtcaagaaatcacattcaaatgctcatattcagatcagaattaggattctatcacaatgcaagtgtatattttcccattcaagaagcctaagtgagaactcataaggaaacaatgtaccttataagtgtccaagggcatgactgatacttgatcaaaccatatgacccctttgctagtagttgttaagtgaaggcttgaattactatcacttcctttagcttctaacacaacctcaatctttttccaatctgaaacttcagatgcagaagctctgccaaagcagcaaataaggatgtttacataatgttacttagaccataaagatgttttcaaatgtttatgacattggtttggtgcttacataatgttagtagctgccagcttttgcaaccaatttgaagcttttaactctatggatacattgattgatcctgatgaacgaacataaagagcaaccttgtactgcttcccttgttcaatattctaaatgaaaagtaaaaattttgtaatgcaagaaaagtatcgaaaagatgcatagttccaaattagtacatggggtgttggtagtaaaagcttctcaccatgccccagaagccagggttatatataccaacaccttctgatggacaggaatttgcacctttgctgtcacaaagtacttccatttttagtgcaatcttgttacgttcaaagcatgaagagcgatcggtcgatacaatcacagatgactcttttccaattataccccagggagcaatgtttgatggtatattagggcccccagcctcaaaacctgaaatcagttttcagtatgttaatactaacagtaacatgagaaacttgaacattcctttcacctttaaccagcaaagcaaaggccaatgttagagaaatttctcaattctaaaagaagtaattaagtaatattattaatttcactccaatattaacatacaagatacaacaacaagctgaggcaattcatctatgatccacccaataggatcacagtttttcatttgtacatttttcaaacatgacaagttttgaaagcattgtttttaaataagagtttttagcggctaaaccttctcaactatcatttcacttgcatttaacctttcaagctcaaattttagcgataaaaccttccaaactactaaactgttaacaaatttaagttgtcattcggttaatttgtagtggttttagaactgacctctgttgcttacaagctcagaccaaatgccaccagcaccagcatggttaatctcctgcagtgaaagagttttatgaaatgatattcactactacaatttatacatttagtgacacaatttagtgacccgcacatttttaatcaatttttagtgacccacattgctacacagtaaaactttcacatatatgttcaattatatcggttactagacagtaaaaatttcatatatattttctattatatcggttactatacatttgaagggcaactaaaaacttattaaattatagtgaaatgctgtaagagtcgctaataattacaatctgaactctaaaaacacgagggactgtaaaagaatttagtgacccatcctgaagggtcactaaatactatctttcctgaaatctatttttgtagtagtgaatattggattgttttattgagtagtaaattaaggtcagagaacaaacctcaaagaatattccaaaaaatgtttgaggtattaattgtccagatgattcagaagcatctactcttagagttcccatttggcttccaccatattcactaccacagcatttcgaaacaaacaaatagagcagaacaatactgaaagtagccttccaagaagaacccatttctcaatcaccacattcaatattcttgaagcctattaaaaggaccaacaaattcattcatggagtcaatgaattctaattcaatatttatcatcatttaataactaaaactaatcatttaaaataatattatatattatatattatatataaattaatatatgagacaaaaagtaataggaagtagaagaaagaagaaaaataaaaccttaatttcggaaggaactcccaaagagacacccaaaccaaagtgtgaagagtttgatttatgggaatgaaatgtgagctgatttatataagtaaagaaagaattgcttacacgtaagcataagagagagaagaataggagatgtcccacttggcaatggattacaaggaactcatcttaacatattatattgtggtggtgtgggcccctactcctcttctacttcccctctctctttctatttctacccaacctaagaccaactttcacttctctacttggagagaaaaaactaaaaaaacacttttgaagaaactaggtaatacagccgctcttttgcgtggttatcgtaacttcttcgtataatacaacaattatttagtaatgtcataaatactagggattttttatttttatacttcaaaacagtttttttttttacatttttaattctacatagaaatccctattgcaactagcgctgtaacctaaattgcaacaaaaaatcgtataggaactcctactgcaactagcgttgcaaccactttagaaatccaaattgtaaatttgaaaaaaaaaattaaaaaaataacatatggggtaattcccctaaatactaactctaccttaaaaaaaattattattttaatatataataatattgtaattatattgtctaattacttattattagtagtaattttatttatttaaaaaaattatttttatattttaaagtagtttttattttttttatatttacagaaatctacatggcaactcacatagtaactaatggaattgcaatttaaatctatatagcaacttacatagaaactactagagcaattcaaactgtaaaaataaaaataaaaagttaaaaaatggtatatggggtgattttctaaaaatttatttataatataataagtaattacacaatgtaattttatttattaaaaattaaaatacttttttttaattctattaaataaattattaattattattattattaggataactgaaaagttctatcatttaataaattttttattaagaagttcaaaatttatacgattatatatgtatagaattttaaattgctttcttaaaaaaatattaataaaaaaattgatagaaaaattggagtgttatttattttattattatttttttttttgaataaaaccagtaaattcattaattaataaaatcgttcataacaatggatcgcacttcaggggaatagttttccaactgaagcacacgacctaaagagaaacaagagtctcttaccaagcaatgagccaacttatttgtagatcgttttacaaaacacaaatcaatataattgtaagatgaaagaaaggtacgaacatcatgtatgagaagaccaaattaaggcgacgttgaaattttactttggatagcttggacacagaccaagctatcagtctccaacaaaacgtgttcccaggaatggcttgcaatccaacttagagcttcttttatgcctataatttctgcaattttgggttggactcgtcctatcttacctgttgtataggcttcaagaaaattaccacagtagtcgcgagccacacaaccaacaccaaactggccctcctgctcaaacaaatctccatcaacattaaccttgatctggtttaacgaaggtgcagtccaacgctcagtgtgtcgtcccccatcactcatcggagacaaagaaagaccctttctttcttgagcgtacttatattgatcaagaagattctttgttgatgcggcaacacttgatgcagaccagctcttattttaccaaacaaagtcattacaagctcgccaaattgcccaactcaccacagtcgcttcctccatctcacaacttcgacccctgctgaataataccagcaaccagttgcaaaaatggacctctgaatcactgccaatgtccaccagacttcggttccaagcagctcgagcaaaggcacatcctaccagtgtgtgataaatagtttcagcagtagagtgacacaagggacagataggagaaatggggacatgtcttctatttaattgggtgcaagtaggtagtgttcctaatgcaactctccataaaaaattactaacttttggtgtaattattaaagaccaaagattcctctaaaaactggtatttccatccacataccaagcacctttagcctcctgtaaatatttgtaagcactcctaactaaatattgcccaaacttttcaaacttccgactccaactatcatttatggctgaatcactaagccgaatagagaaaatcaaatcttgatctctaacatcaaagagatccttaataatgtcttcattccaagcatgagcttccaattgaaagaggcaattaacaaacttgttctctagagcagaatgtcttgaaattacaaagctgttggtgttatgagggagccaagaatcatttagggcgtgtttagaaagccacttgggaattggaattagatgtaattgga

SEQ ID NO: 162489 - DNA, 2126 bp, Cannabis sativa
ttcaaaaagtaaagtgtgcaattaaaagaatataacaaatgaataaatagaattaattaagtatggtagctaacccaataagcagcagtgaaaccagcaacaccagaagataaatgaataacataaccaccagcataatcaataataacatcatgaagaaacccatcttcacaccaaacactaaaagctccaacactataactcaaactaacccaaagtggaacaaacatcatccaagcataaaaattcatcctcccaagcaaagaccctgcaaccaaaataactgtaatcgccgcgaaaacaaactcataatacacaaaatccgccattgggacaaatccaaacttggaaaattgtcccaacaaaaacttctcactcaatgccaaccctggctttccaacaaaaggtgtccatttcgaaccaaatgacatatgatgaccccacaaaacccaacatattaacactgtcgcgaaaccatagagcgccatgaaagccgagttcaccgcccattttcgcttcaccatgcttccgtagagtatcactagccccggaacactctgcatccccaccatagtggttgctgtgagctgccatgaattgtctcctttgtttaaccattctggtgatgactctgttgcccataatccctttggtaataatactaatgttatgttattattatcattaataataatgtcactgtaattattactcattacaacaataatataagttaaacacaaataaaatttggttcaaattttgtgacattttggatgagattatattatatagtgacataaatatttggagtttattattagctggtgtattctccaagattatatatattttattatatgccggctatatatagtgaaaatatagattcattttacagagaatccatgaattttgattggtgctttttttttttcatagtatatgtcacatattaataatagattcttaatttcatcacaatcacaagaacagaagaatccatcttttgatttagttgattttgttatttaaattattgtttcttagttagtatcgatttcttaatttgacttattatgtagagcaagattatgagtattataaatagaataatgattatgattgagacacacttaaattacacggctacttaattttgaattatacaattaaattatgtgtaataagtatgtacaatttgagtgtatatattttagttaaaaagtgagtgtgacatttacataaaaattgaaccatatttctagtcattacaaaagagttcagaagggagagacttaaactggcctcacccgaaaaacgaatacaattgaaggagagacaactccaagacgggttttgattaagcgagttgtctctcctccacctaatccaactctcttagtgcagtacgtacaatttgagtacataaatatatggtcttgggcaactacacttagagagttagattaagttgaatagcaagcaacatcaaaattgattttaatgtattcttttggaggaggagaccactctttgttggtatttgggcagagtccactctcaaggatttttttggccttaaaatataatgaaacataagaaaaagaaaatatttttggactgttacttaaaaaaaaaaatagatattattttttaaaatgagtaaaaataatatataatttgtgaggaatttttttgaggtcttagattaagtaagttctgattctgaacatatataggtgtaagtaatccactttataggcagattgttgttgtggatgagtgtgtatatattgatagcatattagctcatgcatattgcatagatatgtatagttcattaatcatgtacgtaatatattgtatatatagacaaataagtacttaattaatattgtcaatttaaatgtcctaacacacacatatatatatatataaatatttttagtaaccttaatatattattaactatatatatatatatatctatctagctatagagccaacaagcaagttctcatcacttcttattttgattgattataacaataattatacaaatttgtaacaagtataaattcaatatttatatttaacggcataaatacataatatttattaaa

SEQ ID NO: 162490 - DNA, 1287 bp, Cannabis sativa
gttagaaggtaaagtggctttgattacaggtggagctagtggaataggccaaaaaactgcccaagtctttgcccaccatggagccaaactagttatagccgatatccaagacgagctaggccactctgtttgccaatctatagcgagcggcgcggccggaaacgacgccacttacgtccactgcgacgtaaccgacgaatcacacgtcaaagccgccgtagaaaaagccatcaagtcctatggaaagctagacataatgttcaacaatgccggcataggtgacccgaaaaagtctcgaatcatcgacaacgagaagggcgattttgagcgcgtgttgcgcgtgaatgtgacaggggttttccttggtataaaacacgcttcccaagccatgatctcggctaaaggaggcagcggcggtagcatcatatcgacagctagtgttgcctcgtgcatgggaggcttagcctcccacgcgtacacgtgctccaagcacgccgtgcttgggctgacgagaaatgctgctgttgagttgggacagtttggaataagggtcaactgtgtgtcgccttatgggttggcgacaccgatttctcagatcttccatgggcttaatgtggaggagcttgaaggcctgtacggatctatggcgaacttaaagaacgtgacgtttaaggaagatgatattgctaatgcggctctttttttggcgagtgaggagggacggtacgtcagtggacataacctagttgttgatggaggtttcaccattgctaattcttcttttccaatgtttcagtaccctgaaattaatcatgcttgattaataattagtttccattaatccaaagaaaatataattaataaaaagagtacgtacgttgttatttttaattgattattacggtgaaatcctcaacaagtttgtcactttgagttttagtgttgttgtttttgttgagatcgatacaccagtttatatatgataaaatctgaacttcttaatagtccattctcattagaaattcatctcatgattggtttcaatatttaatttcatgaataataatatgacactaaagaaagtgtactttttagcatttgtcttttcaatataataaagaaataattgctttagaaaaaattacattgagagcccaactttgtaaattattaacaaaaatagcgcctaataccgaccatcaaaattaaaatattataggataaatattattgggtgattctacaatgcattcctttaagatgtactaatacactcttaacttgttt

SEQ ID NO: 162491 - DNA, 3133 bp, Cannabis sativa
aactaattttaactaatgttatcaaaggctgatgagactctcaatgcatcagtttcaacttgagtgattggcagatttagttgggcatcccaattgaggcaatgaaagagggccttagcctctattttatctgaatatctaaaacatccttgtactgacttagagaaagcaacaatcacttgaccttcatgatctctaacaattgtactaactcccgaaaccttggtgaccatgtcaacaacaacatcgtattaagtttaaggccatggagattaggtggtttccacgggataccatccttcggcctaaaaatgtagattggagttgagttttgtgcgccttgaggttgagagtgattcttggctttgatgtacttatctaaatagttgatcacaaaagtagctaggtatgactcatctctaccagaactatcattgagtaccttgtttcgctcagtccaaattacccacatgatgtagattattaattccatctctgtctgattatgaacaatggagtgaaaaaaataaataatcaccgttaaccatttgtcgagcttttccaaaattaatatggaaatgaaagtgtttccacaccaacttggcatgccgacaattgaacaaagcatgcccaattgattctcaagcatgggcacatctgaagtaagtagccgaatcaataaaaaaaaacaatttcttgtgtaagtttgtagccactagaagggctccttggatagctttccacacaaagattttgattttggaaggtaattttaaatcctagaaaaatttccaccaattgctatgagaatttgaggtcgcttctttagcaaattcttccaaggtggtggccaagtggaaccctgactttactgtatagatgtgagttgtggtgaaattctatataagcctaccaggggttgggaagaaactcaaagggatagtaaggatacgatcaacatcaattgaattgaaataatcgtttaagagcgtgatattccattctctattatcattaataaagtgcctcaatgtaagtgatgggggtcctgtatatgacagaggatggaattcactatggcccaggatccatggatctttaccaatgacaatttggtcgccatatcaactttgaatctgagtcctttgggtagtagttctcttctccaacaaatgctctgccatgtaagtgagggagagtgacaaatacttgcttccaaaaagtgttgttagaaaagtaaatgttttttaataatcggcttagtagtgaatcagacgctttaatgattcgccaagattatttagttaataatgcataaaagaacgaaagcccacacccccttcaaattttgatcaacataagagtttctaatttttccaatgtattttcgagccattttggtttgattcccaccaaaagttttccatcatcgcctctaattggctacactgatactttggaagccgaaaactcattgcatatgtaggaattgattgtaccattacttttaagagaacttcttcacctccaactgagaaaagcttttcgttctaagcattaagcagtttccaaatacgctctttgatatttctgaatagttcttttttgtccctacgagaataagaagaaagtccaaaatatcgttcatagtgctcacttattggcatacccaaagtttgatgatttttttttttttgtacagttgacattgtatttggagagaaagacatgattgatttttaggtattaaggaattgacccaaaggttggtggtagatctcaagaaccatttaaataactaatgttgaattattggttgcatgacaaaataaaaggttatcatccgcaaataaaagatgactcactaatggtgcatgacgtgagaggcgcaatccttcaagattgccaattgcttccttgtgttgcaacaacctagagagaccctctgaacaaattaaaaataaatatggagataacgggtcaccttaacgtagtcctcgctttggtgtaacatcctcaactacctcaccattaagggagaaagaaaaactagtggttcgtaagaactttacaattaagtcgatccatcaaccagaaaagcccccttttctcattatagatgcaatatgtacccactctactctatcaaaagctttactcatatccaattttagagtagaaaaatattttttctcttgggtcttgtgtttgagatgatgagccaacttaaaagcaattagaatgttgtccataatgagtctgtttgtgagacaagcgctttgaatttctgagatgacaaaaggaagaacttcattgaagcggataaccagaactttggagattagtttgtaactaacattacacaaactaattggtctaaaatcatccatttcacttgggtttttaatttttggaataagagtgataatagacttgttaagactttccatgtcatgaccattattaaggactcttaagaccacttgtgtaactgattgtagaaccaaaaatatcccaataatattgatagaacatggccaacataacattgctttttgagcttttgtgtagactcaattactatagagctaaataaacttcaacacttgtaaaaggttcaatgagagtcgtatttatttcagcagtaaccattgttgggatggtagaaatggcatgagaaagagcagtaacatttataggagaagaagtacacaaatcttcaaaataagttaaaatgattgcagccataccatccttcaatccttcaataacacccgcaacattaattaaggatttgatcgtgttattcgttttgcgagacgaagcatgggcatgaaaaaactttgtgtgtttgtcaccacattgaagccaatcaactcttgatctttgtttctgatacgtttcttcctattcgagaagttcatctagaatattctcagaattttgaagttctatcatagcaacctgtgatctagtagtttcattgttaagtgcagccacttttttttttggcatttttgagatgttttgcttcatgttgaccgagattttcgtcaactattaagatatgattataataaagagctgtaagaaagtgagatgaagatttttacgtggttggggcgttaacgag

SEQ ID NO: 162492 - DNA, 2719 bp, Cannabis sativa
ccttaatctcttgccttagatcttcaatgagcttgttcatagcaacaatttagttgtttactttgccccattgaaaactcttttgcttggcctctttcttagcatcttccagtgccttcttcagttcactggtagctgttgtggcctttagcacaacaaatttggctcgagaataagtatatgcaaacttcagagtaacttgtacagtaaagtatagttaaagcatgtacaaagcaaaatctttataaagacaatcccatggcaaaacacttacttgggtaacctctttcagaactccaccgactagtagttccgctggcatctcctttgcccccgtgagttgctcatttaccccatgcatcacgcgatcttaataaaaactgagcatttctttccccttcatagtttctggctggagtacggtggagtatccaacggccttggcagcccgggcccctcaatattggcccctttagagttcttggctgaagttttggaagcctgagacttggtattcttcctcactagagagataacttcacgagcagcactaggaatgttcgaggagttagcagccaaactcctctatgtgttgacctaaggagtcttagagcttggggaaatactcttgggtaaagtatcatttacctttggacatttggtctaagatatctgaccagatgcatcgcttgacctcttctttagaacacgtagcattctcttcaacatgactgcataaaaagaaaagcatctgttaaaaacataatcaaacaaagacaaatatgttaaaaagtgaaaaataaacaaccctacactgaacgggagcaccctcgcgaacaagtaatgaaggggcattctcatcaaaagagtcctcctcttcatcctcgaccaccacaacctttccctttcttaccgcatggacggaaggacgagcaacctcctcaagatcgtccctaatccttatgggtcgctcaattggtacttgatcaccatggggagccttcttcttcctcctcttcttcagagccttttgcacggttgtaacctcctcagtcacctgtttgggctcctgaacttcatcagatgggtaaagcccgtacttgatgaagttagcctcagtggctaagagggaaatatttcgagtcgactctacaagttggagtatttcttgggctcttatcctaagctccaaggtaaaaggagaacagcaataagatggaatatactaaaaagtgataatggttggtacccatgtccttgacaaagtattaatcctctaaaacccaccaatcttggacacatatgtgcctgtggtaccggtcatccacttacactcattctaggaaaagtagaaatacccaaacctattctattttgggctagatttcaaatcaaacagccaattagtgtcgtgggcgatggctgaccccatccttgggtagcatacaacacgaacagtgcaccaaggtactttatgcccttaggagtgagcttggtcagacatatgtgatgataattggatatttcgttaaaatagggatgtaaaggcagcattgcaccctatttggcatgtggccctggccatgcacaaaatctgcctccaggatttgttgccagctatccgggactagggaggaatgcctccaccttcacaaggagacattcttcataaatattagttaatctcttaaaagttagcacaaatggttgtgagacccatcgagcacccctcaaacctcgattgttgaaaggtcgagcctcggtgtattcctcctcaatgtaatcttggcctaccaccaagacatcttcctccttcgagataggcttttcagcctcattatagccaccaaaaggaagtacttgagctttctcctcttcatcttcttcctctctgtcaactttagaagggctagcagggcagacctcaccgctggtcctcaatctcttggactttgatgtcccctctagcaactacttcatctgcgcttggtggcttggcttgctccaccccagctgctgtaaatagctgggcaaggtgaggatcaatttttatggccttcctcatagtctgattggtctatgccatcattctatgtttatacagttgctttgtttcacatgtatgcttcataacaatgatagcgataacggctatgatagtactcctggcagatggggttggccaaccctctggaagtgtgtctacaacaccaggtcggaccctatacatcgaggtattggtggtgctacaccacgggctccggggtttgtatgatcactgctcactctgaatcctcaaaactagaatttgaaagattgtcacgcgatgaaggtgaatttgcaccgagttgagggtgatcttcttataagagctgaagtagatcctcgttaatatggtgtttgcctccccagaactcatcaggattcatctacaaaaatatgagggacaaggagagagagttggatgggggaaaggagaaaaacatgtttaatatgcagaccaagctgattcaagataaaaagaaggagtttcattctggaatggatttacgaaactcaaaagtttaaaatctcgaagaatatctagaaatttttagaaacccataaatgggtgaatgtgaacattttcaggccaaaagtaatacgaaattagagaatcaagaggtttaagcgtatgttagtcaaaattaaaagccctaattgttgggttttgtgccct

SEQ ID NO: 162493 - DNA, 3345 bp, Cannabis sativa
gactgtctctttctttgcaaaactgctaaaggcaattaaaggtactaattactcgatacaatggattccctgcaaatgtaggagtgcatgctctcgctaagtggggtttatgcaatcaatgttctagttttcttaatttttgggaggtgaatccccatgtattcactattatctttgcgaattagactgtttttggcagatgtttcctcatgtgagcatcaatttttttttttggtaatgaagtgtatttaagaaaaaaaaaatgatcaatcgctctgataataatattttacagtacatacctaagcatgatgagtgagtgaaaaaaactgaaggacataaatttttcaactcgtcttcttctatatctgtacatacatatataaataaatttagatgaaatacctttattaattaatttgcagggcgtacgtaccacccacccactcactcactgaccttagataagaagagtagtctagtctcctctccaataattaaccacattgtaaaaacgagggacacgttgtgactggtggaacacgaacaacaaaaacaaaagaaattggttagtcttagtacgtagttgtgttttgtttaatggactggactgggtcgaatagaagtggtccaagaatccagttcaaatggaccactatggatcttattatagggacttttggcccacttggttctttttctttgaagagttaatgtcaatcttctgcggcagccaaacccaagccaagattattattattattattaattattggcctctataactctccagtctctatgcccccaaatggaccaagtgtcttcttctcttctagcctgtcactttttgttttttgtacacataccgttatatacgtgtggccattattgcaacgtggcttttacacccccatccactactactccatttaaacaaatcaatgtggagaaagtcaaattggaaaatgaaaaaccctttcaattttctgttttatttttatacaaaatcacaaaggtgttgctattataggcagtgtccaaatgattgtgaaaaagtaatttatatatcatatgtgcaccaaaaaaatagtagccttgaatttttgttgaagaagaaatcttgtaataaaggggatttttaattactagcacaaattagtactcagaagaacagttgctttaaaaaactgttatagttttagtgtatattttatattcagaagactaccaaaatcaggatcattcttaagaaatagattcccatccaaaggttatgactcccatggtaattttttttctcaagataagtgaagcaacatcaaaactaccaaaactgggaattttttttaatgggagtgagacaatagtgatattacatgtcccacccacctcaaaatattgtattgtttatgcaataaaatcctttttaggatcatctcacaaaaaaataataaataaataaataagcaagatctcaaatactcttttttttttttttttttttataaaaaaaattaagaattaaaatctttgatctcttcagacaagaataggttagtctcttataaaaagggtattgtaagctggtttggtctgtctaagtttcttttgggcctcattttttttttttttgataaggccttgcttagaatttttgagtgggttatgtaagaatattttgtgaaaaatatgcaaataatgaggacaaaatcttcagttccatttttatttcggctgttgcataggtagtagttttcgaggtttaaatttccaaagctgaaaaagaggaggtcacaaaattagtcaccatgtaccaaaactagctcctaggtaatgcttttagatgttcttaacagtttttattttcttttttctttcttttgagagaatgttcttaacagttctacttagtatatttgttatccaaattaagtaatattaactgatatattctccaataaatctaaatttatttaataaattttatccatgattaaactgcactaatttatatctaattaaataagtaaatttgactttaaaatttacttccatataagttaaatgtaaaaatattatttcttagtaaaaaaaaaagtcatttataaatatataaattacttcactcattaccaattaattttaaaataaaatttcatatatagaaggtttcaataattacatcaaatatgtaaccataataggtacatttattgttagccatttgatcattaattaatagttctgattaatttacaaattaaataaaaaataacttgtaacctatagcctaatactttatttccttataaagctttaattaagattaattttttttaaattaaattaattgtattttttttgtaatttattactaaacaaggttcttttagcaattaattttcttgctcttaaattattttaatatttgtagcaaaaatagtcacatttttcgtatctattcgtgttagaaattgtcttaaatttagttatattaaaaaataaaattcttgaaaattgagcttagggttctatttttactattttagaaaatatagagtctattttgtcatttaataaaatagaatgtctaattggtaacttttgcaaaatacaagatctaaaatagtatttacccataattatataccgcttaaccaatttattttagaaggggtagaagtctactttttataaaaaaataaggttttaattttattgtaaatattattatcaaatagtttgaatattaaaaaaaattataatagggatttaaatgtaaaaataaaattatttataaatattaattactaaaaaaaattctattaaatatattaattaattattattttataaatatataattaatcataattaaattaattttataaaaatattagtaacctgctagtaaaagaatagtcattaatatatatatatttcaaaatctacgtaattgagaacagtttagctataatgataaaattcaatcagtttttttatttttactttttgtattatctaccaaatctataaaataataaatatcttgaacatatatttattcttagcaaaataatcgataaaaacacaaggctctgttgatgttattcaagtgttttgtttaattatttatagggaaatttgcgacaaaagtctccaaatagttaaggttgatgcagattaatccccaatctcaaaaattagcgataatagtcccaagatcatattttctgtaagtccgttggtcttcaagttaactgatccgttaaacccaattcaaatgccatatgttaattttttattggtccaaataataattttaattaaaaaaatttaaaataa

SEQ ID NO: 162494 - DNA, 2804 bp, Cannabis sativa
  modified_base (2774)..(2775): a, c, t, g, unknown or other
cttcttcttcttcttcgtcttcattccccaacagaattttcgggtgcgggtttcgaaacggaggtgatttcagcgggctcgagtctggaatcattggactaggagctgggaaactctctctcatttctcaaatgggttcttccattaatggcaaattctcttactgtttggtacctgagtcattatcaacaccatcatcatcatcgagtaaattgtattttggtggttcgagtttggttccaggtcctgaggtatcatctactcctttactaataaatactaatgttcaaaattactattatctagcacttaaagctgtcagtgttgggagtatgaaatttgatttggcaagttcatcaaagaaaggtggtaacatgattatagattcagggaccatgctgacttatttgcctaccaagctatacaaagcattggaaacgattatgataaagtcgataaagaatttggagtttggtaaagacccaaatgggtatatgagtctgtgttacaagaccaaatcggatgatataatgggtgctgctgaggtgatcactcttcatttcgaggagggaggagatctggagttgaagagtgtgaacacgttccttagagttacggaagatgttttgtgctttgcgtttgggccaactgatgaggatgatcttctcatcttcggtaatgtggctcaggccaactttttggtgcagtatgacttaactcaaaaagttttatcgtttaagtccactgattgtaccaaatagtatattaatggagattatatatctatatctatatatattttagagattacaatgaaagaaaaaaaaaaaaaaccatctttaaagcataaaaagatggcggaagcaagttaatttctatttttctaaaatgaaataattcaaaattaaattatctcttatggcttggaatcatcattctatatattatattatggggtcttatgtaatccctcactatcacttgaggaatttgacaacttaaataagacaaagtttatgaattgtatcagcaagttatacagttcaattttgcttgcaataagagattactgtgtaattaaatacataaaaatattgtttcataaatgttgcttcaatatatataacattattttattagttttttttgggaggacaagattgtaaaagtatatttacggagagcatcttcaataataacattttttaatgatgttaaaaaatctacacatcatctaaaaatataatactttattttattctttttctacattacttttgacactcgtactcctaaaaacactctaatgtataacactcttcaaaaatgctataattatgatctcacatattattatttaatatatattctaatttttagttacaataactttttatcttcaattttttattaaaaaaaatgattagcattgtaaatttttagaatgccatcccaatctctccaattgtataacatctcaatattttaccacataatatgttcacctcagcaagcactctaaatttttaccattagagatgctctgatgtgtatcaaaatgtattttgtattaacttgcatgtaaacaaaaacacattcctattattgtgttgaggtgagtttggcactaatatcataaacaactcggttagagtgagattgacactaaagtaatccgagattgaggctgatagtctttggcagtgaaaactattgtaagagatttgaaaacatcttagtaaaaaatttccaattgaaaggattagtcaagtttgttaacttgactcgataatagagctcaaagctaggtcaatagctttgtagatcaaggacataggtaacttaattctactgaaccttatcataatttggggggttattctcgagaaagggagatggaatgagcagtgatgaatttttggtggttgatgtcattttgagaatgtattgccttcatttttattgtgtgttttttttttgttatttttattttcaataatggtgttacaacaccactttgctatggttattgtagtagagtatgttttattcacgatataggattttagttgtaacatattaggatttaattactgcttatggctatacttgtgcattagtacaaaataaaacctattgttagtcataggtatttgtgatataatttttcaattatggatattttattataatttaggtgtgccatgtatattaattataaagtttatttttttatactttatgtcttattactgtggaataatatgatgatttggccattagtgttactatgatacggttgtatatctagatttagtggggtaagttaatttatggacatttagaatgtcggggtgaagtggggtaatttgttttgaccattttgctcctaatttttaaaggttacttaagaaagaagggaaaatgtattttggtaattttagccttaagcttgaatttatcctttagttagtggaatttctagtaagtttcttttattatgctgaattaagttagaatgaaaaacaatgaaataagagataattgtaaaactgaaaaataaaactcactctctctctctctcaagctagaaccaaacgaaactaagagattttctatctagctaattccttcattttcagcaaagattccagttgttattcaagtaggaatagcaaagatagcttgagataagccctaactctctcttctcttattttataaggattaaaattgttgaccgaggttttcggtaaccaatataataataatannttagagagctataaggaaataagagagag

SEQ ID NO: 162495 - DNA, 4832 bp, Cannabis sativa
gatggacatgttgccagaatcttaggtggaccgcatcttgcaggaagtacaaggaactcacgaaaaaggtatttaagagaagtagaataaggggaaatgtgtgcgttggtgcagtctctagcacaacgtcctagaatgataagcctgcccatcaccttcatggaggatgatgccagaaatgtatgtttccacaacaacaatcccttagtaatcgaagcttagatcaccaataaacgggtttctagagtcctggtggacaatgggatctcagtaaacatcattttgaaattttcattctagacaatagggctcacgaaagttgccttgactccttgccccatttagttgtaaggttgcctatgggaaacatttagttgttgatcactcttaaaggagaaaacaatacaagtgcttttaagcactctacttttgtgttggtggattacctaacaacatacaaaacaatactaggacgaccacccctagtagattttagggcagttacttccatcaagcttctatgcatgaagttcctctgcgataatggatgtattggcacagttaaaagtgatcaaaaagtccaaggaattgctacaatgtctcgacataggctgtgttcgtggtctgagaagaggcacccattgctcctgggatagaggcttagatggaaattgaggccatttgggaggatttagaagacgagttagatcctagagctgggatggaaagaactttagaaccaatggaggaggtagaagaggtaagcatcaacgatgtggaccccacaaaaaccatcaaagtgagaagaaacctaccttcgtccataaaagagaatattatgaacacagtcaaaaagaactaggatgcgctgacatgaagccattttgatatgactagaattgacaacaacactatttgccatgccttgaacattaaagaagatgcgacagcggtcttccagaaatgaaggcccttggatcatgtaagggtagaagcagtgaaagcaaaaattgacaagttgaccaccaatgactttgccaggaagcattgtacttagtctagcttgctaaccctgtcttggttcccaaacccaacggcacgtggaggatgtgcatcaacttcacagacctaaataagacttgcccaaaagactgctttctgctcttgcgaatagatcaaatggtagacgccacctccaggtacgagttgctaagcttcatggatgcctattcctgctataaccaaattaagatgcatgtcgcgaacgaggaagacaccaacttctaaaccaacaaaggcatttattattataaggtaatgtcgtttgagcttaaaaatgctagagccacttatcatcggatggtcaaccaaatgttcaagaactaactagggagaaacatggaagtttatgtagatgatatgttggttaagtccaaaaccttcgaggagcatggccttgatcttgaagaagcctttgcggttctcaaaaagtatgggatgaagctaaacccaaaaaactgtacctttagagtttccttcaagaaattcttgggtttcattcttagctcccacaaaattgaagcaaatctagagaaaatcaaggctttcctcgacattccttctccgaaaaaacataaagatgttcaaagtgttattggttgaatagtcgcactcaacaggttcatctcaaaattaacatacaagtgtatctcattgtttaacgtgctgcagggcaacaaaaaatttgaatggaccaaagagtgtgaaaaagctttctaaaagttaaaggagcatctgacaaaagctccaatgttgtcgaagcccgtggagggggggatttatacctgtacttggcagtgtctgatcatgctataagtgtcacactcatgcgagaggaaggaaaggtccaatacccgatctactatgtaagtaaaagattgttaggtgtagaatctagatacccaatgattgagaagctgacattttacttgttgaccacgtctcaaaagctgagaccatacttcgaagctcacgccataaaagcactaacaaaccatccccactccaaggtgcttcagaagctagattccttcagcaggctattaaaatggactacgaaacttatctagtttgacattcagtataagtgccaggcgttaatcaaaggccaagcccttgctaatttcatagtagaatgttccagcatgaatgacctcccgaaagagccactcccggaactgcccacctggaaggtctatgttgatggagcatcaaatgagaaaggagccggagcagggatcattttaatctctctgtaagagaaccaactccagagtgccccacgctttagcttttgtgcctccaacaacgaagctgaacatgaagctatgctagcaggcttaaagttggctaaggaagtgggagcccaacatatcaaagtgcatagtgattcccagttggtggtaaaccaaatatctggtgagtaccagacagaaggtgaaaaaatgtcctcttatatcatgatgtcccagaagctgctacaagggtttaaaggttacaacatttgtcaggtcccaagggactaaaattcatttgcaaatatgctccccaaatttgtaacagatcccgggatcattcaacatggagtagtgctagtttgtcacctaaaaaagcaaagcattgaggtctaggggtaaatgccattatcgataattctcattcttggatggcacctatttacaactttctgagtttggaagagcttcccacgaataaagctacctctaggaaggtccaatatcaagctccccaatatgtgactatggatggaaagctttaccgacagggactatcaatgtcatatttgaggtgcattgttggaatcaaaattagcactataatccacgagattcgtggtggcttctgtggagatcacacatccagtccaagcttgtcaaaaaaatcctttaccaagggtatttttggctcacaatgaagagggattgcatagagtatctccaaaaaatgtgagtaattccagaagtacgctaaagttatgtgtgcaccacaactgaaattacactcatgagtagcctttggccttttgtaatttcgggcactaatttggtaggatccatcccgatgggaaaaggaggagttaaatatgaaatagttacgattgattacttaaatgggttgaggcagagccgatgaacgctgtcacctcaaagaaggccttggactttgtcataaagaacattgtgtgtcatttcggacttccatacaagatcgtctatgataatgggaaatagtttgacagtaaacatttcaccaacttctgtgctcagcacataattgtaaaaatttggtgggatcttgtccaaggcagtgcctggtctaggaggatggctggaaaatgctgaccttgcgagttgttgctctgttggattttgagggggcaacaattgtgcttgtggcgaattgggttgagatagaactatttgttgttgtgatggtggtagagtttactatcgttgttgtggtgaaatttgctactgtttttgttgttatggttgttgttgttgttgcaatgatgagggtgttgtgaataatggatcatatggaataggaattgaagttgaagattttgcctttttcgcaccttggctcagggaagtagatgaccctttgcatttaggatacgtgggggcacccttctagggaaagacaatcccatccaagctatcatcttaacctcccgcactcatcggaatgccgaaagtcgctccctttgcctatggagtttcccccaaggcttgctcccttggagcaattagtgcctctaacaccttcctagaatcagtaagatttttctcaaccccaacgggagccaaggaatttggagtgtagagcttgcctttatgggagttgcgatttcccaaacatctgatgacgagaaagttgagggaggatgtggtttttgggtcctgtaggcccgagacttgcctttgcccttccctttctcctaggtgtctccccccttagctagggtggcaataatcttgttgctcaaggactttaacaacctcgattctggagtatctgcacgcataaccagaatatcagtaactagaaagtacaagccaagtcaaaataaatgaagacacagttgtaaaacagcaaaattaactaagaaggcttgtgcgtgggtgcaaccattctatgagcagctataaggttcaccacaagcaaaagaaattttatttctttgaccaaggaagctgccatattccttgaagtcaggcaatgacatggtcacaaaaggatccaccctaacagtgtctaagaatacctctacattactagggctcctaatgatttggtccaccctgtctatatagtctttcatgggatatctatagaggtctatgctaagaaaatatttatcgaatccacccagatcctcccaggtaatgcggtataggttgggggtatggaagatgtggaagggtctattacctcttcccaaagttctagctctcggagtccctacacctggatacgctgcagtgaaccagtgtttgtttctacaaatgccacattccttgaagatgactatattaagaacttcaagccgcaaagtaaagtagtattagaggaaatgctttcaaatataactccaactaatgttctatcttcttttacttaaatagagaatgatcctaatccctcggtcgaaccaatgcaagttgatacaaccgagaaatctaccactaatgttcctgtttagaaggtcacgactcctcatcatagtgggagggtttccacaaaac

SEQ ID NO: 162496 - DNA, 1151 bp, Cannabis sativa
attggggacaggtaatttggctcccttaattatactcatgtaaagttcatatgaaagtaaacaatagtcaactcacatatatatttatacgatgattaatttagaatttcgccactctaattttgataagtatcaaattatatcacacaaatttttcaaatcactaaaaacttctcttaaattattgagaaggttgaatttaaatatttatgtctaattttatttaattttactaataaaataattatttatgtactaaatcatacccttgaagtttaatatctacaaaattgtattttccaaattttaatatatataaaattatactccttgaacatttattcaccgttaactttcgttaataaaattagactaaaatcattaaatcaaatattcttaataattcaaaaacaaattattacatttggtaaatattaaaaattgaggggccaataatactaattagcctaatatggatgtcttagaatttggttttgtaaggaatttgatttttcaatcttgatagtacttacttttcaacaccacttcccctttctagaacaaaaatattcaaaaactacttttcatgtagttatgaaatccacatgtaccacaagacatagtatttattagagtaggtgccactttaactgttgggcccgtgtgaccccaaatttgtttaaacttatggtcaggaatctttgctactttatgaaacaaagtaacaaacgatagcttcaaatctggaaaaataagtgaacttctgtaattaataatactattggaatttatgaaggaaaatagtacaaattaaaactaagaacagaaatatgtggcaaccaaaatgagatatcaattaatgagactgtcgaaaaagtcagcttcagctcaaacattaacgaaggtgaggtagttgctgtactattgagactaccaatatgtaaaaactaccgactttgctggattggagaaaatgttaaacaaaaggcacaattgattaatttaagttgttgaaaccttctctcataaaacacgacacaaattcaatcacagcacgaaaccgaaactactgagcttaattgttgcatgacacaacatgactcatatttttttataagggattatttcacaaaaacataaaaataacaaaa

SEQ ID NO: 162497 - DNA, 6280 bp, Cannabis sativa
ctttcacatccataaatttcgactgcaacaaatccacttgggatccctgttcttccatttcctgcttccaaattttaagtgtttggcatagctcagcctttacatttgatgattcagcatgttcccctgttgccatcccctgtacaaagtttacgaaagaaaggatcataaaatgtcagcagacaatttcatcttgtgtgcataatatagccagcatagaatatatagaaagactaattcacgtgaagcaaatcgattagtgagcagaaagaggatcaaaggtcctgaattggttgaatagcattcaataagactccaactcgccatagaagcatactatgcccagaaaaaagcaattgattaaacactcaaatcccatcaagggaagttgatttgttaggaggccatcttaaaacaaattgatactttggttggacatcgtaagcaacaagcttcttcttagagattcaagcaatgttcggaatggataaaaggggacatggctaagtttcgaaaatatctggctgatgtagcattgagctaatttgagattaaatagaattcatgtcaataagcaggctggttggtgttgtcgtgacaatcttatagcacattgacatttgggttagcattagcatatatttaaaagttcaagcaatgtccagaatgaataataagtgcaagtggataatggtagaaattatttggctgaactaacattgagctagtcggagatcaaatgactggtataataatcaaagaatcccatcacttagtagggaagatggttgggtggccaactacagggtccaaagccaggaagaggaagtaatttccctcaaaataatattcctggcttaagaaggtaattgtatctatgaggcatatagctaaacacatagctataaacttaaaaggataaaatttgatcttctatactcatttacgatcacaattatatagttcaaatgaccaatcaatgagcccaaaatttcatatcaacacaaccaaatcgatcaagttaaaataaagatggtgtggtgtgtatgatttcatatagcaaaagacatacttataacaagtctcaaatcggatgaataaaaacgaaatcctaacctaataacaccaaacaaatacacaaaagttacaaattttaaaataaatttatgtctgtaacaaaaatattaaaacttcaaacttaaaaccatatgatatataaaattatatgttacatagtacataccctgaggaggcgaccgaccaccaccaatgattctttgtgctctggccggcgccgccgctggttgttgcgagaggaagaagacgatgactgagaagcaggaggaggtggaggaggctacggtgcttgggggaggactgagggagaacgtgaaaaattgatggaagctgagaatggagaacaacccgttggggaggagagagaaaaagggcttagggatttgattttagggttgagttgactcagattctcaatgaacctttattatttgggttttttttttcacctagctaatatagccaaatttaattttaatatatatatagtaaaattataaatatattatcttattctatattattattaataattttatttattaaataataaatatataattttattaattattatttaaaatttattatatgtagtattttaaattattttattaaaagaaattatttttataaaaataaatagtaggttggtctagaaaaaaattacggtgtttcttataatgcattattttcatatctcgatcattcaaaattattgttattattgtatttcacttgttgtatctcacttattttcatcatcatatctcattcgttgtcatcattgtatctcatctcttgtcattagcgtagttcacttgtagttgtcactattgtatattccaaatttatatcttaatcctagatttcatctcgaattttatatattttttaatatttccaagacaatggagaaaattcattagttgttttgttattattaattaatatattttaaaaagtgattattattttttaaatatcttaattaaaaaaagaataaaaaatatgaaaaaaaaatgtgatattttagttataagaaatgttaaaaggtaactttttttggtatcactattagtgtaattaagtagcaggtctcatataacttaaaaaaaaaaataagatttaggaaatatcgataaccaatcgtaaggtatcgcctatgaaatgtgctgggcaccgctggtgcccaataacatctttagttataattatgtgatacttgatattaaagttatcatttgaaaaaaaaaaataaagtatgctttgttaaaaattaattaatattttttaataaaaaatttaaacatggtaaaaagtaattgaaatattatttcaaggtcacgcgcaacagattcttttattattattattatatcataatttttttttttaaaaaaaaagccaaaaacgtacacattagagttattatttttatattattattattgtatttttttttataaaaaagctaaaaacgctaaagttgtatattgtattactattactataatttgagttttgtggagttatttttgtatattttataaaattaaaattaaaaaaagtgagagaattaaggagaaaagagaaaaatagtttttaaataattttatatgaattaaaaattaaaaaagtaagaaaattaaagagagaaaagaaaaatagttctaaagcaattttagattaccatgtcaccgctttatgtctctgctttatatatatatttatatatatttatagatatagatttatacatttattaattgatattttatgtatgtatataaacgaaatttaccattaattatatttgagttaagttttaatatttttttggaatttattttttattttcaaactttttttaaaatattttatatttttatagaaaattatcataatagtaaaatattaatttgtagatttatacttttttataaaaaaaaaattattaaaaaaatagtaaaataccaatctgtagatttatgctttaataaaagattaaaattgagagaattaaagagaaaagagaaaaatagttttaaagtgattttagaatgtcatgttaccgcctcatacttctcctttttatatattaattgatgattgataggaattattcataaatgtataaaaaaatgaaaaagtttatttatttattcaatattatatttaaattttattattattttaactcgataatttcttatcttattattattaataataaatcataagttttttttattttgtcgtgccatactttttcggcttatcgtgtgtcgtattttttgagctagtctattcatgcttacgtgtcgtgcctttcgtacttcttgtgtcgtgtcatgcttaagaacatatttttcgtgttgtctcatgccaatttgtagcatcatgtcgtgcccaagcccgtatttttttatgcctagtcgtactcatgtcttttggactcgtgctgatttcgtgtcgtgtcaaaaaacctgatccgcatttataatactatttatatgtatgtgatacatatataagataattatttttaaataatatttatatttttaacacggagtattaataagctccagaaattgattttttttagagaatagtatttgatatttatacttaattattattcgcgaatgcatattgttatttatatttttttcttaaaatacgtggcagtctagaagggagccatgtggcagtaggaccccactacgggatgcgacaaagtaaaacgtgtctccaagatacgacaataagtaaaagattgaagactccatgagtttagttttttttgagtggaccttccaagattaggattgtgttagtctttcctccgtcgaggaaagatgtgcctcggagacagtacaattgcatggcatagcctcagaactctgcccaaggctaaagaactatatataattaattcggcatggggaaggccaacctactctctgttagggaaagtgtgtttaagggtttaaattcataattctctgacttcacgacatcccatgcatctcttgatggtagccttacatattgtcaaatcatcaatatgagaaaaaagtcttgtctcaccaaatacctacattagactcaagcacacccccataggatatgaaatcatgccctatggccatacatgtgggaattgtataaagtaaactcgtagaatcgaacaagcaagacaattgtgctctttttgccaccgttatgagcctataaatacctcaagaatgtaaaggaaatggggataaaaaaaacattctctgtaaaacaatatcgaaataaagatgacttatggactaaggctctttaatcccctaaccacgtaaaaatgctcttcttaaattcacattacatacactacataacctgaattaattattgtcaaaaatctcaattaacattttggtgctttcattgagagttgtaggaagctttctaaaaagagaacattaatcaattctatactataaatggtgttaacaagaaatactttgtgtcctccaaaccaacctgaagccctgaagcgtccagacgaggatgtggcatcttgagtggatgttgaaagggaatgagataccatcgacaccgagtatacagaaggccatgatgacttcaaagggtacaaagaagatgactatacggaactaatcacattgaggtaacatgtaacattctaatccttagagacgacacatgtgtgtgtttattaatttataaacgcacacacgtggtgtccataaggattagggcattacaacatggtatcagagcagctatagttttaaatatcctaaagactggctggatatgtacatttgcagtgaagacaagctcgactcatggatagtaagtattatttacctgttatatgattgattattatctgatgtcgttagcagtatatatagaataagcccaagttaagttaattgtagtatgttatgattatgtattaactgagatagttcagtagagctatatgactgattgatatgtaaagaaatgcttattagtattgttgttgtttaagaaatataagtagtgtgaaaagatgattagtgaagtattgagtgtggaactcaataaggaaatttgtgcagttcaatgagaaatttatcgctactatgatcacgaagtgatgtgtgttgttgtgcgttaaattagttgacaaaatagacaacttaatgaattgataaaacaataaaatagttgaaagtaagatgagtattcgatatgtcatgtgagtcgtgaaatatgagaaatcgttaagggcagtcgtttaagtggtttgaagaatagaatcttcttgtcctagaggtggttctgacccctgaaggtggaacattaaataaataagtataattgtatccatttgagattcgaggtggactagaaattatgattaaatgagttgtgttattttgtgctacagaaaggatgttcagatagcaaatgatagatcccgaggcacgtgagttgaaccatgttaattaaggaataactcagttgatgatctataaggaggtaatgacgagaacattgatattactaagacaaatgagactatctggattgctgaaaatggtatgataatgatgatgatgatgatgatgatggaaaatacttttaatggtttgattagatggtgaatcttgtatatggaatggccatagaaatcctgggaaaggtaagatttactcagaatgtggagaagtacataacatgtgaatgaaggagatacacccaagtaattgagatgtattttaatgagattgacagagtactagttactaataataataacacttgaggagtttcttagaggtctccactctgtatttagtgaggtaggggttataaccccgatgattgaaaggagaaatttagataaccttctagatgtgggtctcagttagaaattttagagtactaaagtttctattagaatggaaataagatcgataagcttaccgaaatgtttgatagtgaaagatatttttcctaaagaggaagactatatttaaattcatttcatgatagggtgttagaccatgtattaaattgttaagagaatgaggtacattgttactagtaaaagaacttgttgcccctgaattcgcccaaaatacgtgaaccagtcgaaatgggacacgtggatcagataacttgtaaatat

SEQ ID NO: 162498 - DNA, 1055 bp, Cannabis sativa
gttgcttacctcgatcattttgccatcaaccattaacgtgagatggtgagtagtcctgcggttgcacttgagcaagaaatcttcattcatggcgcagcttacatcatcgatgccgaagggatacgggacctctatgtctccgcatttttcattacagctactaccaacacaaacatttgatgaagcagatacaagaattaataaaattattaggaatattttctgcatcatcatcatcattaattaacaaaaaacaatattggtttggttttaatttgatatttgagagttgctagaagagagaatgtatgaataacgatgggccggagtggtaattgagtaattataattgcaaggtgatgtaatataataaggacaagatatgaaaaggatatgattatctaatgctgtttatttaaacaaaaatgttaagggatatatatagcttctcgagtatctaagacttcatcaccttttatatatattttaataaatccaacaataaaattttttaaatatatataaaataatctcaatatagtccgaacaaaattttaatagttaaaaaaaataaaaagtcccattttttaatatatcttactattataaaagtattataatgacaactttacccttagtaaaattaaatataatgtgataagaagacaattttgccatttgaaaagtcaaaatatcaatattcactccactcaactctctctctttaattaaacaaatacttttgatatttgataagcttaagtcaatttttttaaacactacactgtattacttatctaaccaataataagtgtgacaaatataaaaaatacacatacaataatatatagtaaacccataagcaaccatgtataataaaatttgttgataattttattatatatttataatttttatcattcaaaattattatgtgagagggattatttttacctccctcaaaaatattaattttttttacttaatatataatctaataattatttttgctattatttatttaaatttattatagttttgaactaaatttttaa

SEQ ID NO: 162499 - DNA, 1700 bp, Cannabis sativa
aatagtttaagagtgtttttaaatcgttacacgtctttatataaatatagatatataaataaatattacaacttttcaaaaaaaaaaatattacaatattttttaaaaatcggtatgctatatatgcaaaatttggataaatgatagtttattactttattttaagcttttatttgggccacctttcttttcactggaatttaccttcatccttcatctctaccctacacgtgtcatgatactaatccactatcatgattgaattgtttatgaacggtaggaataggattttgtgggtctaatatggtgatgatgatattatatataggtgatcgtaaataatacattatactaaagtgggccaagtgtgcaagaaaagatgagccactgtgtttcacttgaaactccatagtccaaattgagtaggtaagacattagaattttagagatatatatgtatcgaagtcgctaaacaacatgaaagtaacgttttcttcttttatttttcaaaatgggaatgagaaagtattagttataatcaatattgttgtgtatgtataaaaaaatcataataaaaagggtgttcatgaagtgatttacacctatgtgtatgttgtggggtcttaccctagtgagatcgttttcactaagatttagtcattatttctacattttttagttgttcaaatttatatgctatcaaatattgcatggaaaactccccatttatgcaacttacttattataaatagtgttatttgcgttttcgaaagagacacatgtaattctaagatctaaatcaatttatgtaagcccaatagagataatgggctaaactcagtgaaggagtaggtctacagtttcggttagaaatcaacctaattaccacaggagtcggactactagggttccggaaggatatctcacctcgaagaaggaagacctggcaaggtgcatttagatgccctcatggggtacttccaaaaggaaaaatgaagaggcatcctcaagccgaggctgatgtagcagacctctgacatcgaatcccacaatatcaggatcttgtctcctgtgtcaaaccatgagagtgtgtgtgccgccaaaggagacatgccctttgtccaacagctactacactgatgctattgtgcacgaaggcagcgcacgcatgccacctgtccacatcaagcagtccccccatgtacggatgactgctgcctcacgggctgggcctcaccgaatcggctcaatgtcaatatattacttgtattcaccccatcagtgggacatgttcacatgcaaaccctagtgggttcgggtacaatcataccagactttatcctataaatataacattaactcttcatgcaaagggttgaaattcaattacttacgtagtaaggccaaaagttagggttcataaaccaagtaagaacacttgtgcattacttgaaggcttttctagctaaataatattgactcgtaaactagagtttgtcaacactcgaaccatgtaaaaaatcactatctctaattctttattttatctattttcttaagctttcattatgtttaaatcagtttttaaaaatcacggtaaacactttggtgccttctgttaacttagaatttccttaaggctaattaggattcttaccccccaaactttgacatgtaccaaatcatgttctctaaacttt

SEQ ID NO: 162500 - DNA, 3095 bp, Cannabis sativa
aagtattaatttaaaatctaaagtacaaaagtcaatccaaaaccaaacaattaccaaaagtcattcatcaaattacatgttcatgataataaaaactaaaaagtctcaaaataaatttaaataaaaatccaaagtctatactctatagttcatagtccatacatactccataataaggttatgtaatatataaataaataaaagtgatcgagtcaacccgcaaacccgatcattatcaaaactaaaacccgaaactcacctgtttgtggcacaagattggacccaacctacctgtatcgagcgggttttttcaaatgttcgggttgaccgggtcaagtccgagcgggttgaccaggtccaggtcgaacctaatggaaatgtgcacccctagttcagtcaacctgggcgtggtgtgcccgagtgctccaaactagaaatgttccaacgttgattctggggcctctagcatgcttgtggctagggatgcacacagagcagagaatttgcggcgagtgcttccccgttcccatccccgttaaggattttaattctcattcccgcttattccccattgaggacgaggcggaaaatctcctaatggggcagggaatcccctaatgtaaaaataaagtttattttaaatatttaaatgtattaaattattaaattacataaaaattaaaatattacaaattacctattattcgatatacaaattattatacaaaaatacaacttaaaaaaattataaaaatgatattaacttactaaaaaaatatacaaacacatattataaaatataaaatattgataaaaagataattaataaattaaacgggtccccgtcaaggcgggaagtgtcatccccatccccgtcatgttcaacatttagtgacaaaaaatgatccatgtccccgcctcgtctccatttagacaaggaatctccgccccattaggggcaggtccccacaaggtcccatttccatggggaaaatgtgcacccctacttgtagcaaatctttcatgtgtctgagtgcgaaggctgagcaatttgcatggatgtaacggctttggagattgaaaatgatgcattttgggcacgaattattcaacctaggagcggggtgaaaccccaaacgctaggttggcctccgagatgtcaagttaacatcctcaacttcttgaagcatgatttagagtctttttgactatttggcttagactaatgaaggatgataatttggaaacaacttggcgagatccaaataccgacctgagagccccccccggcgcctatgtcaacctagtcattggaatagggacctagctttaggttgattgctatgattaggaatacaaaatctcgagaatattttttttttatcacttgtcaaaaataatatccacatcatcaaggctaatttcgaataaacaattataataagatatctaattttgaaacattgaattgaaagtgtttgctaatgctttgagcattctatggatttgaatttaattttgtttagttctaaatcattaattggaaaaagtaagggttgcaacgcaatccaaccaaacccaaatcataataaaggggttggtattatgggttaggttatactttaaaaatattttgagtgggttagaattttgagagatttataaaaatattgaaatttgagttaacttttacaaaaatattcacacagaatttttttaaaaaaaattatgtttttataaaacaaaagtgaaacacaaaacaaaataactaaaaagaacagtgaaacaactaaaaaataaccgtaaaataataataaaaacttaacacagtacacaatataatacttacagtattttttaagaaaaaaaacaccatatttttttaaaaaaaattccgcaacacacccaacccaatctatgagcaaccttacataaaattaaaaaaataataataataaaatatcgatccaaattttacaatctatattataatataccactccttcaagttcttttaacagttgggatctttgttatagattgatgttttgttggacatgattaataaattaaaaagtgtgatagtgaatagtgaatcatgtgtttttcgaaatgggattcaaggatgcttgtatttcttctagcgttcttccctttgtctccggtaccaacatggcgacaaaccaaacggttaacccacatatgcatgagaatccaaaaaatgtccctgaccataataccaatattatcctcctaaattagtctctgtttgttttgtttcatcaattaaattattttgtataaaaatattattacctgatgagctccaattcattaagaagttgaaaaaatatgatacaatccacgagcctaaccagctcaccaatgtcaccagacttcccgctgaccctttcatgtttattggaaatatctgacaaaatacaatatcacaacttactcagagtttttttaacattgttaaaagctcaatatgttaaaaatttgtaactataatgatataaaataattttaaaaaaaaaacaactttttttgttctcaaaattttctatcttctgtaactttgttttaaaaaatcattttctaataacaatcctagacacctctacttgtgttaaaaaaaacaacttttaatttttcctttaaaaataaaaacacattttttaagaggaaatgcaaaagtatagattttttcaaaaaaattattttacaggaaaaattacaaaatatggtaaaaacaagtaagagtaatcaattacctttaggataaccagagagaggtaggtaccccttacagtaaccagatacttatacgatttttctcatcttttttaagaaaatttttctcataaaataatttttctttttttaaaaaaaaaaataaaaaattaggtcatatttttgcaaacttgtaccttaaaaaccataaaaataaaaacacaattttagtcttgtgcctaaatcattaagtttaatagactacgtacctcatttaagaaaataaaaagcaaagaaaaaaggaataattacataaggcaccattttttgtaaaatatttacatttttacggtcaaaga

SEQ ID NO: 162501 - DNA, 5599 bp, Cannabis sativa
ataaatgtgtgtgcgaatacattgatttgatactcaaaatgagggagatgactttgacttttgtctgcgtaagcggcgtagagccacaccaaacctgtcaactttgataataaaataaaaatataaaaagggtagataccgacgtaagcgtttcaaatttgtaagtgacagaaacttaattgttattgtctttatttttaaaattgtaattttcttattgtcttaaaataaagcataaattctagattattgaatctagataaaaatatataatattatttatttttaaatatttttttaataaatttaaaataaaatttatattgacgaaactgaacaaaatacaattttttaaatattgaatatttatactattaaaaataaacattaaatattattatttgtctatataaaaataacaattattattatcttttactaaatataataactattatcttcaaaaattcaggataatttaatatcagttatccaaatttttttataaattcaaaataatttattaggttaaaaataaaataagaaaattgattacaaatgcatttattttttttttccttttatatgcatctttacaccgtcatataaaaaaatttaaaattatgggaaattttataatgcactccattaaaagagatacactgatacatctctatctgttttagtatacgaaataattttttagtcaatttttttttctcatggatatgtaaattataattatttaagacatcctacaaaattttaagaaattcagaaaagtttaacacgccgaaaattacgttcaagcagtgtattgtacgcgtgactattttattttatacaagtgtaaaatagattatttgaacattattttctatattgtaaattattccgaattttgtaggatatcttaaataactataacatatgaagaaaaaaaattagactaaaaactttttttaaataccaaaacaagtagaggctgcatcagtacatccttttaaggtggtgtattgtagaatcactctaaaattataactatccaaaacatcctatagtctatttaataaacactcggacacgtatactatacgagttcatcatttaatattttaaaataaaaaattagaatccctaacgtctagaacacaagctattatattatatatagaaaaatatcaatgggtaatatgtgaaaaagaatcagagaactaataattagtcaaaatacattacttaggatatatgtgaatgaatatatactattagatattccaaagcgttaattaaagtgagagatagagactataatagccaaagtaagaagagagtaaacaaacattttccacgtttcattaattgtctttcaaactttttgcatgttttaggtttaagagacgtgagtattttgaaaaattaaatgaacaaataaaataatgtattatttagttgttgtgactggtattcacgtacctatttgaaactataaagtataaacaagcttaacttaagataattaatgtgagggtattttgttagcttagaaatttggatttattttttagaatattagtttatccaaaattcatatttttggttttgtatagtctgaccgctaattatccttgattttcggcttgtgtgtatggtctgccttatttttataaaaagaaaagttttggtcaaatattttaaatcttggtgtaaagtttggtggctcttggaagattcttggagatatttattttgttctgaattcttcgaaacatgtcgggtcaaaaagaaaggaccaatttttactctttatttctgagatgattaactcccatgatttgattgacttgcccattgaaggtgacaatttaacatgggataatcatagagagggttcatctcatattaaatccgcttttttttttttaataagaatgatgtatccatttcaaaataaaccatagtgtacaggatacagattacagagtgaaattgtgagctttccaacaagcttcctgatctaagcctaatgcaaactttgcaaggcaatgaccatcctcatttttctggtcttgggatgtgcctgaaagtagcattagggagagaagacaacaagcttctaatatttgttgcaaacctattcagaagtaaataatgtgtagcagccttacaaatataatccaccaaagatttacagtcagaaagaatatagtctggagctatgttgtgtctttgacaccaagataaagcaaaatatagtccatgtgcctccattagcagaggtggttgaattccattccaaggtgacgcaacagtcaaaatcggatccccattgttgttgtaaagagcaaagccaagacctattttgtttgctgtcacattctgggcagcgtcaactgtgagtttcaaatgaaaacctgaggaagcatcgctgttcaccgtttcagccaccgaagaagtcttgaaagagctttgatgtctgttgttttgctggtactgcaccaaaaaatctggtgtagtatgaatttgatggtgccacgacccttcctgtggtgaaggaactcattcctgcaatgccaaatcttccaaagcaaacaaagaaaaaattggaactcatttgccatgagctcagtgcccgccaagtgtagaatatccctgcaagttagtgtaatatattttgaaatgaaattataaagatttgttagcttccataccttctggacagttccacacctgaagagagcatgctctagggattcagtttgatttgagcatcggcagcaggtagatgtagttagggtcttccttttgtgcagatttaaactagttggcaagatgtcataataagctctccaaatgaaatgtttggtttttgagggaatcgattgtgaccacaagattttccaccaggtttgattgttggtggtgttggagggtgaggggtcatgtttatagtttagactatgtgcttggtggtagccagaattgactgtataattaccatgaggtgtgaaaggccaataaaaggtatcgagggaggtaatgggaatgaggagtatggattgaatggcttggctgatgtcagagggaaagatggtgtcaatgcaagaaacattccattgatgagaaggggttataaggtcagagactttggagatcccatccgaaagatgtgcaagataactaattttaccatgacctgggatccaaatatcattaaaaatagaagttgtggtgccatcacctatcgatttcctaatccccatcttaagaagctccttaccccaagagatactgatccataccaacgaaggcctacatcctttgctagcatcaaggaaggtggtgcggggaaagtaacgggcttttagaacagttgccataagggaagtaggtgcctgaagtaagcgccaagcttgtttggccaacatggcctggttgaaagccttcattgagcggaacccaaggcctccatgaaacttggaaaggctaagagcggaccattttttccaatgaattttcctactatgttcagtgcctccccaccagaaacaagacatcatagattcaattttcgaaagaaaagagaaaggcatcttgaaacaagccatagcgtaagaaggaatagcctgaacaaccgattttaagagaacttcttttcctcctttggagaagtgttgagcattccatttgttcaaatgggaccagactcgatcggtaaggtaattaaaagcctctttctttgatctcccaaaagattggggaaggcccaggtatttctcgatggagacacgaataggaatgcccaaaagggaagtaatttggtgcttgatatcctcagtggtattaggcgagaaataaagggaggatttttcaaaattgaccatctggccagaggcaaggctgtaatcatgtaacacctctttgattgttgcagccgcagaaggagttgcttggcgcaaagaaaagatgggaaatgattggagcggtacgagcaattttcaggccaagaccttgattatgagagcgagagttcaaagtgttttgggcaatgatagcagacaaaacctcggagcaaagcagaaaaagataaggggaaagtggatccccttgacggatgccacgggaaggcttgactgaccctaaaatctgctggttgatggaaaaggagaaggtaactgtggaaatgcgtgtcatcacaaggttgataaagcgaagaggaaatttaaatttttccataactttctgaagaaaaccccattcgactctatcaaaggctttagccatgtccagcttgaggcccatccatccagtttgacccgttttacggtgggttaaggcatgggtaatctcctgcgcaatgataatattatccgatatgagtctacctggaagaaaagcgctttgggtaggggagataatgcggctaagaataggtttgagacggttcactaacactctagatatgattttgtaaagggtcgtacaaaggctaatgggcctatagtcagtgatttgttgaggatgggaacgtttcgggataagcacaatgacagtgttattgattgctccaaggtcagcattcccattaagaaaacccttagccgcacggaggacatcctggccaagaatgtgccagtaaaaccatccgaacccggtgctttatcactggccaattgaaaagtagccctctgaatttcatcatccgtataaatactattaagggattcagcttctgactccgaaatatgctcagttaggccagttaaaatgcggtgcatgagtgcatcgctaggattctgactagtaaagagttgggagaaatattgttcaataatgagagcgaaagagtcattatccttagctatagaaccgtcagggtgaagaagagaattgatcttatttgttgctcttcttgaggaagcaaattggtgaaaatacttggtatttttgtcaccaagctttagccaattcacacgggatcgttgtttccaatattcttcctctttatataagagttgatcaagctcattctccagcttccgcccaagcataagctgagcctcagtcggttggggacaattttgcacagttttgagacgcaactgagtgtcccttattttgtatttcaaggatggaccaagggttattttccattggctaagatgagaagagcattgttcaagtcttttatttatgttgatgattgggtcacattcagacacacgaggaaccgatgtccaagctttgcgaagacaatcatcaaagccatcctcagccatccaaagtttgtcgaaaataaagcgcggcatgggagatgtggattgcgcttggtgatgaaggtttaaaatgagaggccggtggtcagatctgaaaaaatcaccatgaagaaggttgtgatttggaaagagtgattcccaatcagagttagtaatagcccaatcaagacgttcctgagtgtgagtatttggttgttgcttatttgtccaagtataaatgtattggaaattattttaccaggatcttagatctacttacaagtatgttgattaacaccctaaatatgaacttcgaaaacaattatgaaataaacacatataaa

SEQ ID NO: 162502 - DNA, 1944 bp, Cannabis sativa
actttcctttctttgaggagtcacttcggcttggagctttataacttctcttattccaagaatgacttatatttgattctagaatttccatttattggtttgtttatctggggtggcactgtaaccagtttttgccaccctgaagtcggaaaaacttgtttgtacagctagttggctggaaatagcaatatgtacactgtgggtgttgtgaatgcacttgctagagaaacaatggctagagcagaaacctgcaaggtttgagttgtcctaggattggtagattgtgttggaagtactccataagatggagcataagcctcttccaggttaatgaatccttaggctctagaagagaaatcagataaagattcagccttttttcattgtagttctccccacaagaatgatgaataaccctgaagttaaaaccaccagcttcatatcatcattaaactttattttggccacatcatccagcattctttgtatatacttcttgaggctttctcccgattgtttcttaatattagtcagggagctgatttccatatcgtagtctttcgcagctatgaatttttttttaacattacttgtagatccttcgatttatgaacggatccaagagatgatcttttccactaatcttctgtagactttaacggagtcaatgagaaatagagacacttaacgtcatcacttgtcttagccacttgcatcattagggtatatttagataaatggaacctagggtccgtcctaccttcatacagactcatttgtggcattctaaaatgttccagcaactgtgcttctattattctttttgcacatgattttgtatattcttctttagaattagacacagttccattctacttccaggatatgcgttctgtgagcttcgtcagctcttaaattttttgttctagatgcttggtggttgcatcttgagattcaggtctacgaattcgatcattgatatggtttctcaaatcatcaccatgaggcctcgctttctcacttctagcttttgaccttctagcattcagtcgtgctctgagattattttttgaaagacttccactttcgtcatctgatattggatggactttatccacattatcactatggctagtagaactctcgggatgatttttatcatttttggaagtgggcttttgtgcctaagcatgaaacttttccttatgtgtaattctactccaaaattagtctggtgacctttccctagggcattggttcctttctttttcttaggaggttgactggcaggattttttctcctttactgatcgttgggacaactttttttgaggtctctcccatttttcccttccttttattctcaggaggattatgggtgttaagatctttaggatccgttttccttgtattattatcctaaaggagcagcatcatcagatacattttcatcaggatcctggtttcctcctccaaatatttcttccaacattgcaaatttctctagcattaaatgagaaaattcttcttatgctgtcaacttttgttaagttgcttctagttttttagccatctcaacgacctcatgattaggctcattgtgctcactcccttactaaattttttatcttctagatatgtaggattacgatctttagattcatcgtcttcttctccttcattgatgggatcatcgtgacgaccttgcttatcatgttgatctttttcttatatgacttgttgcctcactggatcctcattgaatcaagttttggtatttggatcaacatcatcatggtaataaagaccatatttggtttgggtgagtaccataattacagtatgtaattgttgatggtatcactgatttctttagctctcaatgaaagcacaaaaatatttaccgagatttttggaaactaaaatatttaagagctaaagaaa

SEQ ID NO: 162503 - DNA, 4677 bp, Cannabis sativa
cttccaagagtgagatcagatatgaaggcgttctttacaatattaacaccgaagagtccagtattgggctcagaaatggttttttctccattccttactaacttttctacagtttttagtttttcatacgatttgagtgattctgcaatttcggtttactttcatttccaagaattcgaaatatattttactgggttttgcttattagatgttttagggttactttggatgaacttattgtttaaattttgaaaatgtgacggtaataatgatatcgtttttggggggcggcattattttttgaaacgaaatgagttatttgactcggtatcgctgtatgcatattcttggatgtgagatttatcggtatcgtttttggagtttttcatttcgtaattggaagggaaatcttgtttaagttcttgctcaaactgtctaaatgacgtcacattttttactttactcgctgcgtgtagttgtgttgccaacaataactagattcccataggcatacaatacattttcatccaaattctaggctgaattgtacgctgtcacatttgcatagtagaaacattataactatatgtcttcacgtattgtttaggtcttaattgaactcagagagaagacagttttgagttgaggaactgaatttttgaacaatccttgtgcatatgccagaatttgtttctttatctctaattcacactacccttttctgcgtagaatttaatatctcgctgcaatttttaacaacattcttattataagctgtttcaagttttcaagtctcatataaagggattttctttttcttatagttttttatatgtatatttctttctgtactcactatgtaatttgcttcattaatggcagtacgatcctttggaacagagggaaggaaaaaggatggtccacaaattccaccaagtgataaagtctatgaatatatactattccgtggaagtgacatcaaggtattttatatataataatttaaatccaagaatattggactgaacctatccttcgcagtatatgctggatagtttcatggttaaagttaaatagttctggcttcttttttcccttttcttataactatgaaaagcagttacctattgtaaatttgtacttccatttctatataattaagaaattacacaatcaagaggtcatggtattttgacatttctgtttttggtatttattgacatgattaacttttgttgacacttgacagtatcttggtgagaattattaactccctaaattgttataccccattgttttttacatgatcttattagtggaagttgatgatgttcaaacaaaaacaatgtgtacttatagaatattgctgctttgtccctacccttggcctgatccattgacattattattattattattttacaggacttgcaggtcaaatcttctccacctgcccaacctgcccaacctacaccaccaattaacaatgatccggctatcattcaggtatgggagattgggaatgttttttttaacttattgataatacatcttccaaaatggtaaataaatgttgacttgctttaaaaaaaattgaatctatgttgcagtctcactatactcgcccagttacctcatcttcaagcttgccatcagctgttactgggcctttgactgatattggttcccatacagcgcaactaggacttcctgggtccacttttcaaggttcattgcctttgtatcaacctggggggaatttagggtcatggggagcttctcctcctgcaccgagtgcaaatggtggtgggcttgctatgccaatgtactggcaaggatattatggacctgcaggtggccttcctcatatgcaccaacaatctttgctgcggccaccacctggattatcattgccttcttccatgccgcagccaatgccaatgccataccctaattttaatcttcctttaccaaatggagccccaagcttgcccgaggctcctcctttgctttctgctgctactactagctcacctaatttaacctcaacttctgctgcaccatcaactttgccatcacctctgtctgcggtacctccaagttcattagcttctgaaccattattgagtacagcgcctaacaagacaccaaattcttcaatctctgcttctacctttagcgctggcctgccatctctgtcttctttgactacaagttcagatttaagtactattctaccaccgatatctaacaaacctacttcaatttctgctcaaactttgatgtaccaaagtgttactcagtccacttcttctcttgttggaccatccacttctgtccgcacagaggcaacaggacctctactggtcactcctggtcagctgttgcagtctagttctgccatggtttcatcacctcagccgtcacaaactgtcaataaggatgttgaggttgttcaagtaccagcatcatcttcagaaggctcaatgccagttctgccagaagctcagcccccaatattgccattacccacacctgcacgagctggttataaggttatttttgtttccgtcctctttttaaacatttttgaatatgcgagaaagcttgatggtcaccagcattataaaagcatgataaatgttcttgtcgtaagagaagattacaaggttttataagttaaaagaaattaatttagctgtgtttaagggaggttgtcatattcttaacttttaacatttaagtttgttagcgggccctttacctgaggtggccattttaatttgaagtattatcttatcaaacatgaccttttatataatataatatactccattttctctgttatgatgggctccctgacatatggtgctctctctcccagccaaatggacctccttacctaaatcagcaacatggttatcggggacgtggaagaggacgaggaactggggtaatgttctgtttgcattttcattttagtaacgattgtgaactctgggagttgtcaaactgaaagctttggaaggattgaaaattgagctttctctatgtatgtagacttcacgtccagtggcgaaatttactgaagattttgatttcatggcaatgaatgagaagttcaacaaggatgaagtttggggccatcttggcaagaatagtaaatcttcaaacacagaagggaatggagaaatcagtgatgaagatgatactcaaaatattgatgatgctgaattatctaagcttgagtccaaggtgagattgtcttgttgtgtctttttatgttggcagtttggcatctaaatgaaacgaagaacttgcaattgaatttcgtcactcaatctgctgtattgttctattttgtgcagcctgtatacaataaagatgatttctttgattctctttcttccaatgcacttgataatgagtctcatcatggaaggcccagatactctgagcaaatgaagattgatactgaggtaatgaggaatttgtagtaccaccacccttttatttttatttattgcctgttgatgttttagagattttgttcaacttttcttatatgttggtacagacttttggagaattttcaaggtatcgaggtggtcgaggtggccgtggtcctggacgtggtggccgtggtcgaggtggcggttactacggaaggggatatgggtacaatggaagaggccgtggacgcgccatgcccaatcgtccacagtagcttgttccatattatgaaagtctgtaggcaggtggttaaacctctaggccaaaagccaccagaacaaagaactcatttagggccgaatgttgtgtttttatttctattttataaaaaatgtttttgcttgtcaaaaaaataaatagagggatctatatttctttgttttattttcttttttcagtattcttttcatgtatttctatttctacttttagccgttcctatatggttctaacgaagatgaaatatacgatataagtaaatgcttttagcaatttagcattttcaagcgcctactcatacatgtgtggctgatttggatctgttctttgacagtatcttctcagagctggattatatgttaacatgtttctcttcatagtcccccgttttctctaatgctacaaatttctttgtaaattcatcctcattttctcttgctccatcataccaaatagaattgaaaacccatgcataatctctttggaaacttaattaaatgtaacgtttaatttatggctaggggatttgggttttgtgacaacaaaaattgcatttcgttatgtacttcgattaaatttattgtaatctaaacttggttggtatgatacacatttcattaagtgtaaattttcaaaccttgaggaatagtattgaagtttggtatgtttacttgctacacttctcaaatatttttttcttatacaaaaaacctaaattaaatagaatttacctcaagcgcacactcaattatgcctattttaatgacattaggcacccatcaagtttttattgagtttccatcaagcaccttcaagaaaaattttttttttattaaaattttgaattttaaaggggagatttcatttaatatacttacaaaaaattcctatttcaaaaaaaaaaaaccttcttaattattgtatacaatacaattctattaactt

SEQ ID NO: 162504 - DNA, 1188 bp, Cannabis sativa
gagagagagagagagaggttatttatattatgtatatatttgttatttatttattatattatatatatttattattattattatttattattattttatatacataaaaccttttttgatttggtcaaaatcgagtcttcacatatagtctaccgtttttctttcttggaagtaactaccttgcttaagctaagggtaaaagtgactgcaaacttccatctaacagtcatgattacccgttatgactagcgctcatgactttacatattctctattaatctagtcccgctatttttgtgccacgttactcttgccacgtcatcgattgttgttaaaatttggataaacaagtatttttaatttgtattattgctttaaaattatgtacaataccatttaaaaaaaattatataacttcgatttaaatgtttttttttaataaaagcatgcatatatacgatttaagtaactattagtatacattgcaccaaacaatatacttatatatacttaatactatgtactaaaaaagtgacacaattaatacctgagatagctcattgtttttataataattcctagacacctgatggtgttttcgtggatgtgtatcttgtatgttttggttaaaaaagaaaatgccataaattccaatttatattaatgaataacagttagatttacccaaatcccaactaacttagacaaagaaattgtatgccatgaaattttgccgaaaaagaagtaggctacattcctgtcacgtgcggacatgaaacacttaacttttaggacatacaccttatcgtttatggtttacaatagtttatctacacattaattactaatatactaatatatatatataaattataataatattaaattgtgtattcaagtaaagtgataatggtttgactaatttggcataaaagaatcaaagacacacggaatcgttaaaatatatttaaatttgattagagatcttttctcctagaaagatgttgtttaaagtacgtaccatcattcttatgtaaaacaaattaggttaatttatgttaacaaattaagtagtataatattgtatagggtaatttgcggcaaaacctcctaaagtggacaggtttttgcaactaaccccctaatctaaaattttggtggtataactacctaaaccactagtccgtt

SEQ ID NO: 162505 - DNA, 632 bp, Cannabis sativa
attgacattatcagcttctgttcaaggactaaaaccatcatgtgatgaccaaaatgtatgccatgccaagggatcacaagccacatttttctttgtaggactttaccttatagctctaggaacaggtggaataaagccctgtgtttcatcttatggggccgaccaattcgacgattctgatgaggctgaaaaggagaagaaaagctctttctttaactggttttacatgtcaattaatattggtgctcttgttgcttcttcagtgcttgtttggatacaaacaaatgtgggatggagctggggattcggtattccagccgcagccatggctattgcggtcatgagcttcttttcaggtacaaaactgtatagaaatcagaggcctattgggagtccattgacaaagatatgccaagtgattgtggcttcatttagaaaggtgagagttgaagtgcctaaggataagtctcttttgtatgagactgtggatgatgaatatgctgttaaaggtagccgaaaacttgatcatacaaaccaaatgaggtaatttttcttttaccttttctaattagtaactaggcaattatgatttttactccctaaattttaacatgtactaaattatgccccct

SEQ ID NO: 162506 - DNA, 2368 bp, Cannabis sativa
  modified_base (2335)..(2339): a, c, t, g, unknown or other
aattttaatttttattacaaaatgaaaatcatacacgatgttaatataaaatccagcatttctttcaaaatataaatttgtatatttatatatacttaagccacttgtcatatgaggcgtgtggaagtttttcttattcttctgacttttgctactttcaaagtttctttattaacattagtaattattgtacattttacttaaatacatcacactacatgataactaatttataccttcaaaagtcatcaatatctatggttaaaaagatgtccctatagtataaggacaaaagtagagtgtgtactatagaaattttctatattgatatatgttgggattaaacttaatttatgtagttttatcttttcattttcttagatgaattgaagaaaggtgttattagttataagagttggctttgacaccaacttaaagagagccccaccaacatttataaatagaagtacctttactctttgaagacaatctccaatgctcataattttagatttagagtcaagttttagagaaaaagagtccaaaatcacactgagtatgtgtgtggaggaatgtaatgagaatataacttttgaagtgatttctcattgtgagatagttctttgtaatttttcacaatgttaagttgtaatctttaacatatccaattatttactagtgactattcaattaataaagggaaaaatcttatagaataaaaaatgtagatggtaaaaatattcattattttaaaatttatcactcaattcaaaaacttatgttaaatgaattgcatgctttaatatttttgtgctagtgtccaatatatctcaatatatgtagggtaaatattattttagaatttttatttctattttgctaaataataattcatgtattttcaaaatagtattatgatcttaattttcgtcagaatattgagttcaggatattattttgtattatttttaaaaatatagagtttgatttgtcatttaaccaaatagaaggtctgatcgaaaattttacaaaacacaggtaactaaatagtgtagaaaaaaatataagctaataggatttttttcccccaaattttgatatactaaattgtgccccttaaatttttcaggtcgttaaaaattctcataaaattgagaattggattcaaggacttatgtccaataccgttaaattttactaacatggtgattgtccatataccaaattgtgcttctcgaactttgatatgtatcaaattgtgtccctcaaactttaacattattgacacaattttttgtcaacagatctaagaagatcgtaaatgagcaagatgaatacaagcaacaatcaatcaaagtaagccagtttgtgaaatttttttgacaaagatgaacacgagaattttatagtggttcacccactttcaacagtaataggcttgtccacttgtagttttattatgagaatagttctctagagttatattctccaagagttcaatttttaagtgaactttttgggaaaagagaaagagaatttgcgagtttgtgttctccgagtgttctcaagtgtttcaggttaggtagagagagagatcgagaccaacggtccctttacaatggccatcaccacccttatataggtgatgatctacgtatcacttaattttttctcccaatactatttaattaattctaaatttaaaataataataatataacatttcaaaattaatatctaaaaaataattagagttgaatgcgtcttccaagtcatgttagggagttgtgagaggcacgtatcaaggtgagacccctctattgggccgaggtgatgggatcgtgagaccccctttggactgagatggtggaggcgtgagtccccctttgggccgagacgacatgatggcgaggttctatttttgggtcgagacattgcgaggaggtgaggagagacctccttggtgtgagataccatgacgaggtgatgctccattggtgatgagggtggaggaccccattggtagtactccataattgagagaaactcattggtaggaccctgtgaggggatcccatatctagggaggaccccatttgtggtgaaatattatgatttttttacatccaaaaaaaattaataccataatttttttgagggataacaaacatatatcaaatcgtgtctcttgaattttatttacgttaagagtaaaattagacaaaaatcgttaaatttaataattttaatagttcaaattatacacgagtaatggctcttataattgtaacgtctccgcttcaagcctccgttgggcccttacacccacggactnnnnnctcttatacacgagtacgccacactctgg

SEQ ID NO: 162507 - DNA, 3061 bp, Cannabis sativa
  modified_base (1374)..(1375): a, c, t, g, unknown or other
tggtaaaatatatccaacagtgtttactctagcatgcaatatgaatttggtttaggtaggagcatacactgaatagaacatgtctaaagtggtcttgaatccacttgttttaacagtgattagtttggatctattgaaacaagaaagaaaaatatcctatatagtacaaatacactaattgaatagtgaaagtctcatttatgtctccatatactgtagtaatgctttatgacatctattaattgctctacttgttcattttatttcctctttatttctcactctctaatttcatatgaaaataagtgattctttaatgaaatttcttctaagtttctcaaatgacatcaaattttaattggtgtttagtagatttattgtgaagttcactcctcatctttgatatgtactacatatatagattagtctttcataaattttaaagattaaaaatctcaccaaatatcagtattaatctcaacaacaacaatgtatcaaacaaaaaaaaaattacatctttattttgatttgttaagagtacaatattaaaaaaagaaaaattttaacaaatctaataaaaataagaacacaacaaaaatgcaacaacaacatatatatgccaaatttgaaatatttcttcaatcttctaatttcttcatcagatttttcaacataattttgcagtgccattaaatttttctcaatctctagccttttaactaaatttatatcattccttgaagttggtgggtcaatccattttaaaaaacgacacccaatctcaatattactctgtcaaaaccaaacaaaaacccataaacaaatttttaatacccaaataataccaaaaaaaaaaattaaacaaaccttccatcttggacactcaaaaaactttctgtgtggattatcttctgtcaaggaagttcattcaacacattctaaaccacatttacactccagtggtctccattcatgtaagtcattaaatggcaaaaccaaacagaagtgaacggaaggactacgtttctgcattcattataatttgaggagtattcgtaacaagcagtatatattaggaggaaaattttggtagggtaaaggggacaaaagtgctatttattcaaaataaaaattacattagctgttgggcgaagagacgtatgtgaggaaaaaaaggaaataaaaaagtgaataaataaataaaaaaagtagaaagaagccggtcatttacgaaaatggaacgtaattgtttggttgtgtttttaatttttcagtttttaaaattgtgttttaaaaagtgagaatagaaaacaattttttgtcattttaaaaatttaatggtgtttgacacaaattttttaaaactatttttannttttttcttactaaaaaaaattaatattttaacaccatactattatgacatgaacccatctggattcgggttcgggtatgatttcggatctaggatctgagtatgcgagtaaaaatataaaatataatatgttagacaaaaaaaaaaaattgtttatgaaaattgaaaataatattttgatgttttttgtaatctaatttttttaaacttaattttaaaaaactatttttaaaaatttttaccaaacggtcctattagtttttaaaaacggtagtttttaaagtacgaagtcaaacaacctctaaatttctctttaaaagaaggcaatgcatgcaaatgcaagattagcctgtagaaataatatactgcgtattcccgaagtggtatttctatctctaagttgacaaaaaaaaaaacaaatgataaattgtaaaatagtaggaaacatagcatgtcgtctgggtggtgtagttggttatcacgctagtctcacacactagaggtccccggttcgaacccgggctcagacattttgtcttttagtttattgtttttattttgtctattatcaattcttacttagttaatccaaaatgaaagtaataatatcttatgcaaaatttacattacaataagtagtacactactaggcaacacagccgtgtggttttaaatttttaatttcatgcactagtttagatactttattataaattgagtaatttgtgccataacagtggcaaagtttttgtaactaatccccaattttaaaattttggtggtaaaaattaattattttaaaaataaatataaataaaattatttttctttaaaaattaaaaaaattaaaaattaaaaaaaaaaacaattttaaaaaataaaaattatttttctttttctttttctttttcttctcttttctttcttcttcttcttctatcctgacgcactcctcctcctccttcttcttcttccagcatcaccaccatcaacctcaacaaaatcacaactgcccaccaccaccactgcgtctgcgatttggccaggttttgacaaatggcctgaagctttgtatcgacggaggagtgaagaggcttgaaatcaccgaacttggcagagccttggtggcagaggtgtgggaaattaagcctagcgaaatcacctttgaaggtgcctgtatcgaaggtgccaagccaaagcttagtccgattcttagggagacggatctcaacgacccatttcccccaatgtcgttgcctaacccctttgtaaagctttgtgggtttcgagaacccacttgcttcatcgaaataggtctgtaattcactgttcctcattcacatgcgtgcttaacctttgcctatttattgtggaattttgaaacccatatatatgttttctctttacctactgtagtatttgtaacatagtgatgatgatatatggtaatcacccagaaagtattttagtgaataatgacatgggttattataaattttttgaaatgtgatcttatcttttacattgatattgtaggaagagattgcttttgtctgatgccaactagaggagaaaaaaaaaggaaaagaaaaataattagggttttttttaaaaattatttttttaatttttagagaaaaataatttttttttaaatgattaattttttattttttaaatatttat

SEQ ID NO: 162508 - DNA, 3943 bp, Cannabis sativa
  modified_base (3902)..(3916): a, c, t, g, unknown or other
ttgcgcttttcctttttgaacgaaaaggaatatctcatagaaaggcaaacttgccaagagagtacaaactagggtcaaagtgcactaccatcacactagctagctttaacaagagagtgagttatagcctaaatatgtttgttagcaaggaaataaaataaggaaagaaagaaagtcttgaatggatagaaaagtgttttcacaaaatttggacagtacatgtggtgcttgagggttgtgccaggtggcaggaagaacttaagctcactaataatttaacttgctatcaacaataaaaaagattagctctacaattcttaaaggtaactctcgcccctgagcgaaataacttgagcatctaggagggaaggtttgggaggggcttgaccctcaggatgcctccctagccatgtgtggtccccacttgtcagcgcacaagaaggaaaaaacagtgtagcttatcccttctgtaccaacgacaaaacgagtttctcataaaataaattgttgtgagaatttccccttaccttttctaacacgtaccgttcccatgcgcttgtaggcaactcacgacctcgcttgtcacatcactagcaaacaagtcttgccccgcgcacctacttctggactatagcccattagcagaatataccctttttaccaagggaaatataccttaaagatattacatttaggataactttcagcgaatggctaaattcaaaaaaaaaaaataatatatttttaattttctataaatagaagcattatgttcactgtaaaaggatcagagaattttggaccaagccaaaatcctattagattctctaagtaatttgccattgttgtaaccttcaacatcaatacaagtaatttgtggactagtacttattaacgtctgaacatcgtaaaaactctcatcttaaacacattttatcattattaattatatattaaattagttgctaaaaattttcggttaacaaaaaaatgtaaaacctccttcaatttgaggtttgagatctttcacatgggacaaagaatttatactgtagcaacaattgaaatgacttgctaaaataggttttgacaactggatagtacacaacttttagtgagtgaaacaattttttaatattctttctgttttggatattaagtacattgatgtgtaatttaattttattgggtagatgtatttaccatttataagagagagtatcttccattaaggagtttgtacattgatgtgtaatttaattttattgggtagatgtatttaccatttataagagagagtattttccattaaggagtttgtattctttgcatattagatagtaattgcacgtcaactataaactgatatagtacaaaattgtgtttaattgataattttttttattctatttgttgactcagaaatctagattaaatttttaagccacactcactcgctaaattggcggaaaaaaaaaaaaaaagtagtcaagaaattaagagagacacatctaatatatagtaactcacccctatatcatgatagtaatgagattacatctacttcgaatttttatttttcatgagatggtaattacaacaatagactaattatcagaaattccaaactctagagtgagaatttctcacattgtgggtagttttctgaatatgaaaaatgagctaagggagctctctttttttttataggcaaaagagacccacaaaaattggaaaaaattacaaataagataattttgaccgttgatgatgatctaacagtaaaaattagcttctggtggtgatgaccaatttatggtacccgacgagtccggctgcgggtaacctagagcttatttttcataactcacttggggagaattttgaaaacaatagcttcagaattacgtttggagtttgaggcataacttgatagatcattgaattagctttgaaatgcaagttgaatcatatcaatttgataaaaattgagtgagttatggttgttttactgtaggcagttcatgacctagcgcccaagttgacatccagcgcccaagttgacatcccaacgcctatgttgacatatgacatcaacctggatgttgggtaagtgtataaacgtacaagggatgtcctttaagatgcctaagtgatagtctgacactagttagtccatttatatgctctggcgaagctgatcactgatttttagagatgtcgctgttttgcagaattgagagactggaaactcttcatttctgggtgtgttgggaataagaaatgaaaagttgtgaatgtgattcctttgacttcatagatcattgtaattatgaaaaactagacggatggtcgaaacgacatcaaatttggataagcagaaccctacgcaccaggcctgttgtcaacttgggcattgggctatttctctcgagctcccgggcatagggaagatgtctcctaccctatttttgaccattcctacttcaatggtttcatcagagttgacatttaagcaattgaaggtagtgtcctaggttgatagtcaacctgggcactgggcccaaccctaggtcaacctaggcactgggcattgtttccaggttctcaagattatggttttctccctgagtttacttgaatcttcattattttttatgacaaaaaaaatgcccggaacgctttttgctgaacttgatcagaaatagcctaggttgacaatatgtcaatctgggcgcagggcccaaccccatgtgtcaacttgggtgctgggccccgtttttggcccttcaaaaattctgtttggtctgcataaatagttgaatatcaattttttttttgaagatggagaagtagctcgaaagaattcctgaaaaactccattttaaatggcctaggttgacaaaatatcaacctagacccagggccagtcccaagtgtccacttgggcattgggccctgttatttgtacccaggaattgttgtttttctcccagaaggacttatttccccgtttttgatgaagaataatacaatgcaaaagtcaaatctttgatcagacacttgaaaggcacccagattgatagattgtcaacttgggcgcttagtgctcggggtcccgagtgctcaaaaattaacttgctcatattctaattctgatgcctcaatatgtatgtggtatgtctatttgatgtcttaatgaaagtttttaccatttcgcactaagacggtcccatatgaaaccctagttgaggatgtcaacctgggtgccaggtgaaaccctaggtgcccaagttgactttcgagtttcatgtttgtgtaattttagctcctagggcttagattaggttgcttcattccttcatgatacaaaatactaaaacataatgggctagattcaagttattgaaatttgaatttccatcttggagatcccggagaaacctgggcgcagggctagggtcccctcccaagtcgattgctatgactcgggtctactcaactctgtgatgtcatccttcatgccacatgtcaaacattgatgtctatatcaccaggtaaaattttcgggttaacaccattgattaagaatttacataaaaattacttaatataattttaggttatatacactttacgcaaatttccaacataaaaacgattaatccaagttcttcttttgtcttaatcaagaaaacaaaaaatcgagaaaataataaattttactttcggagaactatgtaaatatgggtcgggttttttgacactgtacgaaatcggtacgaatttgagagttgcgagcatgactcgacacgaaaaaaaatatgtgcttaggcataacatagcacgacttgaaaaaatatggacttaggcacaatgttgttaggattttatgccctaannnnnnnnnnnnnnnatataatcagatttactaattaacaaa

SEQ ID NO: 162509 - DNA, 2524 bp, Cannabis sativa
gttatttcgcttatagaggcgtctatgccaagaatgccagaacatcaaacgccaaattagagacaatgctctctctattagagtacagatacttcttattctgttttggtggttgagattgttgttttttgatttggatttgtttgattgattcgagatgttcagagagaggagaagggtgtagagaaagccattagagaagctatcaagagaaatgacatgggctcagccaagatattgcttatgaaaacttctaattccatgtttttttaattatataacaatgcaatattatgacttactgaaatgctaatacatggttgaacttttggattaagatttgggctatcatagtttcagttatatatgattgggatcagtaattcagtgtatcacttttgtttactttagggttttggttcttttgcttgttaaagtagtgtttaaatgtacgttcttcagcaacatttctccattgtagaatttcttgaagagtagttgattaattttctgtgctgtaaggatattatatgattttctttttaatttttaactatttatttaatatgcaatttacatctcccatacaagaaataataggattttcaagttgtagaagatgaatgtatatttttttttccatttaaagagagacattatatatgctctgtcatgttacatttccttgttacactattttacattataccaataatttattgattttagttagtttattataattgtagtttgaacattatgcaacattaatttagttgcctataatataataatttaaatattttagttttttttctatgagttttaatttaatattttaatgtaaattaattatttttaaaaataaaaaataaaaaatgttagaggcgatatatattgccggcgacaaattgtctttaaaaggtataggttgaccataatagtactactttaatggtgaatttggggtgtttagttattatttattcgcccccaaaactctcatttcttgaagtacattatttagttattctcagttcaaatatatgataagtttagtaataagtagttttataagtcattaatttgctactattttagtatgtaatctatatgggagtattgacactaactatatatattcatgtaactaattatactacaaccataacattttgtatttatttaagatatagtattatagtaagaacgtggctcttattgtgaactcaaatttcaaataaatgtgttttcatactaagcttttagaggtattgcttatgataccctcacaaagagcaattaaattaagagtacacttattagaagtgcacaaagtgatcaaaaggtttctttcctatcaaagatctttccaaagagaatagagttttgagctttttgttattatttcattgcagcttttgcatcctgagattgttatttgttcataatataagcaaaagaaaccatgagattttccaaatgctttgctgagtttcatgttcaacttcaaaagaacaaatcataccttccttgtccaaatttgctacttttatttgtattaaggttaacattaatttgctacttgattattgtatgttcaaactattaagttataaagttacaataatataattgacgtatcctacctacctttttcttttctctgtgtcacacatctctaattaattttacgatatttgttatctcaaccttataaactcttgttactttataaataactatatcatatgagttgaaatgagagaaaatatactaagtaatatgaattttatggatttagcatgaattttgaaattgtaagatacaataagtgtaaaaatttaaattttggatactcaacacgctccgtttgtgattgaaagtaaagtctgaaacttcaagtcaatttcgaactatgattcgttcacttccaggaaaagctttttgaataaaagttctagatctttctaatagtttttcaaaacatctttaattgtctaattttgagctatatcgatatagttaagaccaaaatatcatcggtctaggaaatcaaaaacacaagagaattgcgactctctatccaatgtcgcagctcttgagaaaaaatagaaaacttttcaaattttgtctacaaaacgagttggagctaggtcttgggaataatttgaatttcgagaccaattttgagcatagaaggacgactgagagtagaatacactattggaggactccaaatagtattctttctcatatctatttttatcttttatgtttttaattgaatctttactgtttagaatgacttttatgagctaatttacattttagggttgttatgtgaaccacctaatttatcttttatgtttttaattgaatctttgctgtttagaatgacttttatgatcgctaatttgcattttaggattgttatgtgaaccacttaattttttttttttatggattaatgtagttattcaatttttttttctttttcttttaattccatgcaatctgattt

SEQ ID NO: 162510 - DNA, 7705 bp, Cannabis sativa
tctctctctctctctctgtatattatatatattgaaaatgtaatatgggatttgcatcagtgacaagaaaatggaaggagatgatggttggagaattgtagagggcttaagaggaaggcttcttgcagagagacaggcttcaaggattgctaaagaggaatcagaaagcatggagactaaggttaatttaattttgtcataataataaaattatctcaacttaccctttgttcaaaattttgattcattttttatttttacatacagctaatagagctagagaaactgttaaaagaagagataaatctgaggaacaaagctgaaaagaagcttaagaggataaagaaaaagcttcaaagtttcaacatttgttcatccaaatcagtggaatcatcagaacaatcatgttgttcagagaagagtgaagtttcttgtagatcattattcactgtcacatctagtagtacttcttcaggccccattgactcagaagagaatgagtcaaattttcatgttacctcacgaaaatcaacgaaaaatcatgaaagtcctaatactgagaacccaattgatcaaggtactgccagctttgaagatttctatgataacccaagtaataaatcaaggtatgtctctctcttttatttgatttcctacttgtggtctatggcctatacaatctgcatactgattaaaagaaccatttggcatttggtatttccctattcagctctgcagactttcgatgttcagtggaagagaatgagattgatcacgaggattatgtagatgactcttttgcacttgtgccaattaattactgtgtagctgaagcccctaaaaggattgagctaaacccagttcatgaaaatgtatcagaagctcttgactcacttaagtatatcagagaaaaaattcaaagctcaatggaaataagatgtatggttagagttggccctacttaaaactcagctctgatgaaagtaaacatatatctatatctatatgcatatatgtttatctccttattagatgacattataaagtaaaatcacattttgttaggaataacttatctttcttttctgatatgcaaataatttgagatgaaaaagcagaatatatggatgcaactatgtgtgtggatgtaataaaatcactttttgactgtgttcagttcacatcacttcacagagagcatgtgaagtggggttttctttacttttatttattttatttaaaaccctcttttggtttgatccaaaatgtttatgcccatttgtttgttttcctaattgaaatttttaagagtttggtttgatttgggggtcacttggttcttgtgacttgcatatatgcatggtgatttgacttgtccacttaggcttggcttgacttggctctgtttttagctcaaaaattttgatgaagattcacaattataattggaacaattgattaataaaaatgttctccaaaggtgaaacatgctttaattgcagtagtggtgtatttgttaatggatactgccaaagaaacaaacactggtataaagccttagacaaattcccgtagcctggcttatcagtcttctaaattcttggatttacatgcaccccatcacatgtccatctacacataatacagacaatgtaatagtgtctgatataaagcctctagacagcctttggtttttctcctatgacgattgaattggtcaagaccaataattttacctgacatggttgggaatgaaaatctaatatgatatgagaaaagatgagaatatagagagtttgactgagttacaaacttgttgcttaactattagatttgcttatgatctttgaaattcaaaagcctatctttcttacctaatacctacctttgtcaaactttaaaaggggtaagaaataagtgaaagtgtaactaatttctatttagtactgcaaagaatactgagtcaattgtgcccaagatcatcatgtgagaagcatatgaacgagtaaggcacgtggtttgcttttacaaagtctgaggttcgagtctatgacaagtatctatatagtaattgctataatttttcatctttaaatattataaagttagatgaggagcctaaattcaaaacaatgaaaagaagagcataaccgatcaaattcttacaaatcattgcttctattttttatccgtacaatgaacattactagaatacagtttctctcaaatacacatttagttttgtcttcaaataagaaccaagttgatcaacatgcatatgttcagccgatattggagtcccaatgagtgtaccaaaagcattggttggtctcataaaaggatcctcgtcatactaagaaaacagcacatttctaaaatttgcaaatcactagcgatataaacaagtctcaaaccataatatataggtgtaattgttagaatttggtggtaaggtgtgattaaggtgcattcatcttatatatgatgctactttatttctacactttaatagtgtaagactaagtctaatagtaatactaaaaactttgtaaaaatacttgtttggaaactaaaaagatacagtctgttattctctttcaagtaagtgaattaattataataatatgtatattattattatttaattttctttggtgggtctcttgtcctctcttcaataagcatgaaggcccttttcaaagattaatgctgggaatccaaaatggctatattggcccttatttgagaatagagagaaagtaatggtgtggcatgggtctctactctctatggacggtatcaaatagaatttcagccttcgcctattgattccaactcattgccaactccaaagcatagttaaatattagtttgcattatttattattatgacttttgtgatagacattgtaaaacacatcatggttcaataatttaatagtgttttcttattatttttgggtcataactcataactcgtataactagatgtaatttaagttgttttaacttaaacatgagtacgatttcaaaaaaaaaaaaaaaaaaagattaggtgttgttaaggtggttaatgttggatgccaaaaatcaaatcttcataagggctgtcccaagccaacaccgatgaaacaaaaagtggtttaagacacggttttgtgcacaaacagaaacagttcttcctttcccatgttacataaataaatatttaggggagagtgagttaagagagagagagaaagaggagctgccactaagtaaaccagacaaaaattaagtaggagagagatggggaaatttgcctagaatggtggatggattattagtagtagtaagaaaggtcagagaactcaaaacctcatccatgaatttcagaaaagcctctctcaaaaccccacttggccacaaaaacataaaacaataaagaaagaaagctagagaagagagagagaaagagagtgaacaacaatgtcagaagttgtagtttaaaactctcatatttttgttatttttaattttttttcccatcttagatctcatctgacaacaatctgaagatcttctgccgaaaaactccaagcccttctcttatcctttgctcccctttgatcactctgatcttggaccaactctggcattcaagaaatgtgtatgtgcttttacagctaagtttgttttctgaaagattggcacacatggaagggccaaacatttgcaacccagattcaaggtacacagaaccagcacgctttcatattctctgaactcacttaaagctattgctttttggtcccaagaagacatttttgagttgatttagcccatacccatttggtctctactctctatctatctctactttggttttattgatggtgtcttggcttgatgggtatatatttttaccaaatgggtttgtttttcagcacaatttaaaacaaggcctgatttttattccattgattgctgctgctgcttctgggtcattttggataatgagtgttgcacttactacttctcttatttgttctgaagttcttgcttgaaaatgattaaaccctgttggaaaccgtctgttgagggtgatggacctcgtcgtagaggaggaggaggtgatggttctggtcgtgttgatggtctgatgtggtataaggatctgggtcaccatgcttacggagttttttcaatggctgtgatccaagccaattcgactttggaagatcaaagccaacttgaatctgggtcactgagttccacaaactctggtcctcatgggacctttgttggagtatatgatggtcatggaggtcctgaggcttcaagatttgtgaatgagaacctcttctccaaccttaaaagtatgtctctctattgagtgttttgatgtgtatgtctctctattgaatgttttgatgtgtatcttgcctaaatggttatgaacttgcaaacatctttttatactgcacctgagccaatatagttgtttgatattttgtggtttgcagcgtttgctcccagaagctctaaaattcaagtctttcgtgagcctaatattgtagggttaggcaggagtctagtttcagaagatgttgttcactatgatcacattcactttaattgatcatagttaatctagagctttctatatttagtatccataaccttcaaggcttaaactttgccttttagtacaaagatttttaattggggaaggatcaggaaattatgttaaatgctgtttttctgtcttcttgttcagtgcagtgtagtgaagttactgagtgtttatttgatttttgttttgggcaggagttgtagctgagcatcaaggcgtaacggaacatgttatcaagaaggctttcttggccacagaagagagttttctctctcttgttgagagacagtggcatagcagaccgcaaattgcttctgctggaacatgttgcttggtgggaataatatgcaatgcaacgatgtacattgcaaacgttggagattcccgggcagttttagggaaagaagaaagggcaactcacgaagttagagctgttcagttatcatcagagcacaatgcaagtattccatcagtgagagaggaacttcaagcaatgcacccttatgatccacagattgtggtgttaaaacataaagtttggcgtgttaagggccttatacaggtaatgttcaagacttttttgtttttacattcacagttccaatgttgcataagccatttttcaaagaaagtgcaaaacttgaaacatgaaccaaaacagtcttaggatttcatcttaacatgtccagagtttgttcaagtgactaggatttcatcccaaaattgttaaacttgaaactccattcatttttctttctctaaaccaaaaattcggagagcatagggatgagcatcatggctgcaacattatgaatccaagatgttcataaactcatgacactgccagttaataatgactaatcgtttgctctttgcaggtttcaagatctattggtgatgcttatctaaagagaacagaattcaacagggagcctctactaccaaaattcagacttccggaacctttcttcaagccaatccttagtgcagaaccatcaataacagttcaaaaactcacccgccaagataaatttctcatctttgcttcggatggcctatgggagcatcttagcaaccaggaggcagtcgacatcgtccacaaccacccacgtaatgtaagatttggtactagtatgtatatacagtctccaataataagtcttagtggcttatcattgcttgccttccacaagaataactcattctatttccttccttctgtagggaattgccaggaggcttgttaaatctgcgcttgaagaagcggctaagaagagagagctgagatactcggacctgaaaaaaattgaccggggagtgagacgccattttcatgatgatattacagttgtagttgtgtttatagatccacattcgataaacgagaacttcctacacaactccccagtttcgataaggggaggaaaccctgttactcccactacatgaaaattattagaatactagaatgaatatgtttggaaatgtcaagcttctcataggggattgcatcacttgaaatcaagctactaatgaattgaacttatggttcaattggaaagctccccatattttcccatgattcctcatctctactcttggttggaaaaagcctggccttggccttggggctttagattagttgcaccctccttcccttcccccagtgtctttgtagataaaaacttttacttctacacattgttaaactaagaaatgtgtcatttatttggcgatagataaaatcttttattaatgtgaaacctcaaatgtgaaatgtcttgttaaggtttgaagattgttttcatttatagaataatgtgtacattttgaattctattccattatacttcttcgccttccgctctaatcccattaatcgacctcctacgatgttgaagccgtggaattatcttgctaatgatttgaaaacataagatcatcccctaaaaattgtgttatatttggcgctgaaaaaaaaattgtgataatgtatttacatcaatttctaacgttgtgttctaatatataattgtataattttgatacaaaatttaatatttttattaaaagtttaataaagaaacttttacatgaaaaatataattggcttttttattacctaaatacctccacttgacatgggcagtaattttacatttaatgtacttttatttactaaaatatcacttacacacaccttccacacatgcatgaataattgactgtgattgacacatagtaactttccctcactttttttttcttctcattttcattttcattacagaattcttttgatatttatttttatttttatgtttcaaaattttttatccctaaaaacctatcccaatccatgttcaaaagtcatatacccacgatccaaagcttcttctcctattattttctccaactcccttaacccaactgcccaaattccttttccctatttttttatttttgtctgaagtaatataataatgtcgattacttgttcttcttcctccccttctccattgcccaaaaaagcatccaaaatgggtgttaaatctgtaacaaataaatccaaagacaaacgccgagttgtagaagacaatgactcaaactttgctctgcccattgtgaacgcgatcgtggacctgggaagaaaaaatctaaagtttctattcctcaacatatttctccctctgagaataggaaaaggaaggttgaaggtgatcatggttcggaggtttgtttatagttttttttttcatttttccgcaacattaaaattttgtgtatttattttgtgggttatctatattcttttaatttcagtttagggtttagatttgtgtagttatttgatttttatgttttgttcttttgttagttttcattaactgtaatcattttgttccttgaaattagtttttattgggttattatttctaattttttgttatattttttatgatttttctgtgatttatgcttttatatgttttattgtcgctattaggcttgtttctaaactgtgttgatggttttgcttttgatagtagtttgtttattatttttgatagtagtttgtttattattttt

SEQ ID NO: 162511 - DNA, 5217 bp, Cannabis sativa
atcttattaggattaactcttataatgttctcattgcctctcttttttcttgtgttctttttttttattgtagcttgcttgatctatacgcctgtaaattgagaaaacttatcttagtctaaccatatttgaggtgatctaatagtggatcagacacttccagagctgtttggtatgcaggtttccttactcgggaatgaaaatacaaaatataacctatgtttagtatgtatttttaatttttttggatggagttgtcattttactgtacccttacctttacattaagggaatatcaacatcttcaaaacgttgagttttatttgactggaaaactcggcccttactttgaaacgctctctcttcgtcacttggtgaagccttagctgttgttcgctttatcttcttccttgaatcaggtatctctctctttaaatatatatatgcgaaatcaaagtatctatcattttcatgaatctgcatcagatgtggttgattttctttctaatctccttcatctctctcttttgttcattctctttcaatttatttaatggttagtagttatgttctcaagctttgctctgcttccctaaaattgaaagctctgtcgatttgttctagagatttatgggtgggtcattaagcttgggctgaatctgtaataaaatacagacctctcttgtggtgttccatgcaattatcaacataattatggaactttcaaaatttgggagtagtagtactagtatcggagaaaaagagttttggaactgaaaaccatattattttccaactctttgagaggatacatgtctgaacgtcatccatagtaggtagaaatgaggaaaatatgatggtacatacttgtcacctttaaacgaggaaattatgatgttatttttagttaaatatagctacaaattctaaatggtagattgttcctttgcttcttagtaaagaagtttataatatataaatatgacttcaacttttgtggtataaataaaagttatttatatatataggtgacaagtatgtagttgcaaacatataatcacaataaattcacaatctgaagcaaattgctgagttggtttagatgaatgatcatgttagagcacatatatatgtgtgtatgtgtatgctttctttgggtagagtttaacagttcaaaaggcatgcaaagaaaatgacttatcagccaatagccctgctctgcccacaagacttgtgtgcctggtccatgctctatgtacgagaggcttctatataatttttttgaaagaaaatgataattataacctgagagagaattaaagagtgggagacatttgggtttagaacccaacttttcaactcatgcataaatttttctgccatttctgtatcataataactcatttctgtatcatgaattgaaaagtttttgtattagatatgatttttttggtctcatttgtatatatttggctacagtttatggatgatttttaactggattgtttacattttccattttctattatgtttagattgtactattttgattcattgttttgattgccatatataaaagttaacttcaattggacttattttgttctgtttttgtttatagctcaaatgatttgttttgttgtatgagatatgatttttctggttttatttgtttcattggcttaaatttataaaagatttgtaactgggttgcttacatttttcactttccgttgttttagattgtaataatttgattcactgctttgattgtcataaaaaagtaataataatagcggacaccaatacgagaatcctctaaatcaaatacaagaaattaatatagctagttcataaattatattatttactacttaaaacagagtgagttgtgtgtgacatctggaatggtccaccactccacctaatccttcctttctacagttttttcatttttctttcaccctcttttatctatatggtccacatctcccaaagcaatgctgccaatgtttgtttttcttgtaacaatttactttgtctcttcttacatttctgtaaaaaagaattggaattgaattggtttaattcagatcagataagagctttggagttgctttatcatatttagtaaatatataatagtctccaacccatgtactgatgaatcaacattattattaataataatgcttcttaagacaagagcacttattaattgggttaattgattctatagttctaatcaggttgggttaattgattttatcagtacattcatggagctagctaaccttaaccaaaattccaataagtgcacctgtcttaacaagcattattaataataataataatgttggttgattcatcatcgtacatggtttggactattatgcaaggctttatttatctactaaatatgataatgtaactccaaagcccttaccagatctgaatttaggccaaatgggttgaaattgcaatattgaaatagacaaatgtcacaaatctatggttttggtccctaatttttttttaatgttttttaaattctatgtgcatataagtgagttattatttttgttggttgcaaagaatttgtagcaattttattttaatatatgtggagatgttaaataaggtgacactttttttcttactctaagtaattattatttgttgtaagagacgtataagtacaaatatgtttcttcaaagttatttctataggcactaattacgtcaactagatatttttagaatgatacatgctagatttagcttgtatagaaaatactcatatggattggagaatatttcgtatattgtgtcaccaacttagaactattaaaggtttgaaaggaacaaaaattatggatgttgaagaaatgattgctatatttttacatattatatctcatgacattaagaatagaattgtgagacgaaaatttgcatgttcgtgtgaaacagtgagtagacaatttaatgttgttttgaatgctttgttgtgtcttcatggactattattaaaaaagcctgaatcgattcttaatagttcaactgatgagaggtggaaatggttcgaaaattgtttgggagcactagatggcccacacattaaagtcaatgtgttggttgtagataagcttaggtatcggactagaaaatgtgaaattgctactaatgtattaggtgtaatctcaaaagatatgtaatttatttatgtcttactcgaatgggaaggatcagctgcagactctagagtgttgcgagatgctatatctaagccaaatgggctgaaagtttcacaaagtatactttttcttccatgtctaatatcaaaggttcacaattttatcaatcaatttacaagatattactacttatgtgatgttggatattctaatggtgaatgcttcttagtactgtatagaggacatcgacatcatttaaacgactggaatgtcccacctaatactcctgttgaatttttcagtatgaaacattcttttgctcgaaatgtagtagagagagcatttggactattaaaggaacgatgagaaattcttagggtcgatcgtactaaaattctatttcaagagaaataaaatagtgcataaaaatattaatttacttcctgacttggtggtgaattgggctcatgattttttttttggaacttccaacatactcgggctcgggctaagcttcctctctccttgggacaagcaacctctttgccttctaatgaggttgtttcgatatggtctcctccgttggcgggttctatcaaggttgaaagtgatgctgctattgataaaactggtgcttgtagtggccttggtatggtggtgtgtgatcattttgggtactgttcttgcttctgttgtttggcacctacaaggttgtcttgctcatgaagtggcagaagctttggtgttttggaatatcatggtccaatgtcattgctttgggtataataatatcatctttggaatgaatcgcttgaatattgtgcaaaaagtagtgaacaaagtttctgttgtttcctttttgggttttgtcttagatgaaattggtaatctttgtgatggttttaaagatgtttgtttttttatattgtcctatagatttaaatgttgttctccacaccttagttagagtcgcttttacggcatctaacactatttggtagtcagattctccaagttgtattcagaacttatttatagttgatactactcaatattgtattctcgctctctccttttttgagtttcattactcttagtgtggtagttgagatattttcttcaaaataaataaataaatttcaaacatcatcataaccaaactctgtaataataactttatttaaacattgaataagtacataataactttttcttttatagatttcaattacatattgatttaattattaaaattaaatgatttttgaatttatattacatccataactactatcttctcgcagtagaaatgtggaagtaatggttagtctaattttgtttttacactatctttttcttggaaaaaaatcttctgtgccaaaaaccatatctccaccctgtcccaccaataaatttaagccacttgttttttcatttattaagtattttattaatttttttaaccttaactaaggttaagtcaatagttaattttcatcccataattaatgctatattctctctctcaaaattgtaaaagtcttattttaattcaatatcaatatctttcaaagtaaataaggtagttaattttcaccctacaatttatgctatattctctctcttaattcaataacaatatttatactaaatattaaattaactatatatatatatatatatcatatttttcgtttcctatcttgtgctaatgtttatttattattcaatatatttatatttttttaataaatattgtatatatattaattagtttgacaattttatttggcaggtacataattcttctctttcttttttttaaaaaatggtaacatttaataattttatcaatatatatacttaactattataaaaataactagatttttttattgataaatatacctttatatcacaccccactgctatttaacttttcaaattttcgtccaactcttttgttttgcttgtatgatttttttttttttttttaaaatcaaattcattcattcgtatg

SEQ ID NO: 162512 - DNA, 2739 bp, Cannabis sativa
tttaaagattacagcgtaagtaatacctgttcttcctcctctattgccccacttaactcagcccctcgcagcatcaattttaattcctcttctgtaacatatggttcactgatcaaagaaaaattgggaactttaaagcaatggcacaaatttttataatgaaaatttgctcataatcttcatgtttaacaaaaggtataggagcatatatatcatatgtggcaggtgatgctcaaacttatcaatatagttgttgctatcgctgggtcttgatttatgctacagttttataaatatatcatgtttaacactagtgcatttgcaagttaggaaaatcaagccttcaaaattgtttcaaatgatcgtggcattattcttactcataaacattcaatacaaaacactcgcattggctattttattatagttaatgacatcattcagcatacacttcaacaagaaacagaccaagagtggtattattgtcaagcagcaatttcaaagaacaaactactagtagtattgtatgaaagttctattaccgatctgataagaaaaatgcactcaagtaacaggagaaatgaaacaggcataacaagagaaaaaagaaatgcagagtatcaaaataggattgtttgcaagcacaccttcttcctttcaagccaagcagttttaaaattcccatcgataaatatgtaacaactcttccaacaggatataaaaccaccgaaagccacgccactggtctgacctacaagatcccacacatatcttgtataataatgtgatacataggagaacattcaactaaacacataaagtagataaacaacaattgcatctggaatttagttggcaacacttaccacaaacctagcaacttctgtagcattgtgaacagctatgctttttggagtgatttcagtaaggagcaatatggcaacctaccaacatcatcaaaacaggggaaaataacataagcaatattttcctagtgacatttttcattaggaagtaaaaacaaactaggagttctgtgtttttcttcttcaatggcaatcgtttttggtctgttagttagtgcttagatgggtggaatgtgctaacagatgttccaatccataataagcatcttaagatagccttttcctattgaacatggtttcagaagcagaaaaccacaaacaagctgtgattagaaattagggaaagaaaactgctacatgtaaatacatagaagcactaagcatgaatagtggttcaaatagtgtccctaatgttagatagatatatacacataatgtttagaagaacttcaagttaaatagtttcaaagtttaaattttcagtctagaattagataactatcaaacttctagaataagtttattaaggtggggatactgaaacttacagtcattactccagttgctgcactaacaccagcttcgccaaacaatgctgttgcagcctctgtaactaaagccgtagctccaatattgacaacactgagaaattcaataaaacgtcagcataagaaagagatactcaatataaaagctaaagactaataaaagaaaaatgataacactcaaatcaagaacaagtgagaagtacgttgtgccgattaatatagttgtcaagaagcgagtaacatcactgcgaagcattttgaagagaccattttcagattctttctcagctaactcacgcacctgaccgtgaagcgacattgaattatctaaacgacaatgcaaagcattaggactattctgaattaccaacttaatagaaatggcataccttccaaggccaaagcgtcgtgattgaagtctctgccatagaaaagaatgcagagagtcccaaaagcaaagccaaaatcaaaccctgttctttgaagacctgaagaacctgtaacgtcttaggccaagcatttctcattaataatatgcacggcccaaaaacgccatatccagcattgacaataccttcactcgctaaagcttttttacaactatataccaaaaccccagaaaccattgccacgaacacaattccacgcttcaaaatttctcgcaaaaactcaaaattgaaaccattttggctgccgaaattatcaccatctttgcctctaggtgtcgaacaatcgctaccaacgtacaagtcaatatcacctctccacgctgagcacggaaagctcttaaaattctcagaatgtatgccatataacgccaatcgaaatgggtaacgattattcaccggaaaactcttcgtgggcattcgtattctcccgttatagtgaaacaaacccaatgattttgtcttatttataaactttggtgagctcagaagcgaagagtcgagcgccatatccattaattgttagctgaaaaggtatataccggcaaaacccagaaccgaaaattccttacaagattttacagataataaagactatactttggcaagtaattcaacttcgaaggactatgaaagcctccactagaggaaatgcgagttagaattgagcgttcgagagataatttggttttgcatatcaactaagctaaggaaaaagcctaaaatgcgaagattgaagaaggtctctgtagctatggaagggctggctttagttggtttggtgaaacaaagccaaagtttggcagcagcctaggcaaattaccaaaatgcccctattgaatagaagcattagaaaacattattattattagggatatt

SEQ ID NO: 162513 - DNA, 4408 bp, Cannabis sativa
agcgggattaggattttattatcagttgtcgtagcgtgcttaattgttagggtgttacatcaagagtcattttttttgactttaaagtgttgtcatctaaatttttggaaatatttgagcatatttggttatgttttcagtttttagaattgtgttttcaaaagtgagaatagaaaatagttttttattattttaaaaatttaatagtatttggtacaaattttttaaaattatttttagattttttcttactaaaaaaattaatatttttataccatgacatgaacccatcgagttcgggttctggtttggtttcgggtttaggatctgaatatataagaaaaatataaaatataatatgttagaaaaaaaaaacaattatttttaaaaattgaaaacaatatttcgaaatgaaaacaatataaatatggtattcttgaaaaaaaaaaaaaaaataaagaaataaataagatatatttcaaattatatttgtaaaattatgagatgaaaatgaaaaaaataaaaaaaaaaagaggaataatcttggctgacacgtgttcattgggtagacttcgtctttacttaattcactttctcacttatgatttctctcgttaacgaaactcatccccgatactacaaggaagaagagaaccctaaccctagatttcgtctatcaagaagatcatggccagcgaagcccagggctcgcacaagcaccgtcggtcgtcctcttcctccgacgaggagaagtctttgaagcgtcacaagcatcgccaccatcaccgcagccaccaccgccatcgccacagcagccgaaagcgcggagaggagacaaaatctgccgtcgatgatgatagaattcctcttactcctcccgttgtgattgagaattcccggtccgatgacgatgtggaagaaggggaaattcttgatgaagagggaggtcgcactggcgctgttgatggagttgcggagaagacagcggagtctgatgttgagtctggtgaaattgaagccgtcggatatcaatcggataaacgaaatctggtctgttctgaaccatcctatgtgcttaatttctttaaagctttatattttctttcttttggccgttgagaaaattttgcaaattagtatgattactgtgggtgctttggttcgaattacattcgacgttttgaaagagtttttcgtggatagttttctcagtggccaaaagggagtttatctgattctttctgtggcttttatcgaatttatttatgatcaattttgtttggtgagagcttgttagattatctgagtcagagtcattgtgtcaattcatatctaacaacctgcttgcactagacgaacttgagtgaattgcaaaagaagttactttaggcgtttcaaacaatgaagactgatggcttacagttaatttgtaagagctggttacatgttttatctcttgcatattaactaacttgtttatttgtcttgttttggtctctgtgctgtgaatttgtggacttaattaccctttgtattactaagcagggatatgacaatgacaatggctctccttattctgaagcaagtatgctagtaaaagaggctaaagggagcattgctagaaattctagatcgtcgaaggatcaggctgctgacaagttgggtcctatgttacggggaaaagtagatgaaactcatcgaagtaaggctagtttgcatagagatttgactagtgatcctcgagatgatcctagagatgaattagttgccacacgtaagtcgggcaatggtgttaatggagcattgaagtcccggtctcataaagaggaaagtagacgaggtagagaatctgggtcccctttgaaaaggagtgatgagaaaaaagtattctatgatggtgtgaatatggatgttgaccgaaatagcaagaccatgaagaattcaccttcacatgatagctgccgtgatgaaatatatcgtagaggaagatcaaggtcatatgatcgtggaagagagaggtctcgttctcgtagtgtaatggaagaggatgccctctccaaatggagacacactgataaaagagatactgcgtacacttataatggtgagaggactggtcgaggtcaagatgttaaagaacttgagagagatgatgacagggaacaaagtacaggttatagtagcagatatgttggagtggatgacaggcgtcacagccgagagaggaagactagagaggggagtagggagagggaggttgaaagagatcgaaaaagggagaaagaaagggcaaggagcagagacagagagatagatagggatcgaagaagagagaaagaacgagaaagaaatagagatggggacttggaaagggataggagaagggataggggaagagatagaagtagagacagagacatggagagggaaaagcgaagagaaagagataggagcggaattgttgatagaggtagagatagtgagagggaaagagacaggtacactgataggattatggagcggaatcaggagaagcgcgatgatgggaatagagataagggcagggacaaatatgaaagttttgaagaaaattatggtgaacgggatagatacagacattccaggagctctagacatgatgaaaaggattatataaaagacaaagttgagaaagttgattcagaaatggccaacagtttaaaaaatggaggtaacaactcatttaagaggtatgtgttagtgttataaagtatgtttgggcatgcaaaataacactttttttttattatttttaaaatgccttggatgtttatcttatggctgtagagatgaagatggacaagatgactatgaagatgagaccacactgcaacttgctgaagaagaggaagatctcaacagaattaaggaggagagtcggagacgaaggcaagcaatcttagaaaagtacaagattcagccattacagcagcaaactgagttgaaggctgaaacagatgtggagaaaggtacttacctttaccggtttatgctttaaggtcataaagacatataggatctctgagtgtgacttatgcatgatttttctactaattaagccagtacaatttgcaacatgattatcctgtggataagtcatctcttcctcctagaacctttagatattgcattcttttcatcgtcttattaacatttttcatttttgggcctaagtatgatttttgagtacgaccagttacagtagggcttttgttttggtattttgtatggaagtccttctgtttacgattattacttttttaaagaaaaagaaaattgttttgtttttaaaacagtagcactgacatatatgagctagagctgcctacagttgcatccatttaacttctccttataacatatctgctcactgctgactttttattttcttaatacttattggcatttaattgtggatgactgttatctcattgcacgtttcaatcccactatctgtacgttcaccagataaagaggctgcagatcatccaggtccatcaacagccctttccaacattcgtcaagaaagtgtggatggtagagctaatggcactgatatctttggtgctgaactgtcatttactctggggaaatcacctcccaatggagttgttacgtctggtggcaactttgttgatggggaacttggagagggttctccaaaggttgtcttttctccccttatcaatacctgtaacagtagtgataagcatagcttgctgttaatttgtgctttcagaaatcaattgtttttttaatatgcatattccaattatttgactctgtgcagagtgagagatcagatggaatgttttgtgacgatattttcggcgagacgccaactggagttcgaaaaactgtaagcatgttatataattttttatttttcgtggatgttttaaatgtagtgtttttaactatggctggctttaaatagtttgtttttttaaataattaatttccaattatgtatggcttattcaggttctgtatgagagaactaagcagataattagtaagttttgactatcttacatagtttgttcaccatcttttttagggcaaaggtggtgtgcgggttgaaaggagtggtcttcatgataattgggatgatgctgagggatactacagtaagtatttaatctatccattccaattaaatcttgctcttttttaaaaatagcgttttttccctctatatatttcgttagacttgtttgttcattgtgaagcctttatacggctgccttagttatcatttcattgtttggaatgtcacgttgtgtcttgtttaagtgttgaattatatcaacacattaagaatgtatacgttggattttttttttttaatttaagcgtttatatatta

SEQ ID NO: 162514 - DNA, 3858 bp, Cannabis sativa
cgggactactgactgtcacacagtattagttcactttcctgttctcttccttaaagccaatttcgaaatccactatacatcatggactttgaatttctcatctctcttttttcattaattttagccaattagatttctaagcgagttgagtgccaacccatactaatcaacatggtactcaaatctttgtggaatatcatgtagaatgttaaatgtcgcctattaaaggaaaagaagatttgagttcaatacttattattactttgcgatagaaaagaacaagtgttagagtactgaacagaagaagtcatttattttgttgccattaatgtaagaaatcttaaactattatgttatttgatcgttttgttaagttcatgttttaggatgttcgattatgtgttatgtccatattttcggccataaatatagacatgacatgtggatattggtctcgaaaaataaggaaggtcattaaatcaaagtaattatccaatctcgggataagtaatagctaacaagaaatattcatctcgcattatgttatacatcgctaacattacaacgataaaaatatgatgcataaagagatggtgtagagaggagtcgtcataccctttaacattcttccacattctaaagtatctgaatggattcttccccatcctcaactccgggtacactgatatattgctggcgtatgatcaaattggccttctgttaagaaaaccactttcgcattttcaaatcttccaatccattcttaattatcaatctttgagtgtatcctcatttcgggttcttgcttgtatgaccatgtatagaaagaacttgtatatttgacatctttaagtctacaagcttctacacaatctctaaaggtcgttgacttacttggccttactgttttccccacttgctccttaggagttaggatgtcattaaagtctcccatgatcatccatggattcgacataccaactgccatctcagtccttcataattcctttctcccctcctcatcattaaatgcataaacaaatgtgacaaaaaaattttttgctgtcttgccggccacgccttcaaatgtatcatttgactagtacatagtaaaatattcaccaaaaacatagctgggttccagcttattattattcttcctcccttgtgccaatgattatttgttaagaaacaccaacccgaaaaaatgttactataaattttacccatgtttttactcttcattctagtttcaaaaatcccaaccaaacccatttgcattcttaagatcaatttcttaacctcaaatttcttattctgtttgttgagccccttcacattctaacttagaattctatccatgaagtataggaggaacgatccccctccagtgtcatctatatttccctgtcctttttaaacattctctttgcccctcaatatcctttccattatctatttcttcatcttggtcaatctctagaggtgtcaaaaattgaaaagaattagctatctctgcaatcgattctacaaatttagctaccttcccccttttaaccactttttgaaatccctcgtggtccaccacttcctttagtgcatcttcccttttatcccctaccgttttctctacttcattccctaatctctttagaaacccacatcttcttagtcttatccttcttcctgcaaaccgaagtataatgccccatccctaaacaattgccacatacaattggcaaccattcgtacttcactacaacatctacagtgatatctcattggtgaaagagatcaagtcaagaaactcttagagtagttgaacctccaacaatattcttggaaagtttagtcttgctttgttcttagtaacctcatccaccataatcgggttaccaagttgttcaacaatcttgaacaatgacttctctccccaataccttaaatctagcccatggagttggatccaagtgaggaccttattaacatcatccttcttgtactcttgataaggttcccaagacctcatgataattggcttcttatcaaagaaaagaaagccaccattgagaatctcgtccctagtgtttaatgcctgaaaacgaataataaacacctctggtttgaggactcccactttatcaatacctttatctttccatattcttctagaaaaaccttcaaagggactaagtggaggattgacccccaacacatatcacaccatggctgatttccaatagaggatttcatcgtcaacgtcttccaaatcaatcttgactatcggtttcttagcaggcatagcagactcctcaaaatttctaataacatttgaatgtaaaatttggggggattgagtcttacgtgataacaatttgctttcacatctttttgaggttgccagaaaactagcgaactcagacctgatgtcttgctgcactagttgagctatcgattcccttggcgacaatacctctgcaacatcatctattgtttgcaatcgcgtctcttcctcctccaaatccccttgcccatattccttaaaatcgtagtccgaaattgagagagcttgaaaactaattacaactgccatcgacttagttttgagaactaagtcagagtctgatggccctattttcttattcatcgcagccttccttttcccagaaacacctctgttctcagttgtcttgctagtttcatgagaagccccctttcttgggcgacctcgtcctgccatagctctagttcgagaactgagatgatgccctagcagagctcctccattactccataaaacttttgttttgctttctaatgttctttgggaagaattagaatcctcagtagttggccatgccaattggtcagtctacgctaactgcttggatgcttggtcgacgtcaatgttggactgtcctagctgattcaataattctaacatagtatattgcacttctctatctccttgatcatatgaccagcttcattctccatatcaaacaacatgcgctaaccagctatccactttcttgccacatactgctctctacgttgccacgtcacttggggcgatttttgggataacaatcatcttccattactactagaaaaataggatttctttttggtttttaagttggtttatcttcggttaaaaaatttcttgctaccgaagaccattgaggcaaatatataggtccccaaaacaccgaagacgtatgggggacctatgtcttcagttaataacaaaagatataggtggcatatgtcttctatttcataataaccgaagacgtatgtaatttttttttttaaaaatgatatttataccctaaacataagccactattaacactgccaccgctgagccccaaacctacgaaaccctaaaataaaaatccttaaacaaaattatttttcaatcaccaccgtttaacactaccatattttcgagcatcgccattaatttcgcaacaaaattattaattgtacataaataaatttataaactatgtgtatatattttattaagatataattattcttatatggaagtatattttcttaatacgagacttagaaaatgtataactaattacaatttagaggttattctgatttataactagcgtgaattgagacttaattttttcataacaaattagaagttatttttgaatagagtattcttagataaatgtactgtaaatatatttattttgaaaaatacaaaaagttaagtagggtgtgtgtgtcctatgggcttgtatgagtgtagtgggatttatttatttttttgttaaataaaaaaattacatggattgaaatattagaatatttctaattaaggaaata

SEQ ID NO: 162515 - DNA, 2848 bp, Cannabis sativa
  modified_base (586)..(595): a, c, t, g, unknown or other
ttttggaaaattttataatgcacaaatgcaccccatctctgaaaaaattttagtttaattttctttttatataatcgtgtacgttgtagttatttaagatatcttgcaaaattttgagagcttcggataaatttagcatgttgaaaatagggttcaaaaagtctattacatgtctgactcttttattttacacgtgtgtgaaataggttgtttgatcattattttttatattataaattatttcgaattttttaaaattttgcatgatgtcttaaataactataacgtacatgattattaaaaaaaatagactaaaaaatttttctgaataccgaaatatgtagattgtacatcattgcatcccttttaaggatcgtaaaatcaccttatcttttatttataaaagaataaataaattatttataaaagaataaataaataaataaataaaatttagagtgcttctacaatgcaccccactaaaataggtgcactggtgcaacccctacctgcttcgatatctaaaagaatttcttagttcaattttttatagttgtgtatctacgttatagttatttaagacatnnnnnnnnnntttgaaaaattcaaaataatttataatataaaattcaatgttcaaaccgtctatttcacactcgtataaaataaaaaagtcatgtgtacagcagactttttaaactctatttttggtgtgttaaatttttctgaatatctcaaaaatttacatgtcttaaataattacaacgtatacgatcataaaaaaaaaaaaatcaaactatttttctttctaaatactgaaatagataagagtgtatcgatacacccttttcgaatggcgcattatataatttttctaaaatttataagacatgtacatatgtggtcaagccacgtgagaccatgtcaattttttttttacaaaagttattgattttacctttcatattgttaaataataaattggacaatgcattttttaaagatgtacattatagtacctattttttatcaaaataaaaattaataataactcgaactaaagttgttatgaaaaaattgagtacattttatgtatttgatcatgctagaaattatgttcaagttggttatataaagagaaaaactatcgaaaattgagctcggtgtattattttgtactagtttaaaaaatacaaggtccaatttgtcatttttcaaagtaaagaatgaatcagtaacatttacaaaacacatggtctaaaatagtattaactgattttattttatttttatcttgtattttgtaaaagttactgattgactatctattttgttaaatgataaattatactatgtattatctaaaatggtacaaaattatacttgaactgattttttgtcaaaataaaacttaacaataacctcatctagaggtattatgacgtgactggttacattttttgtatctttttgtactaagaattatctttcaattagttatattaagaaaattgagctcaaaatattattttatatcattttaaaaaatataaaatctattttatttaataaaatagagaattcgaccggtaacttttacaaaatacatagtttaaaatagtattaattgtttcatttttcttaactaattagattttgttaaaaaaatatacattttcgtaacacccaatataatgttaagtattcgattgaaagttctatcacgtgttgtatagtgtagtggtacaaatatctttactaacattctttttcaagcgtttgaatccaactatagtctattttcagaaaaataatacttggtcttttggaaggtgtgttactctttactctttaggtgcattattgataatttaatcaagggataatgagttatgatggttttaaaaattgtctaaaaggggagaagtgaggaagggaagaacaccatataatccccttatttatcaaaagaaaaaagtagtcaagtagtactatatttctcttcaaagagaaaaaaaaaaatcttaattgtgggttaataactagccaaagttattatttggattttgaaatttaaaaactatgaaattgtattaatattattaagtaggagtgttcataattctaactaatatttttaggtcaagtaaatctaatcttacataatccaattataattggataattgactttttataattaaattagatttgaaaagttgggtgttaaaaacacaaactcacatcttagtaatcaccacctcatctttcttttcctctctcatttttatgatattcactttactaatactcaccttagtaccacaaacataaagctccaatgatacaagatcttctcatttgatattattatgccaaataatttaattatcaatttattaaattttgatgatgatttccaacatcaaacatgtaaatatattatattggtcagtcaagtgtgtaaaaagtttagatttaattagatgatcgttaaatttaattattaaattactatctcattcaaatttttaattgtgtgtcaatgaaattatgaaaaagtacgagattgaaatttaaaatccatataatttgttaagagtttaagatctaaacactatactatagtagattttaatatgaaatcacatgttggtaattagtcttaaaagattgccaaaggaaatatgtatgggagatggtattgattaaggagactctaacgaagtgttaagtcaatacaatttatagagaataattagagaaaatgagtgtgtgttatattattttataatataataagtgtagattaaaatgtagtaatatatattattatgtgaataatatgt

SEQ ID NO: 162516 - DNA, 1786 bp, Cannabis sativa
  modified_base (904)..(935): a, c, t, g, unknown or other
  modified_base (1029)..(1033): a, c, t, g, unknown or other
aagatactagtaccattttttaaataaaatttatgattactgaccacttaaaatggtccacagatcagacggttgctatcaaaacaaatgatttgaatttgatgaaacaagactacttctctgtttcatagttaaccatccaaagagaggagttgagatgttaagttcccaatcggtcccaaaacggaaaaaaaggcacgaattcaatctaggaccacaaatcatgatcaacggcttagatttctcatcagattttaatgtcaaagcttttttctatgatacccaaaaccaacttgcatgtgcgccacgtgacataaaatcagaaatatagactatttttagaaaagaaataaattgtatttaaaaggaagaagaattgtcttcttaatttgtgtacaaaaatctttcaaagagtgcctacgtttcaataataataataaaagtataattattgggtacgtcaaatatttaaaaatatttaaataatataatgattttatttaatgataaaagtacaattaattaatgattttatttaaaaatattttcttaaataatataaaattcgttgtttaattacaccaatatcgataagatactaaaaaatattttagacattaataatatattttagtaattctttaataataataataaaaagaattcttcaaaaaaaaaaaataataaaaagaagagttctatttgcagcctctaaaattataaatacaccttattattaaaaaaaatataaacttaaataatttttaaaagttattcttaatagttttttcttaaattttttcctcacactattttatgttaatttcaatatttattttcataattttttctaactcgtgtatatatattttatttttttataagaaaatttcatataattttnnnnnnnnnnnnnnnnnnnnnnnnnnnnnnnntataatttatttttatttgatatgtatatttttaaaatatatgaattggaagaaaaaaaattaaaaaaatataatacaattaaagatataaatnnnnnataaaataaaaataattaaaatatagtatttttttaaaattttgaggtataaataaaattttcctaataaaaaatatatgacatatctgtgtacaaaaatcaaaagtgaaaatgagggtaattttagagggttagagtctccatcatagattagaaattaaaggacctttctttaattaaccatagttttgatagttttttctttgccttttttatcctaactactcactagtgactagtcactagtaactagactctactactttgaattttcactaggtactagctatagcaacttacacaaatttgtgtcttgtttcaacattcatagatttgttattgatataaattatgatcatcattgtgactgttgaaagtttagatttgattgtaaggccaagtcaagtgaaagccattttacagccaacctcagagtcatactaaagaggaaggatgacatttcttttcaacaatatttgttcaagtttactttaaccaatgtaaactatttatttagagcttttttaaaaaaaacttcacaataattttaaataattacataatgtatggtcttaaaaaaatgaatttataaactttccaaaatacaaaaattgataaaaaaaaaatataggaaaattatacaatgcaccctcttaaaatagataaattgatgcacacttatttattttaatatccgaaataattttttagtcaatttttttcatggtcacgtacattatagttatttaagac

SEQ ID NO: 162517 - DNA, 1704 bp, Cannabis sativa
tacacatatcaatgactatcaattaaagatcttttaataaaaattggataataacaactctatattattcaattttgaataaaaagaaataatcaaacgactaaccataacgataacaattgcaataaacaattgtactatgaattattgggctaataaaaatttgagaatcctccaaatcttaacatggacaaggatcacgctactaaaatcacatcccatgaataaataaagcggtgtagcaacactattattaaaataaaaataaaaataacatactaaaataattaacacaaagatctaataatttagagcagaaggatagtaataattctaacaaaatcataaataatgtgagaattaacaagacccgactagaaccacactataaagacgataaacaacctgcaagctttgccaggccaaaaaattaaacggaggataaaaacttttaaaagaaaaccctaagaataaatatgaaagtgtaatagtattataattggtaaagtgttgatgatcaccatataataaatatgaaaatgtaatagtatattataattggtgaagtgttgatgatcaccatataataaatattaaagtaaaggggttaagtttataagcttagcaacatgatatatccaaaagagctatatgccccaatcatgccgacccctccgatgaggaacattctataatttaatacactgaattttttttaattaatttattattattagacatcttaaaaagtatctaacactactagaaatacatttaaggagtgtttaatgatttttcgtattgcttgttaaactaaaatacatgtaatctagtattaaattgtgatgccttttaacatttgattaaccaaacttaagcttaccgtatctatattattatatattgggtttttggccactagaccctttaattttgacttgtgtttaatcttctaagcttaaattttagcaataaaatctgccaaactattaaactgttagtaaatttaaggtgtcatccagttaactgttaccctgaattgtttatgtgtgcacttgtacacatgatatatttatatttgtacacttaatattattattttaaaattaaataaaattataaaaataaaaagatatttaaaaaataaaaaatattataattttttatatataatttttaaataataatattatgtgtatcaatataaacgtgttatacataagcaatctaagttagtagttaactgagaaatatatggatgacaccttaaatttgttaatggttctgtagtttagaagattttaccactaaatttgagtttaaaaaattaggtacaagtgaagtaatagttgagagaatttaaccgaaaaaatctataatgtagttaaaaaatcatatagcacggtatatattttctcaactttctcagcaaacaaagcaaccaagtcttcattgtaaattcatatattttaattgtactcattcttctattttatgcttggaaaaacgcggatgtggtacttcatgcatgattatttattaaatccgtgttctaactggtaaatagtgcgatgaaatcaatgattatttaaaatctagaaaatgtaattatgaattgagtaatttgccacgataatcgtatgtgaatttttctataattcatactcatttttctgggattttgttgagtgttcatactcattt

SEQ ID NO: 162518 - DNA, 1103 bp, Cannabis sativa
gaattttccgagcagatctagtattttacttaggtaagctatcattttccccaagccatgtattcacccagaatatgattcacaaccaactagaagtcgctgggaatttccaagtattgaacatttacttctcgtgccaatttaaacacaacaatcagtgcttcatatttagcttcactatttgatgtgtgaaatcaaactttattctctatgaagggatgccccctaggtgtgattaaggctatccctgctctagaaaattgatctatggatgatccatccacatgaatctttcaaatggacttcttctcactgttgtccttgcatgagagctcttttccaagcttagggttctcttctagaatttctttttcttttcttgtgcattttcctacaaaatctgctaaggcctaaccttttattattgtccatggctagtaagtgatctcatattgccccaattaattcatccacttaagtaactggccaaaagtatttggctttttattagacctaacacaatggttgatcggtatagactcagattgggtgagcttgaaagtaaggctttagctttcttgatgttaggaccagacagtatgttaattttctgatcataggtttcaactttctgcatcaattaaccttttgctgacatagtagaccgggtgctggtattatcttcttctctaattagtacgacacttactgcaaattctcttactgctaggtaaatctctaactcttctgcatccagaggttttgataagataaaggttgtgcaagttgcttttttaattcttggaaagctatctcacactcctctgtccactcaaacttcttgcttccttggtgaatattgaagaaagaaacacacttatcagtagattgtgacatgaaccttcttagtgcagctatctaaccagtaagactttgtacttcttttacttttgttggcaatttcatatccataagagcttgaattttctcttgattggcttctgtcccttgagcattgataataaaactaagaaacttacctaagctgaccctgaaggaacagttgaaagggattgagtttcatactaaatttcctaaggatt

SEQ ID NO: 162519 - DNA, 2985 bp, Cannabis sativa
tgagaggaatactcctcaatgttgtgttttccaatgcgatggattcggatttgagccacgaagcgcttgctctccttgtaatgtttccgctcgctgaatcggattgcgctttggttgcggcggaaccggctagagtggcttatcttgcacggatgttgtttcactcttcgattgaggtcagagtcaattcggctgcgcttgttgagatcgtagttgctggaactcggacgccggagctccgatctcagatcagcaatgtggacgatatcttcgaaggcgtgattgagattctaagaaatccgatttcgtatccgagagctcttaaagtcggaatcaaggccttgttcgccttgtgcctggtaaaacaaacaaggcataaagctgtatccgccggagcggccgagactctgattgacagactagccgatttcgaaaaatgcgacgctgagagagctctggctacgattgaactcctctgtcgtataccatcaggttgctctgcgttttcatcgcatgctttaacggttccgcttctggtaaagatcatattgaaaatctcggatcgggcaacggagtacgcagctggagctttactatcgctttgttcgtcgtcggaggaaaaccagagagaagcggtggcggcgggtatattgacacaattactactactagttcaaagcgattgtactgaccgagctaagcgaaaggcccagctattgctgaagcttcttcgggattcgtggcctgaagattccatcagaaattctgacgattttgcttgcagtgaagttgttgttcccttctgatttttctttttctttttcttttttaattttattttatttttatttttgggtttaatctgattcttctatgagaaacagaagaaaacaaaactgaaaaaaaaaattgaagagatttgttaggttggtatatagagatttgtaattctgtacgtaattttgtatgtaagaatatttattgaaaattaaaaaaaaaaaatcagtaatccattgttcatttcattattattatcattattatttggtatttttgggattgaataaacagtttgttggaattttattgggtaatggttgaaagtgtaaataatattagtgagggacaaaatatctgacaatggaaagaagtgtttcaatcctttgagtagctgtttttaaatccacctttcatttttgaaaaataattctggcttatattttggggggttgtctttctttgagcctatttcacactcattatcttttatttctgacaattagagatgaactttggagaccttgctccttcactggccctattgtttgttttgttgtgtggtttagactctactctgctgagattattaccatcaactggtctcactctcaagtctcaacccaattttaacaaattttatttatttattttcatggctaccttagaattatcatattgtacaaaatataggaattaatcgatttggaacactaagaccttatttaacttttcatataataaatgcacaaaaatcctcaaatgtataattacaaacaaacacctcaaaacctacattttacaagtactactagggtgatttattattcaaatatcccaataatcaataaactaggtagagtttttattttagcttaagatggataaatgagacacgtggatggtaaaaaaaaaataaaaaagaaaaggggtttaaatttgttttgactaaaaaaactaccaaagtagaatgtaccccacatgtaggctaaaggtcctatacaaaagaaagacatgtttacaacgtggggtcgtattcagatttttctccccactctaaaaaatttgggaattgaatgaggctaaacaaaagcttgaattgggttaaaaaattagattaggaaaacgatagaagatggtcacatgtttgtggaatattatttaaccattgaatcacatggccttgatggctactagatagcgtctcacatgcctaacccattactttgttgttccgaaacaatactttttattactcaaacaaaaatacccaattggaactttaacttgtcctttggaacaacccttgacttggaaggacaatatgggtcccaataaatttgttctctttgtgaattattaacccatttaccatactttcaattaccatttaatgtttctaaagttcaaccattttactaccctatagaataatgctaaggcgtgtgtgtgtgttgtgttgtgttaactttattagttggtaaagtatttgtgacaattatggtggttggcttcatcatggttggcttcatcatgttggagaaattaaaaaaaaaaaatacaagactagttagcaattaaaaaaataaataaattaacaagattcaaatcttcttagtctcataaattagtataacaattacaggagtattggatgatagtgttgtgttgtattactatacttgctcttcggtagtttttatgtgaattgctataaagatttagattactctattaattgttatatgaatagggagttaaaatgagctataagtttaaaaaaaaaaatgggttcttactataaaaataaatggtatttttataaattattaaaaattatgtatattttttaaaaagtatcttttttatttggacccctaaaataagtgggccctaagcgcgagcttagcctaccttagcctagggtcgactctatatgtaagtttttacatagatttccataaaaatacaaaaaaaaaaaaaaaaactaattagaaatgtaaaaataaaaaaattatttctgtatttttacggaaatctacatagattctcatataacaaccaaccgaacaacctaaattataatcaaaatccacttaataattcacataaaaatcaccagaacaacccaaaccgtaaatttaaaagaaaaaaaattaaaacataatatataaaataattccctttttcttataaatacgtcaaaaa

SEQ ID NO: 162520 - DNA, 2097 bp, Cannabis sativa
tttttttttgttgttgtttcaccttatttcaggataagaagatgcttaactctactcaacggttgattgcgtttgcgcttcttcatcagtcttattcttctcagacttcttctgcgaatccattcattactcttttcatcactgtatgtttctgattttttttttctgtttgatcttatgaaattggtgatgaaatggtttgttgcatattttttacagtctcgtattcatttcttgttattattaggctgcttgcaatgatgatgctgaaaagtatgagagggcatttcttcttctgcttttaagctcagatacttccagtaatggcaaagaggttttcattcttcatttttatctcttttaaatttggataccaacatttcattgattaattctttcagccaaaattgaacaatatgtaatgaatgattaggaggctgtttagaggtaattaggcagctaggtgttaggttgaagaaagaaattggttagggatggattgtgaattttatatgaatcacaatgtacttgttctttatgtcactctataatttgttgcatttcttttgttatttacagactttaatatagatttcggatttacattgcagtttcttaaacaatctgctacagactacatcaacggttttgatccctcgtcaatgaatgtatgtagattgtttctttttacaatgcacaatatgtaataatgtggttatgtcactggacagtcctgttgatttttcggttaatattcgtttgtatcaggcattccctcagcaagcgcagttggagcaacaatactgtgacaaagctaatccggagccttataactgcctatttaaagatggctcagttagaaatatcatttcagaccctgatgttcccgatggttgcgatcctaattcatcagagtatttctgctttccttttgcccatttgttttactttaagctatttttctcagtaaatttcatgcatatattgagattgatgatcatgttctaggtttgatttgcaatggagagacaaacctaagattggatctggtgatagagatgagacagttctggggtttctgtcaagtttatcaatggaagggttaggtcctcattggagccggcctgttccaccaagactcccactccaagatggtgaagtaagatactttaaagttaaaagtaacttattttagtgctcacttgagtttttcttttattgatatatgaatactgtatttcagttggtatggctgaaccctggtgataatcatgaactattatgggactatggtatgtgtgttgatactagcagaggaacagcagtaagagatttgatcaccaaagctttgaaagggccacttgttcctaaccaacaagaggtgctgatgtacatgttatgatatatttctgagtacatgagtgtgtgttttcatccttttatatctttttgaagttgaaccatgcatatcactcaagagtatacctgctaggattccagtttcaaaaaaaaaatcagtacatatacaaactacaagtcatgttcatgttaatggcgtatttcggagtgtttattcttagctaacccaatgtattcccttttctttttccagcaagttttattggaattggcaaatgaccctaaacttgtttatcactgtggactcacaccaagaaagctaccagtatgtgattctgtaacataattgttgatttgcatcattggcatttatttatcccaagccaaactcgtatctctttcaggaactggtggaaaataatcctcttattgctgttgaagttcttacgaagttgataaattcccctgaaatagcggagtacgtatttgatactttagtttatttatttactttaggtgcaattgttatagatttgcttattctgacatgtctttcataaacatagttactttacagtgcttgtcaatatggacatgagtcttcactcaatggaggttgtgaacaggctaacaactgcagtagaacttccttctgagtttattcggatgtacataactaactgtatatcatcctgtgagaacatcaaggtaattcacccatgcccttgtgtttgtttt

SEQ ID NO: 162521 - DNA, 3498 bp, Cannabis sativa
tacgcaaagtaatgccttttttggtttccctgaccctgaattacattgttttgtaacttaatcagtcaggccctctcttcagaattgatgattaattagctaatgccattacctaatatatcgattatcacaagctgaggtgggacagttaatttagttatgcccattctagaattggcgattaactatagaaacttattggataccgaataatgaagtttaaaattattgtggagctagcaagtgtttcctaatgctggaatctttcgaatctcatttaccaaagaactgctgcattacaaaatgaaagcttatgttttattttttgtgtgctttctatttggattgtcaagttgcgattttgaagtctaatatgctgatgacataactaagtttgtgattatctcataacactgatctgcagttctattcagcttcatttttaggagacatgcatgaagtagtagcacatgttggtgctcggtatccgaaagctaatttatacgctgttggttggtctcttggtgcaaacatactcgttcgctatttaggccaggtaagacaatcctttaataatcctcataatcatgtccataatggggttggggactagaagaattgaacattaatctgccaagcacaactagttgacagttatcaaatagagctcctatgtaatctagatttatgtgaccttaacccatggttttgaggcttagtccactctgtaagagaatttattgtttgattttgaatggattaaaactacaacatactagtgtcttttgcttacctttacactgctacttgcaggaatctgataagtgccccctttctggtgctgtgtcattgtgcaatcccttcaatttggtcattgcagacgaggattttcgcaagggattcaataatgtttatgacaaagctctttcgagtgctctttgcaaaattttcaaaaagtaactccttgatatactgacatagttttcctatataaaaagaaaagctcaaattaataagtccattggttgatgctacattgcaggcatgctctacttttcgaagacattggtggtgattttaatattccattggctgccaatgctaagactgtcagggagtttgatgaaggactaactcgtggtaaatatttattgataaaactgctttttctacctagatagatacaatgatcaaatattatcactgatgagagcattccctatgatattcaatataaactttcagtttcatttggcttcaagtcagtagatgattactactttaactccagtagttctgattccattaaagatgtctgcagacctttgctttgcatccaggtaataccgcagtcatatcccatacattcattattgtcgttctacatctcaccataccattaccataaatgtgtcataagattttgataatcatctggtttaggtattaagctggttttttcttgacattgatcagtgaatacttgacaattgattcttcatgtaactttttttctatttaaagtgctaaatagaagtgaccaagaagatggctcacttataggatatggttgataatattctcatgttatgttaggattccacatcaactaagtatggaattggtggtatataattacttgggcaccctcctctcttaggctagctttttgaagtgagttctactcaagtggttgtaaaaaatggtatcagagccatgtacccttaagtggaaccgacgttgttgaaggggcaacctttggaaaaagtacaaagtgggccacggcagagtaggccgccatggatgtgggctctaaaggagagtgtacttttaggattcgacattgaccaagtatggaattggttggtggtatataactactcgggcactcttttcttaggctagcttttgatagtcaaaattctaccaagtgattgtaaacatgttaaaaatgatgataatattgaagagaacatgcaagaaatgttaactataatctacaagcatcttgaatggacttagatagtagggaaattttaaaggtttatatagggaagtgtacaattgaaggacctctagttgatgctaccacatttttttttttaattctttgttgcatattcatatatggcaccatggatttgaaaaggtactggtgcaggagttgtgtgtgtgtgtgttcatcttttcatgaattaccttctctatgaagtcatcataattatttttcttaatgatttacaggcagcaaatgatccaatcgctccaaataggggaattcctcgaaaagatattaaggtctgagggaattcttgtgctctataaatactcatacaaccttccaaaagcttaatattataatttgaattttcccatacaatttcacaggaaaatccaaactgtttgttgatagtgacaccacaaggcggtcatctcggttgggttgctggcgatgaagctcccattggagctccttggacagatactgtagtcattgatttccttgagcatttagagagagaagcatcatcatcatcatcatctagtaacacaggcagcatagtgcaccatatggaagtgtaagtatcaccaattgcctcattcttgtatgaatattcttttgttgccattgcagcaaattacacattataaatttatgaaaatcaaatcaaccaatcaattgtgaaggtgtaacattttgtgttgatcttgattcagaacactgtaaaaagataaaaaatatgaattatgaatatgatattgtgattcagagattctttgcagtctttttttggtaccttatttggattgtctctatatgtgaaggaatctcttgacttgattcctttttctttgtgattttctttacacatttatccaaataatctcttgactttatcaacatcacaactcatcaattcaattgcaattttgctattaatgtagacacaatttagatatataacactcaccaactaaaattggattatatatacataatattgtgtgtagaaatttccttttgaagatgacccctcaaagtaaagactattcaaaaaacaataacttcttttcttttcttttttcccctttgtgaggtgatatatattatccttttaaacataaatatttgttaataaaattagagggattaaatttttaagatttcaaatgagaagatctaagatttaatcactttttctattactctaacattctaacattctctaacatattatattataaatttataataattgttataaaatattggtgataagttaggtccttataagaatggtcgaaattgatgatgggattgggttattaggccaagaaaaaaggaaattaagaaagagagatgtgtgtgtgtgtgtgtgtggggataaggttactaagattctgacatgaaccccactttcgtacattcatgtcccctctacacctcactgatatcttaaataatttcattcattatcaaaccaaaaaaaaaaaaaa

SEQ ID NO: 162522 - DNA, 2660 bp, Cannabis sativa
cattccaggatgtagagataaaataccaagggaatgatagaaaagtccctcatttaggaatacagcttcaacaaattcatacttggtaatccatgcttgattggccattatcttgtcaatcttggaatagattctatctgcacctggttgcttgcttgtccaagtgaaaaatttcttacttgctttgacatcttctagtttgcagaagttcacacatctaaagaaatcacagtcaggataggatctaaccctaagcccccaccctctcctctttggccaaaatgtcattaaagtcccccatcagacaccaattttcatcagagtacaattcacatatgtccttccataaaagccttctttctcctcgattattagaagcatataccacagtaagaaaactattgaaactctcaactgttgaaatcttcaaatgtattaattggctagtacatttgatgatatcaacagtgaatctacaagggttccatcctatagcaatcttccctcctgcataccaagctatattggaagagaaacaccatccatcaaaaacattagagtacaaggctccaagttttggagcctttaccctagtctcgagaagaccaacaaaattaaccttttgtgtattaataaattgctttattaattgttgtttggattgactattggctcctcaaacattccaacatagcaatttatccattggaaagagagggaactcccccctcctatgttgctctcatattctgcagttgtcccatctgtaccgattccattttctacaatatctccatttatagtgccatttaattcctccaaactcagggcctggaaagtgttattagtcactgctacagcagctccagcatttgacttctctttcatgtctaccttcttcccttttgagaccttagtgaagccctcctcatcagtttctatgaccttcctgttatcttttttgataacccaatgttgtttggcatttgtaacatttttgcaatcagttgtggaatgtccaataccaaagcagtgggaacatgtgactggtttccactcatattttattccaattgatgtattcgacccaaattcattttcgaagtctagcatatcaggtagttgttgatccattataacctcaacaagcactgtagggtagtttagcctctccctctccttggtgaaagaatccaccattagaggtttccctagctgcccaactatcttaaaaagtgatctttggccccaatatttcagctccaattcctcaagttgaacccaaattggtacacatttgacatcctctttcttaaagttgacattaggatcccacgacttcataatgacaggtctacgattgaagaaaatgtatcccctattgatgacctgatctctatattccatcgagttaaatcgaataagaaatatgccataggacaacaccttcactcaatcaaccttatctttccaaatcctatttgcaaaaccctcaagtatgtgcagtggaggattcactccaagaacatagcacacaatcgaaggcttccaaaacaaaacctcctcctcaatatcatctaaagttatcttcattttcctactaccttgctctgaattcctaaatgaattcataaattaaattaaacttgataagtatatacaatacatatttcgggattccgtttaaaaagttacacttgttttttaaaatacatgtttaacaaaagttgtcacccaacaactatcaaaataaaggccaaactatcccgatgatctaaacattctaagtctaaccgccttgatatgtacaatcttcatctagctcgaactcactactgttcaacctttgctttatctttacctacacatgtaaataatatctgtgagtcgataaaatcggtaagaaaagcataaatataaacataaacatataactggattgtaaccaggcacccgtacacccagttacaaccttatcccacgtttgatgcgtactaagtgtagaacgtttgtacgataaagcctagcatatatctgttgatatatcttgtgatcaaccctatcttaattacagtgtctcatgagttgagaatacactgtaatatataaatttattcatcctataagatctaatagcccactgtattcttgagtgttgaggttggctcagaagattgcggtatgaattcttcaacaatagttcttagattggatgattgtaattatactaaaagatagcgagaatcccttgataggctacaagaggtattttcttcttttcattagtttagatttaacaatacttgcaagcagcttacatactttcttttcaacaatacttgtggtatacatggtaatttacttactttcttgcaagcatcttacattagtaaagagctatagcattttttaaatggctaactctaatggaggtcacttgacttccaaacatggagttcatgtatcttaggggttgtttctaactactccagaaaaggaaaaagccacgaaaaagaattccctaaacttcaatagtaagaggtattgtgtatgctcttgcatgcactagaccagatatttgctgttgtagtgggagggttttaaggaactcaccctgttatgacttggaagaaacctgtgataaaaatctattgttagtt

SEQ ID NO: 162523 - DNA, 2193 bp, Cannabis sativa
atttaaataatctatgtcacatgtgtatcaaataaaagacattgtattcgttgtgttaaactttttaaaaattttcaaaattttgtaaaatattttaaataattacaatgtacaaaactataaaaaatagactaaaaatttttcttggatgtcaaaataaattgaggtgcatcgctttcctaaaatttttattttattggatttttttattgaagaaaagcgtttatatattaaaagaagcataattagacctcgcgatcattacataaaaggtgttcacaaatagagggaatcggaatgccatcgaatatcttgtggataaacaccctcttacccacattatgagcggaaaaggtacatttcctattaataatacaacttacaaatgaacgagaggatctaatacaaaaagagacttagttcttaagctcctaacaggtcacctccctattaagagcattgataactaccctcgaatcactctcaacaataataaactaaaaatcttgaatcttcgcaacctccagcacattgcagtacgctacagcttcgccacataaagcattagtaaactccaacagagaagtgtgaacccagatcaccctgccaagatgatcccttgcagtaaccgccgaacacatattgtccaaccctactttcacatcacaattcaatttcatccagtccattaggggaggccatcacaaaaccaccaaatttggagatgaacaagggaacaatgaagcatggtgaactacaaaagaagaacgaataccgtcaatacacttaatcacatcaaccagacaattattatgtaccttatcctttatggtctgcctgatggtgtcaacagctaacgaatcataaaggaacacctcatcaacatttattcctttgtatttgaggtccccaaatgaatttgacccagtcccacatccggataccagtaccacaaataggaaaaataccccaaggtgaggacctccacaagtgaaaagccacattgcaagataggaataaatgttcaatagattcggtctccgtaccacaaagggggcaattaacctcctcaataggaaatcttttacaaatttcagttcgaacagggatagccttacacaggatacaccaccatagggttttcagcctttctgagattttactattccacagcttattcgaaagagaaggggcgacctcacagtgaggcgctcgatccaaagcttgggccatataagtcgatttggtcaagaagcgaccattactttccaaagtccaaatccacctgtccttgccttagccagacagatttcatatttttaagattgcaaaaatagtttccttatcaaaaagactgttcaatttatggatattccagtcaccattatcctacagaagctcagcaacaaattttggcccatttatggaggaaccattaggatgagggaagaattgtttcttatgagcaatccatgggtcctccaaagtaagagtatctttcccacccgccacctgcttccaagctccttttctcaagatagagttagatcttaccacatttttcgaaaccacgaatctgaatctttagaagaacaattaaggaaagaccatcctttaaggtatttagcttctaagatcctacaacacagagattggttgcctattaataggtttcaccctcactttgccagaaatgcctgattcgtctatttggtttttcaaaatccaagacccttaaggacttagggaggcacaatttatccgaagcttttaggtgaagaccatgattacccttttcagatccccaccaaaagttatgaatcattccatcaatctttgcaaccagtcgactcaagagttttgtcatttgcatagtatacgagggtagagataaagtcgcagacttaatgagagtggcacgacccgctttagacaatgtcttagctttccagccctgaagttttgacgtgaggttttctagaataaaattgaaattggcattttttttgtctagagtgaaatagaggtagtcctaaatatttaatattaccttcatgggatcctatacccaacgtagacttgattctatttttcatagtattggaagtatttcttgttggaaatattttaccaggatctagatatactaacaagtatgtttcattaacatcctaatattaattctaaaacaat

SEQ ID NO: 162524 - DNA, 1558 bp, Cannabis sativa
aaaatcagatgctaattaatttcatttaagtgggctgcttatcggataaaacaagataaaaggcacatctttaccaaaaagtacccattaaatgctactacgtagagggatcatagaaggcattttggtcatttacaaatgcatgagaatatgtcaatttttataatggacgaaaaactagagagcgcattgaagccgagaccttcgccgcggtccattctgctccatcaccatgtgaccctctgctctctctctcttatttaaaagaaatatatttattttttttttaaatatttcacggtttacaccatatgaatacacaaacactattaccgatctacttttctattgtgaaaccacaaaaaaataatatatgtattttatgaggggttgcagaagaaaataatattcaaaacaatttttacattattataactcggtccaaactgtgtcctatcctttttttccaattgttcgaacgcttgttctttattttcattttaaaattgggttcctaaaacgaaaccccaacaaactccaatcccttttacttattttttacttaatccctataccaagaaccgaaagcccttctacaactactgctacttctaccaatttcttattcttcttcttgttcttggtatgattatgatgtcatagtttcaatctttttaaatgagacagtaaagagatgttggagcaaataaaaagacaaaagaataacaacaggggtttctatgttaaaatgaaactctttcatcaccaccataaacatggaagaacacaagaaaagataaactcttgctgtttcttcagattctacaaatggcttctatggctttctttgaccctttacttctttagctcttatctcatcacaaacaacaaaaacacaccctctgataatagtaatatcaatattattaacaataaactctcgtctttgtccacaacccaagtcttatcttcttccaaatctaccatagtcgcctctcgagcgctcatagagcttaccgatagcgattcacataagcctcataactacaacaataacagtggtaggtttccgtatattttaacctgtatttatatataatatatatttattgtatctgaattagtatttaatacagtattaatctttcttgttggcttagcagaggtattgagagatctgaagatttacgtttacgatttgcctccgaattacaacgcggactggctctccaacgaacgctgtagcaaccacttattcgcctctgaggtcgccatccacagagctctattgaccagcgatgtacggacgtatgacccttatgaggcggacttcttcttcgtccctgtttacgtttcttgcaacttcagcaccgttaatggcttcccggccattggacatgcccgctctctcatttattccgccataaacgccatctcatccgaatactccttctggaatcgctctggaggttctgaccacgtcttcgtcgcttctcacgacttcggctcctgctttcacaccatggtacacataaaagtttctttttttttttttttt

SEQ ID NO: 162525 - DNA, 1927 bp, Cannabis sativa
  modified_base (96)..(97): a, c, t, g, unknown or other
  modified_base (1807)..(1826): a, c, t, g, unknown or other
  modified_base (1868)..(1868): a, c, t, g, unknown or other
acaaaacagggttgaggtaaagattaggcaatacaagtgtcaaggacaactggacgatgtacaatgtggatattactgcatgaagattattaaaannttcatgactcagcacaatcctgcaactttttttgaagaatgaggtaattaaacatatataatgtttaattgataattattttttattttaaatacatttaatattatctatctctggttgtacagctcaaagatgacaagccttataacaatcaggagataaacaaaatacgggatgaatggggcagttttgttaagtcttatttattgaaagaatgagtacacggttatttatattttgttatgatacatgtaggatataaaacttgtagctatatgatcgttacttttggtgatacttagttttattgatatacttcatagttatataattttcttagttaaataaaaaatcttatcattattatattataaatattattattagtcatataaatattgttatgcaagccaattttgatatctaaaaatgcaggtgggaaaaattgcaaagaaatttgcaattttcccctacctacaacaataaaacattttatagccgacacaaaaagttaaaaaaaattacgtgaaactatgtatcaagttataactgacgcaataatctaattagctttgattacaatttgaagctaagtttcttgcttcatttaagagctaacgctaatagagcaaactttttgcttcagttctcaaccgaaggaaaaaacagtttgcatcgctttagaaatgaagcaaataacttgactatttgcgtctgctgttattacatcagtttagacaaccgacacaaaatgtttttgtgtcattttacaactgaagcaaaaagtaatttttgtagtagtgaacaacacaaccagcctattacggtgtttcttaacatcaaatatggaaggaataggtttcttgttaatgaagtattcaacaaacgataccttaaagcaaccgcaatcactgaaaaaacaacataaaaacaacaacaaaataattacataaaggaaaacacctaataaataacaaaattacactaaaaaactttaaataatttactttagtgattgttcatcaaccttaaccacattaaaaggctgcaaagaaacaagtttgttatccttcttaaactcatcaaataaggaaaaaaaatacggtaacaacaccgaaaatggctgacaagctttcataacaatcgacaaagagttgtacatgtacaaacgctttttcctcaatatttaaatgagcaagaatccagtgtgattcagattctatatggataataaataacacatgattgcacaaatgccaaagaacgccacacaaaagctttttacctcttatataaacagcaatgacatgttgaacaatcatcaaagaatgatccttttttttttgccaaaattttttcatacaatgcattaatgattttgttaaataagcaatcagtggttgtgaacttaacttttgatttcttttttgcgaagatagtgaaaaataatatctaaatgctaaagaatagacaaagaaaattaaaaaaaaaaataacaaattataataataaaaacaactcaaaaaaaccaaaaaaaataaaatcattacaaccaatacaattcaattcaaaaaaagacaacaaaaaaaataacatcacatatataaataatgattgaaacatgataacaaaattaagggtaaataccattttggaccctgtgttttgtaaaagtgaccgattgtaccctctgttttgttaaatgataannnnnnnnnnnnnnnnnnnnaaatggtaaaaataggaccctgaactgattttttgttaaaanaaaatttaataataatctgatctaaaaatgttatgacaaaactgtttacattttctata

SEQ ID NO: 162526 - DNA, 4287 bp, Cannabis sativa
ggattctccccacttcttaaccgtttgaagactaattggatccgatcaaaggtccaggggctgccctcgatcactcgtccgatatcaacttcgtgataaaactgaaaaagatatagattaggctctaattctttgacatatagaccccgtcccggacgccataaggaggccatcttatgttgcatagcaaggaaatcaatttctcgatcagtgataaaacgtcccactagacaccacctatcatcaatctcagagagatcatcatcattcaccccatactgtagaccccccgtttcctcttcttccagagttatcgaagcatactggtcctccatgtttgaacgtgcatgattgaacgtcgccatagtcgcaaaatacgaaacccaacaaagcttaacaaaacacacaaaacttaacagagagaaaaacaaaccatgtcaatagacaagaccttaacgtactaattttttttttagttatttgtgtggtgaaaattttctgataattacacatcataggatgctagtgagaagctagagaaggataaatgtgtgacgagagaagatgctgaaagggttattgatgctgaaataaggaataagcctgatctgaacatcactcctactcctcctggaattggagcctccatggctgccgccgctacaatacttaacatatatattatatgataaattgaaaatatttttttataataaataaaatatataattatataaaaactaagttattatgcagatatattgaaataaaattatataatgtatatattattataaattttcttattttaattgtgtatgtttaacgagtttttcaaaaactaaaaataaagatgatttagagcttgaaaaaaaaaatagacaatctgagacaagtatttttttacgtacttagggtgttaaaaagttttaatcaacaagtcaatattattgagctctgagcttgaatgccaatggaatttgtcattttgtaaaattttggccctatgaaagcttagaattcgactcttcgcttggtgacgtaataattctatttataagtagccatgtactttaggtcagattggtccagacccaataaatgggttaatacatatttttgttaggttttattcttataataaacattttgattatcaaataagttgaataatttgatatatatttgaatgtttaattatttattaataatttttatataaatatcaaaaaagtctttatttatgtatgaggttgtggctttgtattacatggagaactaagatcacgagctatgaataaaatagttagcaatatattaaagttatggaattttttggatcgatgatgtagatacatcttagtgaatgtgctgcatgtaatagagattatatatgacatgactaatatatatttaagatgttcttatcaaactagccgtttactataaagacttaatttatattacaacaatgatcaattactatatcagcctaaatcttgagaaatcatgaaatcttgttcatgttattagttctttgattcactagttaaaatatctcaaagcagataattcttataacttctattttggtaatctaataatgtgaatggatgggaacttgatttacaatatgtaatccaaactttcctaatagatcaaatatcgatttcttttaaatataaatgcagaaactgaaagttgtgcacaaatttagatcaaatcaaaattatattttctctagtgaattaatggtactaaaaaataaaggggtaattaaaatgttaaaattataatttgaccaatttaaattatggatcaatacatggagggctaaccactaatattgattatatcgatgaacgttgtagttaaactcaataaatataattatataattactaagagtataattctatatttatagtggaataataatggaattgataaataagattatttgattgatgagattcaataaataaactaatttattagagcttggtattataggttcatttttctcgaattgccactatataacactgttaaaggtataaatggtacaaaataaagagaagaagaaaattctattttgaagtagaaaaataataaatatttatttttgtaataaataattaatttaaatttataatttaaataaatttggaaaataaaaaattatgatcatgacaagacatcattttgtgatagacacatactatagatagtgggccccattggcaccattaaagggtattagcgatggagggggccgccgctaataaccttgtattttgtgattaaaatttgttagcaatgcagtcctgccgttaatgtcctaccgctaataactattattacttatggattttctaactgcttctaataataattaatagtggcaccaccgctaatttttttggctagtctcaaaatacgaaactggcacacatcattagcggcgtgttctgccgctaattgttagatttgtaacaaattaaaagattattcgtaatattttaaaataataaaattatatagtttaatatataaaaattaattcattcaaaaataatattaaattaaatatatttcaacaaattataatattttaaattaactacaaaaaaaaattaatattcattatctttataatttcataaattaactactacataaaattactagaagtaaataaaatattcattattttcacaatgtcttaaattaactactacaccaaatcactagagttaatatataatgaattaatttatttaatattattaacttaattattacataaaattattgttaaggtctcggagaaactaatcttgatttgtattattaaggttaggtgatggccgtgatgcagaaggaacatatagttgatctgatgaaaacccaagtgttagttctcccaattgagcttagttgagtattggtatagtaacaaactattgttgctgtgaagaactctcaagcccaccaaataacctaaagtcaataaagtttaaagagagcggacgagattgcaaaggagttccattacgaattgattttggttttatggaggagactggtgctggtgctactgctatgtacgaggctggtgttgctgatgttgatgagactggtgctgctgttgtggataagaatggtgctactactatggatgaacaatgtaactttaagaggaggtaccacctggagactgtgattgacaatacatttgaagaaagttttgaaatcgcgggtcatataaattggcaccatattcaggtctcaaactacttcctaacatgtcacgcattttcatccccatacttgccataattttgaaaaacatcattggggaccgaagaatgagcaacatactaactttaactatatgatatttttttcttttctctttgatcctataacctacacctttttgatagtcaggtctatgatgtcctactagtttaggcgctctacattgttttcttaattactgtgaacacctttgctaatcaaaggattcgttaaaaaataagattaatttaaaactttaaacaaacttaaactttaatgatttaaaatgatttacataatttttgaatccctttaagagtttacaactattttcaaaatatattttatacaaaagttgttgtctagcgactaataaaatatgagcctaaactgtccagaagacccgtacactccaagtctaaccatcttaatatgtacaaccttcatccaactctagactcattctagttcagtcttggctctgacctggacatgaaaataatatctgtgagtcgacaaactcagtaagtaaatcataaaacataaacatataactgacagtaaccagatgcccatacacgtacttatatgtctaaaactaggccaggaacgttcttgactaaagtataactaaccccgaatccagcctatacttggtactctagtcgtattgatgtggtagtaaatagttcatactttctgaaaggctagcatatatctgttgatatcttagtgcagctctatgtacacttcacatatatcctgatatgctaatatgatggccactatttttcttagcatatatctattgatatctcagtgcaactctatgtagactccaacaatatcctgatacactaatctaatggcaactaaacatgcccgctaaacatgtatacatatatggatctatttattgttgagttttatgccctaaataaaactccatttcagtgttatccattttattcaacatcaataaag

SEQ ID NO: 162527 - DNA, 2765 bp, Cannabis sativa
ttaaagattcatccttcaagtaagaacttgagatttttgttcatttatgctctatttgtttatgtactgagaacttgagatttttgtttatgtttgatagggtaaggtttgtatttgtattgtattactatttgataggttcaggttgtgatggtggatttgaaagataatacagctaatttatgtgcagtagtacgtagctattattagttgtcaaaccagagcaaatgttttcatagaaccatattcattttcactagtagaatcttttgggacaacaaagattactctatgctagattagaaccggtaagttagaataatgtgctgcatctttattagagcctatccttacatgtacattaaaacaagttagaaaaacaccactggaccctttatagttctggcactgatagtattatctttaaatggctttatttcattccaatggaagtcatttattcatgcccgggactgggaggtgttcgtagaaatgtttctatgaagttggagactccatgccaaaggtgtcacagaagcatgtgtgtgtgtatgtgttttatgtgttttttctttaacaaacgaaaccatgtgttgtttactgggttttgagtaatttttgtattaaggatgaacatttgagtcgttcgtttccaatgtctattcttttgttgcaatcaaggagtggtttctttaatgattacaatagaatgttttggtgctgataatttcttataattttgtgaattattgcttattgtgaatggacttttgcatatctgcagtttaaattgtcagttgattgccttatatcatgggctaagaagtctctataatggatttactagtttattcatgcaaggaacaatgtggaatttctgctgccatctacacaacttcaaggttataatgttattgcttattcataataagactgttgataaacaagagtacttgcgccaaggtgcacatgcatggttatgttttgtttaatagcaatgctttccttccttgaaccccttctcctcagttaaagtatattgctttataactctatacaaagaaagtccttgtcctattaaagtaatggaggtctcctacttaattattggattagtttggcaacttgctaagaaaatctttatattttctattagctgattttggatcatacttaggaagcccacaaactatatactatacttttacccaaaatatgcagaataacaaaatgaaatgaaatgcaactcgttaagataacaattttatgaaatgcatgaaattaacaaaatatgaaagctttttcttttttattttagtttttattgtcatgctctagctgtttccttcttgcttatgtagtgtcagaaagagaaaagttgtctaagattagttttttgcgcagatttcttgttttccacggagttctttgaaagttctgctttatccggctgcatgtgttcatagtcatgtgaattattcctctaaattcattcactcttttcgtcaattcaaacaaagtagattcactggaagagaccagcgaagaaacaataagaaagatcttaaactgtctcagaaggaagatgtagacacaaagacttacatgcgagatactattggaaaaatttataatatcttgaaatatttgacatgggactctgctcgagatcagcttcagggcctccctataagatgggattcatacacagttaatcaagttttgaaaagccatcctccaatggagaaagcttggttattttttaactgggcagttgaactaaaagggttcaagcatgatcagttcacttacacgacaatgcttgatatttttggagaagctgggaggatttcctctatgaaatatgttttcaagcaaatgcaagagagggaattaaatattgatactgttacttatacttcattaatgcactggatgtcccattctggagatgttgatggggcaatgaaagtgtgggaggagatgaaagcaaatggctgcagtcctactgttgtttcatacacagcctatatgaaaattctattcaatgataataaagtaaaggaagccactgatgcttacaaggaaatgcttcaatcagggctttctcctaatcgctatacttacaccgttttaatggaataccttattggctcaggtaagtgcaagctaatatcatttttctggtatgacatttgataacatcttataataaattgttggtctatggctgtgttatttttttccttagactgatgctaactttgatgatttttgtgtatatatgtatataatctttaaatcattattgatgtatgctaaagccaatatgcaccaagtaaataaaatattacggaatagtagacaaaatagatgatagattcttgacctgtaaaatgtatagaaggcttttgacacccagcacaatgactaactttgttctcgaggtgaaatcaacaacctacccagtgcctaaaaatcttctcaagtactaccttgagcctggagattcttccattgtataagaatctacactgcttttggacagatctcttgaatcctctcggactccaacttacccggatgtctggtaaatctcaattttgtccatatattgcatccactataggagcataatttttacaagctgaattattatttgagaaaattaagagcatgtttggtattgttttttgttttttgttttaaaaaattatttttagaaatgagaacaaacaatagtttttgaagtttttaaaacacaa

SEQ ID NO: 162528 - DNA, 1982 bp, Cannabis sativa
agctgccttcacagccgccgctactccgccgggctctatcatcatattcggatcatttctcatctccgcatttgctatcgcttcagcgtcctcccgtgtcgccaccttatcggccaccatattcccaatagcgccctacgtacatattattaatttatattatatatataagaatgtatataaagtataaattttagttagttattagttacaaactaacctatatttataatggcatttttaatttttggatttgaattcttatcgataaaacttgtttttagttccttattatttcatttggacttaaaatttaaattttagaggtaattaaatcttttatagcattaaactgttaataaatttaaaatatcttctatttttgaagattaactattaacctaaactgtttatatgtatacgcatgttgcatgtttatattaatatattaatattattatttaaattttattttaaaatattatgtgtactgatataaatatattaatatattaaaaaaaatataaacatatactatagtttagaagattttatagctaaaatttaagctgagtaaaagagtttagcagccaaaactcgcccccttcgactaattaaaattgtgagtacgccactgctgttaatgtatgtatacataaaatatatataatgaaggatacgtacagtgagaacatctctgagcttatacttgtatttgtcgtccacatcaagaccactactgaaattctccattgatttggccatctcagcgaggccacctggtttaatggtatcagtactactgcccgtagctctagcctccgcagcttgaatcgccgccgcgtcgctctttctcagcgtcttgagcccaataaccttcgccgttgtttctagagcttctcctatcgttattgcagactgatcactcagttgatcatcatctgaggttgtgatcgttgagtgaccaaacatacaaacatagtgattagttttcttttgggccgtcgaggcttcaccgttcttctgggccaggcccaatacggtcgactcaggtgaagcctcctgagaagtaataggtttctctcccacttgattttctttgatgggttcttggtcgatttgcatttcctcactcattttagttattcttctttaaggattgattttggttttgtattttcaattctgaactaagattgtatatatagttgattcaggttttgacacttgtcatgagtgaatacgtggcaaatgaagaaggagaacaagtttggttacaaagtacaaagtcctgagttaaggttgtgtttattcatacgataagataagattaaggacatttgtaattacagatgtcgtcaaattatggaacaacaaaaatatagtccaggtacgtttgtatatatgaatgtacattcaaaatgaatgttgtgacatcacttataaagccgtttttaaaagattatttaatttgttaaaatatacttgaaaatttagattattcttttaatataccacctttaaataaatacactaaaatattttgaaacatctctaaacgtctccaattcacaataatacttgtttttaaaaattttttttttctaatttttgacgatgtcgcgaaacatcgctagatgtcgcgaaacatcacaaaatcatgaaaacatctttaaatgtctccaattcacaacattgcgaaacacatcgcaaaacatcgctaaacatcgctaaatatcgctaatcattactaaactccatccatggccccagatttgttatatcattgcaaatacatcgttaaatatcgcaaaaaactggtaaaccagaagaaaaaaacgcaaaaaacgagagaagtttttttgaaatataaggtggtcaaacaacactagctccggtgatgggtcgtccgactggtagagtgtgtgcgtgtgtgtggtgtaagtatcctagagagagagatggatgtttggtttttattt

SEQ ID NO: 162529 - DNA, 808 bp, Cannabis sativa
cctagtaaaatatttccaacaagttagtctgtatattcttgattctaacagattccaagtaactttcattttctggtagaatctttgatagtgattttgctttggtagggcaatatatttcttttatttgatgtgtgtcgtaaagcatattaaatttactaattaattttatttaaatacttttaattatttcggtacaatagtaggtacgggtcgatcatctcacaaaaactatatttactctattattaaaaattaaatagtatctctaaaaaaaaaatagttattaaaagaggagatttttttagaacaaaattaaatatctcgaaagaaaaaaagtaaataaaagctgataatacaattttaaaaaacagttaaagattaatctagcccttaacaatcatcctcaattactaataatgaataagttatacccatattttgagtagttaatatgggacttcaacatataacacgtataaaatattgtaaaataattcagcttgcatattgaatgacgcgatatctaataaatatgcctcgagaaaaaaagaaattataagtcctgatgataaaatagccggcagaatgaacacaggaaaatatacatagtgtctcagttaactcaaaaccaaacaacatgtcaattagaattccttgaataggtgtgttaatgcgaagaagaaagccaaacttatcatgtggtacttcattatatcgtatatataagaattatacgatagatagaagatccatctgtatagatatcatcatctacatccaaaaagtcgtatgctttggaagaagc

SEQ ID NO: 162530 - DNA, 1818 bp, Cannabis sativa
tacatgaatatttcagataatttttacaatcatgacaaaatcatttacaccaaagaaaaatctaaccaagaaaagcaagttcgttacaatgggaccactgtgcaatttgctataacagcaaagcatttctaaaagttggtgaaattcacttcctaacataaatttcatatagttgcacttgcaattcaatagccagactttcttcccaagtgatttggctaaaaaaatctagtaatcacaatagttatatagagactattcagttgttagcatacctcagctaatccagttgtagtaacttccattgacaaaaaggttcgagtacgatcatcattgaggaaaacctcccatttactaaaatcaatccaatacctgagccaaatttacataatgggtcatgtaaacttcagctgtactataattctcaaagaaagaaaaacgaaaaaaaatgtagactgtagtctaacctcctttgaaactgaagcttctgacgaagcatagtcacaactgagtcaatctggtgaactcggattggaaccgtcctacctaagcttatatgaaattccctccctaaagcaacttgttcgagcttattatcatctttggtaataatgtcaagtgggatatcaacgtcgacaacgtaaagaccaggcacgagacgagacagtttcttcaagaacaaagctagctccttttttggagtagatggtatgtaaactacaaacacagtattattagtatgattaaatacaaagcaaatgccgtttatgatttgatatcaatgacttgaatttcaatgagattagccccacctgggataaagacatgtaaagcgtaattcccttcgatatgagggaatgttctaactctgccggattgttctccaggagaaaaatccagacccccttcacagtcaaaacatcaaacatttggtgggtgatgccaaaaaggaaagaaataaattattatgaaagaagaagtattaagttaccgaatgaattaggaggaataaggagagaaaccggaggtggaggaagaggagtaaattccggtgtcgggggagtagaagatggtggaggctgacatggggttgcgggctcggagtcggattcggaggattcgtctccataagaggctatcaaagcctccatactctgtgtctcttgcttggaactgaaccgtatttacatggttgcttgctagttgctactgccgtgggtgtgtggaggctccaactgatcagttttttgttatgctatttagatttttgtctcccaagtccgaagtaacttaaagcatctccaattggagttcgaaaaacgtggtttagtgttgagaatcaccagaataagacgaatggggttccatcccaaaaccaattggcaatgggaggagtagctcattcctcttatatattctattatctttccacacaaatgtgggactctctaacatcccctcaagattcgctagagattttttttttgtttgtttttgctctgataccatgttgagaatcatggggttccaactcaaaaccaattggctatgggaggagtagcccattcctcttatatattctattatctttccacacattagcaatgtgggactctctaacatttagtcctatattttttttaaaaggtaaatattattttggattattggttttttaaaaattatttgttgaattttctattttgttaaatgataaaatatatcttatattttttaaaatggtaaaaatatgactctgaggtcaatttttaatataaccaacttaaagataatttttaacacgaacagatacagaaa

SEQ ID NO: 162531 - DNA, 2292 bp, Cannabis sativa
aaaaaaaatcttgcttaatcacttgatagtcacctagtttccaccacgtacataaaatgtgtctgcactccacataaattggaaatcattttgaattctttagaaacataacatgtactatttattttttataaaaaaaaaacaaaattatagcataaacttatcatcatatttattatatatcttcaaaatctagaaatacaaaaaagttcagaaaattataaaaaatataatgattattgcttttttaaccaaaaaaatagaaaattttgattcatgtataatcaaataataataataataataattgtcaaagtctttacaactatttctttcaattcaatatatataactcattaagacaaattttattttattgagtagtcacacaaaaaatgagcaaatactctctcaaaatgctctcaaccatgacatcagaaaaattggataaatcaactctctctttgtcatagaccacatcttaaaaaaaatagacaacaactcaaacactgtacattctaattaaataaggatagacaacatagtcgtactaactcaattaactgtctctgattctcaaaatgtggatcataccaccaccatttattgagtgaacaaatagagcaattggtatgagagattacatgaataatagatcaaaagagattttgggctttgaaagacacaaaccaaacttgacaaatcaaatattatcaatacccatttcatattgaaaatcttagttgagttcatcgaatctaagaatgatgatatacatatttgtaagtgtactcatgaaacaaagtcaaactaaaactaaaaaatagcttccaccgcctaaattttttttttttttaaaaaaaaaaagaaaaaaaaaaagagcctaatctccctactaaaatacattgtacctctcttttcagaagtggcttgacaaaatccttgtctcccatggaaacaccaccagaagttaaaagaatatcgatatcagcagaaactgcaccattgacaactctctctagtcaccttcatcatctcttgcaatattcaggcaaattaatttgcactgcgactcttttacaactatcaatatcattagcccgatttgaattcctaatctgtacaagagttgaattaatttcacagcaaaattgtccagaccacgtaggaagaaaaaaagaaccttgagcaaatcccaatattgctcagaaggatttggtaaatatgacagtgaaagatagtccaacattaaacgaacatgtagaatttttgtagaaaatttattattgaaaatcaataatatattcatttccatattatttgggtatcttgatacacaaaaaactagtattaaacgacacaataaaaacagaaagtaaatacagagaggagcaaagaaaaaaccttccaattaagagaaaagaaaatataaacaaaactttctcatagattctcaaaagtatctcaagctacacgtttaccttcatgtggaagcgttaggaggttcgactgtgtacataatttgcaaacacttgaaattctttataatttttacaatgtgaaattttcccctttgtgatcatttttctaccctataaagcaagtcagaaattaagcccaagaagataaataaagtaaatatacaattatcttgaattatgaaagtaattaacaagcaaaaaccaaactacaaatttaattaacagaatcaagaaactagactacagacaaatcatatgtcgtatctaaatatcctaaagcattaaaattaccacaaaatagattcactgatagaaaacaaaattaaaaaataaataaataaattttaaaagaaaagagagaaagagatatcagggaaaaaagaaagacgggaagtgctcttgaaaatatacatatatcccccattaaattatatattcatctaaataatataattgtgaaaagtaaagaaagtattgaaacttacatttatctcactagaaagagagacaagagaccatgaaaaaggaaggggctccatgaagatggttgctgagagaaggtagttttgttccgttcactaaggctcgcaaagagagagagagagagcaaaatctgaaggcagtacccttggcatcgttcaaggacgaaggttaaatctttaagaattatttagaggagaagtttttgagagagaagagaatggaaaatgaaggaaaatgaatctgatagtatttttttatacgatattattagcagcggactattccgctggtaataataggatttcgccgctaataataaaattgtcag

SEQ ID NO: 162532 - DNA, 3317 bp, Cannabis sativa
aagaaactccatacttatctccctttataagttattccctattctttctcgatatatcaatgcacatgaaaaataatcacattattcaatcttttccttcaaatgttacttatatacatcaatacacttcattaaatattcttttttagagtcgctcacaagattatttgtatgtacaacttttccaatttcatcatataagttttcaccataaccccaatagttttatgtgacaacatatatatttctctaaattatatataaagattactaacaatagctcaagtgataatatatttatatgtaacatggccgaactacccatacccaacgaggtgaagaaactatgggatatatggcaactacgtggttgtataattctaagtctattcctacaagccttattggtttcgtttgcatcaatgagaagaagatccaaaaactcatttctagtcttcttcatctggtcagcctatttgctagccgactgggcagctgccattgccattggtttgatcacccaaagccaaaccgatctttgcgaatccaacaacggcgagctcttcgccttttgggcttcctttcttctgcttcatctcggcggcccagatggcatcacctcatttgctcttgaagacaatgaattttggcttagacacctttttgggctagttttgcaagtcttgggggctttatatagcatatacctaactctcccaaacaacaaactttggcttcctacatttttggtttttgttgttggagttgtcaagtatatggagagaactctcgctctttaccttgctagttctgaccattttggtgctgcctcattacccaaaccgaatccaggatgggtcattgaggtagcaccggccagtactgctgctgctgagacagctaaaccgccagcagcagcagtacctgactcttctatcatccaagtatcgaacgatcatcaagaaattggtgaatttgatgatgaaatcaaactcatgcaagttgcttataagtttcacgacaactttaagggattgattgttggatttggcttgagttcgaaatgtcaagaatctagccgcaaggctttcatgaaagccaatcacattagtgctttcaaagttgtagagatcgaattgagtatattttatgaggttctttacaccaaggccattgtcattcgaaatagaatgggctacatcttccgcttcattggcttctctttcgtcgttgttgctttaatcttcttcaccttgttcgccgataaagatggtttcgaagaaatcgacattggcctcacctacgctttgttgattggagccattgctatcgatttgatttccattgttcatgatcagctcatttcttcagattggactcttggcgccctttgtgaaagatggggtaagtatactgttggaacttttatataaaattagtgaattttgcaaaaatagagaagtgacttatcacaagtctatactataaatctaaaaacattatatgtggaataataaacaactataagtgtggtggaaagagtcccacatagagtaaaacatattttattataaatgtatattcacacttaagtttgggttgcaattattattattattagaataatttgtagtaaaatacatttatgttttaatttttacatcactacagcaaaaacagtcacaggaaggatggactgttttggttggtgcctgaaaatcaatattatgaacaaaatatgtacttaatactaaaatatctgaaacgaaaatgaattattcctaaaaattgggaatggttccaaaaaattaaaccaacagcttagtttttacacattatcagaaacaatcaggaacgaattgtcgttcctgaaatcatttttcaaaataattaaatttatttaaattaaattaaatattaatttttttaatatcacattttttttattaaataatttctttcaaaacataaactgttttcatatttaattttaaacattatttttatatttaaaaaaatttatactaaagagctcataaatgttcacataaacaaaagtaataaactaaacctcaaaactttccaacaaattaacctaattattattacatagacttaaaacgtttattatctaatctgcaacttaactcaaatttattcttattttttttatattaatttgagttgaacatgttcattgcactgttgattaatactcagatttaattgggtaattttatttcatgcagctacatatattccctcatcaatattaaaaagaaaaagatcaaggtggtctggaactgtgttacaatacaatatgattagttattgtcttgatcaacatcgtatctacacatggttaaacaactttcttaacacatggaatgttcttgacacacttcaaatctttctcttttctaattcagagaatgtcactgatgatatgaaggcttcaattttcaatgaaatggtgaaaatggtcgaatcatcttcttcaaatcaagccgaaaggtatcaaggtcttcgtcgttattctaggaaccgagttattgagacagagttcatggccagaattgaatatgtcaatagcttaattggggaaaaagcttatttaccagagctacttacataccacttagctattgaaatctattctacatgtactaaagtactcaaaggatcagttttattgattatttcgcgttatttgttttatctaatggtaacacaaccaaccatgttgtctccaaatttgggtaattgggaggaaacatatcaagagacagtgaatgatatcaagaaatttttggagaagaataacaatcatttagaagcatgtgagaagattaaggggagttttagtgctattataggtagtagtgatgatagatgttttgaagaaatgggagagaataagggtttgtttttaaaagcttgtgtgcttgcaaggaagttgttattgggtgatgatgaagaaaaagatgagttggaaggtaaattgttgggattgcttgtaaaggggtctatgaattgtgaagcagtgatacatggtcagcgattgagtaaaggtggagaactattgagtttcgtgtggctattgagcaatcattttgggttgcaagttctagatagtaaagaaaactaataatagggattttaattttacatgcatgaataaggtggccaaagtttcgatatctctagagattgtgtttgtggttaagagtaatggaatgcaatgaacattaatcaaattttattaatatatatatatatatatatatatatataaacgggtgactattcaatggtta

SEQ ID NO: 162533 - DNA, 4065 bp, Cannabis sativa
attgtagggcgccacctataaaaaaaataataggcaccactggtgtctaatagcaatactcttattataactattaatttttattatgattaatgtagaaatggtaatggacacaaattctagaaatacgttaaaaaaaaagatgtaattaattaatcattaaaaagagtatatatatatccaaaactattatatggtataataatgggaaaatttgacttttcatgcatatattaagcctaaatttatttcctaacctaatattgtgcaatcaatatcaaataattattatactgctattcaccaaaagttgacatgtgtacaaataattcaaagattacaataattaaatagtattattaaatgcaattcaaataactcgtttcaattaattaaaattaataaaaaatattcaaactcgttaacacataagcatgtgcgagataagattaataactattaacagatgtagttggcgagataacacgtccatcttgggataaacagagtatataataagagtgtacacgatgagacatcaaggagcttgcagctcattgacccacatactttgaaataaaagcttgcaatccattgacccatgtatttgtgcatggaggaaataactacgttcatccatctcgccctttacgcgatagaatagtcacctcgcaaatatctttatgatatgaagaacactacggggagcagcctatccataattagcattttttttataaagacggtaaagaaggacaactcacattcagtgagaaacaactttcttagtcagcataaccgtttaaggataaagacaaagaatggttgggtagttattaagtacgatcccatgtgcataaaaataaatgtggggactgtccacgtttcatgaatagttgtaaataaatagatcccaataaaaataactgtcatcctatacacctataaataggggcagaatctttagaaaaggggacggaaaaattaagagagaaacttttatttacatttatagagagaattgtactttatatctagaaaaatattcgtaataagaaggactagtggagtatataaattttaactacaaaatcacgtaaaatatcttgtattcatttattattattaaattctgcagtaaatttattacgtaaaagacttataaaagagatatcgctaagcaatacaatacttattttttcttcattattgctctgaacatttattcttcaaactttctaactcttattgatcttcttaattttacaccttcactttgacttttacaaccttaattttgttgacgagaataagtcatcaaacttattctattttatttctaggttcattagagtgctaacccaaatataataatattattctcattcgtattgcattaaacttattttattttatttctaggttcattagagagctaatccaaatataataatattattctcatttgtattgcattaaattactattcgtattataattatccatacaattactattatattacatcaaagccaaatttcttcaacttactacactggaattatttttgaagaatatcatacattgtgctacatacattgatgttcattatatctaatttaggacattaatagtactttgcttttatataattagaaaagttttgcaccaaactctcattgaaaaatattaagattactgggtcaatcttgggcatggtatttgacgaccgaatttgtgatggaaaataacactattttgtgactaaaaatgtttagttgttgaatattttctacaactgactttcagcgattaaatggcgactaaaaataattagtcgcaaaaaattttagtgactaattaacgagttttaatgattaaaaatttagtcggtgaaaatagatttttttgtaagttctccaataagagcctacaagaatacttgaaaagattcttatagactagaaggaaaatgttaaccccaatgtttcacaagatgtaatctaaaagttatgacgagcggggtagacaaaaattaagacgtcatccattgacaatgatatttggaggctaatcacacaatttatgtcatttgaaacgcctttgacacttattggcagaaacaggaagtgattgacagctcaagttatgaggcgtgacttgttggtggaattaggcatgggtgcacataatcgatccaatccaatgagaactgatcaatccatttacaaccaaccaccaattattagatatccaattgtgatcagatcattttgaatgttattttaaaatatataattagatcagatcagatggtggatgggtgtctaaaaatctaatatctaatacatccaacatctaatcagactaatcagactaattaatattttcatttaatttggatgagcaattatattttatattgttatacgtaaaatttatatgtatatatgaaaattaacattaaaattttactcattttcttgaattggatgaattcagtccaatcaaatacatactggacctaaaatattagatggacataatccgatcctaaaatactaggtctaaaatattgggtaaacccaaattaaaataataaatatttttgaaatacatctaatggatagaaccaatccaatcaaacatccaatatataattggatgactaaaattaatcaaattagatcagatggtaaaatctaacatccaatatataattggattgaatttggataggcctaaaaacattagatgttgtccaataaacatctatatttaaagtcataaatgaatttagtgcaaaacataaaagttgtagttttctttcttagattttcaaaacatcttgtttcatccaaattagagtaatattgagcaagttctgctcaaaatacggatgggccatgtggcaggcgtctctcctcgcccaagggagttgctcctcacccgtcttctaaggaggagtgtcactccctgcccgtgggagtgttacccttcaccaaagtgtgtctcttctcacccatgggagtaagtatggaccctaaaatttactaattgtacatttgaagtgttgaccccaaaaatttacaaagtataaatatcaaagctcctcctaatatgttttgatgcccaaaaatttacgaagtataaatattggagttgatatattttgatgcttaaaaacctcatgaaaatgttaacacagaaaggcaccctctatcctctcttttcattctctctgtccctttctttgttggtctccatgacaagctagccacacgaggaatgcaagctccctgccccttactctctttgactccacagaaagcttcccctcttccatcttcttcatgtctctccatccattccatctcactcatggaattggtcctacctaaattacattattaggatggtaattaagagaattggtaaaatgcttcaagacgatgttgaacaaagaaaaacataactccaacacatagtcaaatttacatggaagatgagggaaacgacgaggaaaatacgaaagaaaggcatgaccaaggacaagtcctttaaagcaagcacaatttttccaagcatgaaggtgagtagtggttatacaagagagtacaatgagtacaagtaatggagctaccacctatcagctgttaatacaggctgatattcgactactattacctccactacccacgtgtcacactaacttgctctatactaccaggatagtgtctcctaacttttgggaccatttgtattttagagctattcgagctctagtataactagtctcttgaagcacttgtaaagggcttgaattatcattataagagagataccattaagcaatacaatacttattctctctctattattgctttaagcaattattcttcaaattttctaactcttattgatctctttattttacatcttcactttgacttttacaatctaaattttgttgacgagaatcagtcgtcaaacttagggggcgtttggtaatacttttactttttaatttttcaatcacaaaaatgaaagtgaaatttgtgtttt

SEQ ID NO: 162534 - DNA, 1804 bp, Cannabis sativa
ttgcattatttgacacaaaaaacatttatctctaaaatgatgagtaaccagatgcttaaggcctgttaaaatattagctcatctagtctatttaattgctcctttgcaataaccatggcatcctgtttaagttagcaagttaaagggtatatggcaagaaaatcagaatattaacattcacttttttttaaaaaaaaaaaaaacaataagagaacagtgaatgataagagaggaaaagagtacacaccagtagatgggcaaagctccacgaccgtagtaatcggcaccaggggagcaggggtaagtaagtttgtagtaatcgtcacagtatgactgcataggactcatttctctgttatagcaaagaccccaggccaatggtcctcctgtggcaactccataaccgcctggaattcaccattataattaaccaccacatggttacaaacataaacattactttgtgccatcaactatgagtgtgactgaattagaacagcaaaagaaaaataactatgaatgaatttacgatcaaaccaaactaaacattaaggcatcaagaccctttctaatttcacattgttttcgcaatgaaaaccaacattgaaaaactgaaatccactaaataatgcctaattctgttaaattaactaataaatgactaatgacctcaaacttaaaaaacaacattggactcaagttctgaattatttcttcttccgactaattttctcagccaacatagaaagtactaataatatcaaaccaaaaacgcaaaattcaatgttagtggtgtgcttacaagacgttttggcgccgacatggccaaggaaagccgcaatctctttcatctgcataagtttcccgccggtggtgccgaacccgaggtgctggaagagcgtggtggcgataatgaaggactggtagtcccagaatccgacggctttagccaccggcgtgttcctctttgagaaaagatcttcaaactggtaaacctggaaaatctttgaaatggtctcattacaacaataagttgaccacacccgacactcccaaccttgcgtgcaaagcttcttccctttcaccgttttcgtcagaattttttcatcgtctccatcagctgccatagccagattggccatcattagcagcccaagtatcacaaaaactccccgtttgatccccattttctcccttaacctacctcgaatccccaaaaataaaagttaaagttagtaaaacaaatcaggagaagacgataaaaagaaaaaagagttggttctgcgtaccaggaagatacaggcgaggaagatgagattgaagaactgtcggatcaaattggtattagggttttgactgattttggagtattcttttgaagaatgaatgaattgatgagagactcaaagaaccagaggaagaagaagactactaatgggggaatctgtgttgtgttagacgagctgtctttttcgggttcgtgtgaagttatagcgtcgcacgtgtcaggattaatgatcgagcaagttagtggtgaatggacggtggatgatgtgtgtagaagggggattgtagggggaagaagatcgatgtttaagtgagagtacaggctggagttgggaggaaggtattgtttgaaagagtggcccacttcacaccaccgacagctgcaaatcaacctcatgcaagtaagttaataagcctctcatttatatagggaaatttgaaattctatgcttaaaataccatttaatttttcccctaaatgcatagttattaaaattggtcttatatgacaactttc

SEQ ID NO: 162535 - DNA, 5138 bp, Cannabis sativa
ataaacaaacaaagaattaactttttcaatctgactccaataatctacatgcccagacttgtttctttcttacacatacaatttaatttatacataaattaatgtacgtatatacatgataataggatgatgaaaatattcaacacacacacatagaaaatatattaaaaaaaagaaacgaataaaagctgaaagaatgatggatacatatatataaatatatactaaacagttaacatacatattgatgacatttagatactctgcagaacttatacaccattgtaaaagtaatattctgtttcaatattgggattgacttttacagtactatttcatattatatatatatatcatatgaatagtgtaaaaatgatcatgtatataattgagttgtatatacagccccaactgatcttagctggatatctagagggaatttctactcaattttataatcttcaaccagcttctatagatattttatatgtatacaatacatcctatgataaatagtgtaaaatcaaatgacaattaatcaaataataattaggatatatacactacattatacatatatagcagtaatatattaataaagccgccgtgtgctcttaactcgtaataaaattactatatattatatgtataaacatatttataggacacaaaatggaaattgatattgcaagaagtgaaaaaaaaagtactgtaattcaatattcatattcatgggagcagtagtacgtatatagcattaattaattcttacgagctaattaattagggtccaaatcaaaagacaaggaagaagattttcccttccgtgaaataaactctggtggaatttttattggcatttgggaatgatgatgatttggtagccttacttgttggtgttcgtgatgatgatcatcaagagagtactgaaccaaattagaggaagctgcagcagctggaacctgatcatgatcatgatcatgattattattattatgattggaaattactgatgaagaagaagccattgttacacccgccaaagactcttccacttcctccacctccacctccacctccggactatactccatgttcacaccgaaaagcctcagccgtttcgacgaagcagaaggcggagagcttaatttcccatggcctgcgtagtagccgccaatcacagctgtcggcgttgattcaaacaccacgggatcaatgtgatgattattattattattattgttgttattattatcactaataattccactcgccggcctattaatgatccctgtagcagcagtactagaagtgtgatagtactggttgttgtgttgttgatgatgaagatgaagattattattataataaggatattgaatactactattattgtaattataccgcaaattttcatggtgtagtggtggcatggacatggaaattccggaaggaagcgagtagaaaggcccttcaccaccgcgccggccgctaaatcctcctcctcctcctccacctccccactgatactgatgatgattatcagttgagaattgtactagaggtgtaattaaggatcccggattggtcgattgctgcagcgcatgatgatgatattgatgatgatgatactgttgatgttgatggtggccgagaggatgatgatggtggtggtggtgatgaggtcttcgcctccaatcaatatacaaacgagctttagcagactcatcaccaacacctcgttcaaacgacacaatgtcaccagcatcaagcttcttctccttaacgaaacgactccaacctttagtcataacataactctggctactgttccagtaagagtacctaaacctccaggacttgccgtttcgatcctcgaaattgaggagcaatcccttgctgctgtcttctgtggtagatgaattatctaaagggaagtacttctcggcgtgttgtttaggaatcaccaaccgatttagcttcccaacatcgctaggcgtaaccactttgtcaaacatgtgctctcgttgatgatgatgatccgtaccactactactactgcatgaccaaaccccatgagtaccgcttgtactgctgttattgctgttttcttcgtaattggctctcagtgataaatcagccatatggggttgtttggtttaattaataattcgtggcgagatcgatcgttgatgatatttgataatgatcagctgaagaattatctattgctgctgttgttgctgaccatttcggttctgatgagtataaaacgacagttgtagtagtgctagtacgattattaatactgctattgcttgtagtagataactcagaatataagaaaggagaaggaagcacaaaacgacaaagggaattgagtcgttttttagttataaattattattattattattacctcgttcagtatatagttcttgattgttcttcgtcttcttctgctttgtaatctgataattgatcttcttgcaaaaactaatccatcaattataaaccatgcttagctaacttcggccatttcacactcctcatcaacaaaacccttattaactttggaacacacacaataaagaaaaaaaaaattaaattcaagaaatgaaaaagaatagataagaaaagagggaaataataatatagctgctagtagatacatattttagtttgaatattaacaaaattgaataacatttggattattattacttattaacaaccatcacctgaaatttcatgatatattttgactgatgatcagatctatgcggcccagaaatggcaagagggttataaagtatggtcggtgccttcttctttgaccacaaagcaagcagaaaattctgaaaaaaccctagcgaaaaaggaactgtaatatagctataataagcagctgtatgactaagacaaaatggtttgatagtgtattttgcttccaattaagttgtctatcaattgttgttggtgttggtattattgaccaaattaactcagcatattcccaaaggagaatatcaatatcagagagagagagagagagagaaagacttataattgtgtgtggtatatctattcatataataaactttactttactaattgactcattggaagcttcttagttactttcaactatcaaaactagctaaaatagagtagaagctgaagaagaagaagatgatgaagaagaagaagaagagaagaagcatttttctttctttcttaatttcattgttttctttcccctttattttttttttctctctctcacttcagtataaaagtaataagacttttttttttttttggaaggtaagttgtgtgtgagagagagagtttatacgtaggggcccataatgaacgagatgtggttttgatcatgtgagtctctcgtccttttcatattatcattattagttttttaatgacctttaatctgtactacaccctattcaaataactaaaacccaaatatattagcaccattttttttggttttgtttttagtattaataaagataagtaacatgtaattttgctgaattaatttctagccttttgcttttatatgtactgcccaatgttttcggtttgcaaccaaagaaatattgattttttttttattggaaaaaatactcaatgtttttaaaaatttagttttgtttttttatttcgtgctacaattctgtttgtgagtttgtgtgtatacttgtaaggacatgattaatagccattataataaatatgtattaatcgatcgtgtccttatacatgtacaaacaaacttataaatgcaaaatattagcacaaaattgagtgtaattgggcagaattacactattagtaacattgggtagttttattactaaaaaattaatggtctctcaattacaatccaaaaatattaagtatttcaaaattattaaaaagtattactggtgctaaaacttttttttagtgtcatatagttataattataattaagtatagcaaatatcatataacttaaaaaaaaataatatttaaaaaatatcgctaaataattataagtcggttccatttatagaagtattatacatcacaaatatccaataacaattctctaagtatttatatagcaaattttatttttatatattaattattaattgaatggaaatgtaataaaaaataataataagaatgttgaagttaatagtgtttattattaataagatttatgattagagaaaggggtagggagggggcagagctagttaggtttggagtttttgacttttgggatcattgatgatatatgctggtcctgctgccagtgtgaaaaaggcaccacctcctcctattcgagcacaccgaccttgtttgtaggcgcctcataattctgattctctttctctctttttctttttcttcttaaccaaaaatattctaattaattggtctgtaaaaaaagataagtactatatatatttatacacatatatcatgtgatgtgatgctccaaaaattacaatttttatccatttatatatatactttcattttcatatatgtgcagtgttgtgtgtggtttcaattaattaataaatacaatatttttagttacctcattattcatatatgaaaaggccataaattttgttttaattagaaattgtacaaatgatcattttatatatagttattgttcgtcacatgcaaatgcaatgttaccttagtatatgtattggcattaattggtatcttaactaattaaatgaaaaattctttttctttttctttttttcctatttctctttattaatttctgtaattaattaccaaccttggataatgcaaattggttactgtggtccaattatcatctacttcccctttaagaagaaaatggttggagagaataataactttcaaaagcaacattactatatactatatacttatatatacgtggatcgatttggtcggcttatagtatatttttattaacgcaatataaatatcaagttgcaaatatttaattataaaccacctaattaaaaattaaaaaaaaattcaacccgtctaatgatttcgtcagtttagtcaggttaacccgtctaaatcgtttttcattttttttt

SEQ ID NO: 162536 - DNA, 3203 bp, Cannabis sativa
  modified_base (2234)..(2244): a, c, t, g, unknown or other
tatatttatatgtatattgtatttgacaagatataatatcaactttttttacttattttattcgtaaaggtcggattatttagtaatgtgttaccttttttttttagaaataattaattaattggcaaatgggactaaagtaaacgttctacttctatagtttttatttttcgaaagaaaaaaaaaagcaagagttaattttcacgtcatattaatcgaagatagtattatatatagatatgtacatttatataaattaagctagtattgaagacattaactgaggtatagattcagaaatcagatatagtgcccactgatgctggtgaattattattaaggaaattattttatatactaatttttaatttttttaaaattttattatttaaattgttcttttgatttttatgtgaattattatataaattttagttgtaatttaagttgtttcattaattaatgtaagaatttttattacgagagtactgctgcacatattaaattgggagttgggatcaaatataagtcaaaactcaaaagcaagtcaagcatgcatgtcgttttcttctcatgttgagaagccaaaaacgacacgtcgtaatattttctcaaaaatccaaattgaaaactgtgccgtttctactttcttcatttggctttttccacgaaaaatttataatgaaaaacatatgtagcttctctaccaaaaagaaaaaaagaaaaaaaaaagaaatatatatatatatatagtatgtgattttaattgataattttgaaatatatgggtgatttaatatatttccaaaaaaatggctcatagatttggttggtggacttttaaaagagcaaaatattcgtaggtcatatgaaaatttcaataattgtgaaataattaatgaagcgattgaagagtatatgtatgaagggttacagaataatttatatatacatttgatttaagtttctcattccaatagcattgcttacggtactttattcagaattaaaataaattaatgaagaaatataacagaataaacaaaaaataattagaattaatatttataataatatgttatttattaaaaaaaattcaaaatagaataataataataatttatcttatttactttatcaaaaaacgtaatcagaatatttaaattgactaaattatccttttaagttaaattatagtatatgataattattttgtaagacatattttaaaggataaaattgttattatatatttaatattaaaaaataaaataaaaatatataaaatttattgtccttgatgacattccttacaaaattggtgggagaagtattctcttttctttattccctatttaatcaagttctctctttcttaattttaataatgcaagtaaataaatgtaaaaaaataattactttactattaatttttattacttatttgtaaacgtgcgtaaataaaattctatcttatggaaaaagtccatttttatggctgaaatttgtcaatatatagttcaacacatttgtatatagattgaacgtgtataaacatagtgtaattattagtttaacaattacttctaaacacatttttagagaatcctatatggtgtgggtggccagaaatttttagctgtattacatatttacactgttgtcttttgataatatttcattattctaaaaaagaaaagaaaataatcagtttattatttttttttttgttaaaacaacaaataattagtattgccattaccaccattgtgctcaattttaataaaagaataactatattattgaagaatttttttcgtaatcactactacaaatattaaaatttgtgacggtcctaaaaataatttttttggaaaactgtcattaaaataataaagtaactatttaaaaccatcgaaaaaaatttagtattcctgacggtttaaaatcgtagtaaacaaaataagcaatatttttttaataaaatgtgaatttttaggagagcctcatacccgacggtttacggttttaaaccgtcaggtataaagacctattaaaaaattatcatctacttctcgctacatttcccatgtgctcacctacttctttttttctattttccacatgcccacctatttcttctccatttcccacacccaaaaaaaaaaatcttaactctccaaaaccccacctaccctccgcaccatcatcctcctctctcgccgtcttcctcnnnnnnnnnnnctccctttcttctcgtctctctcgtccatagatctccacccacccctcctctcgtcggtctccctctcttcgccgtcgcatacgtcggaccatctcgtccctaagtgatcaacataacaccatcacctgggccctacctcatcatctcgaccgaagaggtctcaagatacttatctcagcccaaggtcaagacactcgcctcggtccaagttgaacctaaacacactcattcatctcggccctgagggcctcagtatgtcatcttagcccaaagtgaggactgcctcacgtgcttctcgggacttatcaacaacatgatcttagaacgtgttccttgtgacgagaaaagctatggatagaagacatctttaacttttatcgtttttctagatatttgtttcaaatgttattttattattattttgacctttaaatttaactaaataatagttgggaggagaagatatcagggatgaaaacctaagtgtgtcctagatgaacacctctataagggggtgatatcaattgtaaaggaaacactttaaaaaatactctgaatacactgaaactcatccttacgaactcccactctctttctccaaaaactcactttgggattgaactcttggagaccataactccggagagctatcttcaagcattgagaataataaaactaattaaattagcctattactgctaaaatggggtgaatcactataaaattctcgtattcatctttgtcaaattttctttcacaaatcggtttactttgattaacgattgcttgtgttcatcttgctcgattatgatcttcttagatccgttgacaaaaaaccgtgtcaacaaaagtaaatatgaacatgacacatttattaaaggctaattaggatttttatcccctgaactttgacatgtaccaaatcatgccccctgacttttaaggtcgttaaaaatgc

SEQ ID NO: 162537 - DNA, 4608 bp, Cannabis sativa
ccttagatacattagatacaattctaagtttaattaaataatatttaaagtacgtatccatatttttcttccctatcagttcgtaaaatcccactttaagaaatggtcggaccatttaacaaacatgttttggaccgctaaagcattgcacgggagcaagcctaacattaaaaattcgtgttgatgaaacaaacacttctccacttgaaaattatcatattaaggatttcaaaccacgtacaaaatagtgttagaagaaatggtttctaatctatcttcaagagatattccttctctactcttgtagaagataaccccacttcctcagctgaactaatacaaatggatacatttgacaatacaatgcgaaataagaaagcaccatccacctagtaaaccccagcaggcaccttgaaacaaatatacactagacaaaataatcaacttatatatagaaatctttatggaagaacataccaaggtaccaaaatccaattctctctaaaaacaatccagccgcaaattattgctattgcataatatactaaaagaacatgaagagacacggtagcctacttataacaactcaaataaccaaagaggggataagcccactcacatatagcaaggtagatgaaacaagaacagacaggttccactcagaaaaaatgcctctagatataacaatgacagaacacgatgactagaccaaagcaaaatcagaacctgcgactgaccatgcttgtatcccgtgtctcccatgagggtctactctcctgtgcaatatcacccctgattgcccactcaattggttttatggcaaagaagtactgtaaacaagacaaacaaaattatcaattttggcaatgaaaaagacagaaaaaaccaccgcaagtattaaaatttaaaatgaagaggattcttttgtcgagaaaaagtgtgagaagaaatcttaggggcttacttggaaagctaaaaatataggaatcaagatttttcctctatcgttggggtttggcccttcgatcaatttcttgtcaacaacaatagacttgcttccattcaaggccacttctgtgataatttgaactaaatgagaaatccaaggagtgccagttggaagaatctgtcaattcaatgatatgaaaatgataagaattgacaaaagatacactcaaggggttgacatgtaaacatagaatagggaagatgattgaccttttcttcattctcattcttattacacctcccactgttctcaaccaaaaccacaggaattgctgaaccctgagagagaataaggtagaaaataacaaagtaatggcttagtaacacagactaacacattgcccataaaaaggtaaggaaaaacaaacatcaataataagaatagatgacagctaacccctatgaaaataaaatgcagaagaatatgagaaatagaaacaattttatgatgccatcatggtagaaatcaacgcctactgaacttattcttctcacttgatggtagaaatcaacgcctactgaacttattcttctcactttaatgtttgggcatcagcgcatatgtgtaaaataaattcatatagcagaaaggaaacagctaaaagcgagagaaaacacttaatataccaatttaatccaacttgatacaaccgaatttatagatcaaagtctcatttaacttccataataagttacatcatttaaaaagacacatctcagtttgagacgaaggaaacaatccccaaggtgtaagcatcgcctcagatggcgcatcatagagttgagggaggcgtgcatctccctcaatctcttgaattaaaggccaaaaaactgattaaattgggttttaattttaagagtttaagatactataaaaagaaaagcccagtattttctagaaaccttagtccctttagtagctgccctgcccctttatcattctagcttccttcaacaaattgaaaagaaaaaacaaaaacgaatgccaactatccactactcaaatttgttctagaataatagaatctaagattcttgaaactaaacttttgtctttattttagagttctagacaacttatgagacattttatattatgcttgagtttgattgacattgaatgtgttatgtaagattttagggttattcttagttttaaccatttgctgttatgttatgtttaattatttttaattattcatccttgatattattaggttttataaaagtaattttcaataaaatataataggctttttgaggcttatgcctcgaaattaacattaaaaaaattgtgattttttcattgagaaagttctatagctacaagggcaaaccaaaacccaacgcttaggtagcgtttggttgggaggaatgaaaacataggtgttaaatctgtatgcctaggttctatacacgtgtccatatgtctttagtcaattagttaagtagttagttgttaacaggttcaatagttaggtctgttaacttctcaatcttaactcgagtcttaacttgagtatgcaagtattctattagtaacttcttaactgtaaagcagatgattctttattgtaaatactcagtataataaagataaaatttcattagaaaggttttgccttgtgtgtgtgcgcgcttatgttctatgagttgtgagtgttctcagattgttcttggagccattcctggcatgtgggattgagctcgaattacaacaagtggtattagggcttggagatcgaagagaaatcttgttttggctcgaaagtttaagattctagtgatcaagcaagaaaatgaggaatgtgaagttcgatcttgaaaagtttacagggaagaacgattttggtttgtgacgtgtgaaaatgagagccttgctagttcaacaaggtctgcaatcagctttgttgggagagaagagtatgcctgaaggtctaacccaaaaagagaaaacacagattctcaagaaagcacatagtgctatagttttgagtcttggtgacaaagttttaagggaaatgtcgcaggaagactcaattatagcgatatggttgaaactggaaagtctttacatgacaaaatcgttggcaaatagattgtttcttaagcacaaactgtactcttttaagaagatgcaaggaaattgaagatcgtcttgatgatttcaataaggtgatcctcgacttggagaacattaaaattaaagttgagaatgaggaccatgccatcattgtgctgaactctcttcccacagagaactatgaacactttgtggataccatgatgtatggtaaggattcattgacattagagtaagtccaaaatgcattaatgtcaaaggaattgaagagaaaagcagggaagcaagatgaaggtgctagacatggattactgatttaaggaaaagggtccaagaaggagaacaaggaccagaacaacacagggaagtgtcgaaggaagactcagctgtagagatacggttgaaactggaaagtctttacatgacaaaattgttggcaaacaaattgtttctcaagcagaaactagacttttttaagatgatgccaggaaaggaaattgaagatcatctcgatgatttttttaaggtgatcctctacttggagaacattgcaattaaagttgaggatgaggatcaagccatcacagagaattatgaacacttagaggataccatgatgtatggtaagaattcattgacattcgaggaagttcaaaatgcattaatgtcaaaggaatggaagagaaaagcagagaagcaagatgaaggtgctgggaaatggattactgattcgaggaaaatggtccaagaaggagatcaaggaccagaacaacacagggaaaggtaaatcgaaatccaagtttcaaaggagatgtgcaacaaaccatctcaccttaagaatgattgtccaatcttgaaggattacaaatccaagaaagatggaaatgcagacattgtttcagatgtagaagacagtgatggctaagacaatgccagtgtgttagccatctcaaagaacaagtcaaaagtggactagatcatagattctagatgttcatttcacatctgccctatcaaagaacatttgaatacagaaatgttcaaagtggaactgtcaaactgggagacaatagagcttgtacaattgctggtattggaacagtcaagttggaactggaagatggcaaagttgttgagttgaaacaggtcaggcatgtaccaagatatcaagagaaatttatattctatgtccatgttagaccaagatggtttcaatgtcaagattgaaaattgcactttgaaggctatgaaaggttctttaattatcatgaaaggcaagattgttaatggtatctatgtcttacaagggaccacaaagaaaagtcaaggctaatgttgttgcaactaatggagaggattagaccttagtatggcacagaaggcttggtcatgtcagttatggtggtttgaagatactaggcaagaaaggtgttcttggatagtttcatgtcaaccctataaggctttgtgagcattgtgttcttggcaaagcaaccaaggtgaaatttggggtaggt

SEQ ID NO: 162538 - DNA, 1792 bp, Cannabis sativa
caagggaaacaaaatgacataatttgataaacaaacataaaatgatggcaccgtttgatcgagtgctttcgaaatggcaagcaattgagctttaaggaggttctacgtaccgagatgaaatttgatgtgcgaaacaacgaaccaattagtagcctaagtcgttccgaacaacagcaccaaaccctagcctagccgcccatgcatggttttgctaagggtacgtacgtagcaaccatatttcatttcaacgtaccaactagatatgatcatttcaaacctctaatagtaaattaaatattcaataatcttacaataaatataacattattattgagtgggttacccaaaagaactgagtttattactgagtgagctagttttctttgctcttgcacataaatatataataaaaaataaaaaactttttattataatgtaatttaaatggtatgtatatataggattgaaatcttgaaattcttcttatgtattggtacaatgtttgctgtcaacattttgatgtgaaaattatggtacgaagtatccgagtcacaaaaataatacaataattgagtattgtcttgacatgaattgtaaaattaaaaataaaattttacaataatatatattttttcttatttaaaagctttttaatatatttggatatcactaaaaaaatcttttgtcattaaattatgaatcattagataaattatttaaattttaaaaatagcttctcataaaatccttttagtataaaagctacacaattcttagtatagcttcttccaaaagacttctgaattagaaaatgacttattttttatccaaacactcttcaaaatgtcttttaatctagaagctaaaaaaaggctcaatgaagctaaacaaaagtataataataaacaatccttcatcattaaaaaaaatactaaattatttaaatttactgtataaaaaattatatggttaatgtagattattcctttaatactgattttatttaatcagttaattaataattactttttttttaagaaaatgtatacatttatgtaaaatgctttttttttaataagaaagcatccaaacatttcttttttctattacccattacaaaagcatttacaacaacaataatgatataagcaaaatattgttagaacctgttaaattcttaataacaacaatattatatattgatatgattaaaattagcatttaaaatacttgttgtatgcttgttttcgatatttaaacatgtgtttggttaattaaattatgattttaacatcttataataccccaaattttttacaaatttgtgtaaaatatcctcttgagacattacatgcattttactataaaatgattttttttttttatcaatatatgaaaatactaaaaacacaaataataataaaaccaattactattattataatagtaccttttatttatttaatgatgaaggatatacattacaaattttaattatgaaaacaacaacattgagcataatcccccttgaattgatatgtacattttcctccatttttgtagcctcgcccaatgcaaatggcattgcaattgaatccatcatgatcataacaataactaatgcactttgttggcaaatttattgcacttccaacctctgcaattcatttacccatcatatcaataaacattttagtattaaatatttaaatatgaaataataaaaacaatcacaatatatatggggaaacttacaaaaatattggaatttgagtgaatttttacaaaaata

SEQ ID NO: 162539 - DNA, 4231 bp, Cannabis sativa
gctggatttgggttgcttcaataatttttttagtagtttttatgagtttacgtggattttagttgcaatttagattgttctattagttattatagtgatttttaagtagaattaagtaaaaatgtaagaaaaattattttaaagtgtaaaaataaagaagattaattttttttcaaacaaaattaattaaatatttgaataaagttatactcgaggacgaaatgactatgttgagaaaacgacaaaggaagagcgggaaagaaaatattttgtgttagtatacgaatagaaaaaaaaacagttcctttttattaatttaattcatttatttattttttatatttagcaattatggcgtcaaagaaaaaggaacatgcatgattaatagtattgtaggtccaacacagctttcacaactccttttaattaccatgatcataatattaattatatattacaattctatgtacatgtgtgtatatataacagtttcttactatttctgccgacggaattgggaaaagaaattgcttttttgatcaatacatacaataaattgacctagctaatatattactatgtgattatcgatctctatgtaaaaccacttaataatgctcccatatatatctgtcattgagtagtaaaccaacttttcaataacctaggaattatgaatatttgaattcaagatttgaaaattttctacgtatatccaacgtcgtaattttgagattcaactaggttaataatcttgacaatatgtacacgatctgatggtcaatctatgtattgtatatatataattagtactaattatttcttaacctgtaagacaaatttcaaagaaattttactaagcgtcttaatcaaggatcaagaagaaaaacgattattatttgtattaataaattaagaagagcatgatcagacagggaatgacccatctttcaataaatgtcctaaaaaccaatctaagaagaatttttaaagcgttgatataaatatatcaaacggtgtgggaccaaatatgactaaaagaatatatatatttatatacgtatatatttgttttgattaaacatgggtcaatttgtccatgtcaaccccactaacgtgaagaatatatcgtttgatttttcatcaagtccaaagccaatgattggtaatttgtcgttctttagaattttacagcctctgcactttggtggaaacgcattagaaaagcctagcctcctcttatttagtggaaaatatgcatcaaaatattttcaactccatcgatgaatcgcgtttattaagtcaatattgttcagacatatctaattgatgacgaaaattaatatatgggaactatcctaatttagaaaaatatactaagtgatctaacaaagtttagaaccttgctgcgctatatagcaaattaattagttaataataatagctaggtactaattaggatgatatactgtcaaagctaggacggcaccaaaaaacaaagcaagagctttaatattcaatataatcattttatccatgaagcgcgtgcatgctattatttctacaggataacttataataaaactggtgttatgaggaaacacactcacacacaacaattaataaaattagtaattaaagtatactgcttcgctatattgaaaaatatagataaaattctcttgataaatccagcatgtcagtcaggcaagccctatatacatgtgccgcatattcaaatgaatatataaaaaacaactaaatgccttaaaagaaaaactatatattaaatgtaaaaaataaaaaaagcattgctatatatagccagaaaccatcattatttagtttttgtaggggaagaaaaaaagataattaaaaacaataattcctatatcgttcataatcgttcacatgaaacattatgcagatcccattagtatatatattagtatatattattataaattataatatatacatgataagttaaagttttacactttttattcttttttgctaaacaaattaaagttttacacttgaagggtacgtttttgtgaaaacccacctaccgagagcaattaaacacacataagtagtcctaaatcgtccttcgatttttcatccacaaatttaattaaacttttggatttgattggtttaaaataaataaagtgagaagctagaaaacataaaagataatgggcggctcctgtggccttcatatgtttactccgtcgtcggggttgactacatataatataagatatatattttttcaagttatacataacccacattatattagattcacataacacatggaccattgcacttacatattgcattattattatctaaaagaattagactcaaaacttctaggtcagcacgtgttcacacccacactcgataactctctctctctctctctctcttgtatatattgacatatatgtgtccttccattgcccttttggctgccacgtggtacataccagggaatcactattctgagactcatcatttctctggggtcaattctgtctcaacacacgtgtcattctgatgacagcattacatcagcgtgacatcattacatacatatatatgtatatattattataacatatgtacatacatgaaatttaccccttgtcggtttgcctcatgaagctcgagcggaatgtatttgattacaatttagttcacaatattaatcagttacccaaaagaggaattacattaattatacattcacatacgatgaactttttttttgtgctaatgatatataatattgatcatgcatgtttcacattgaaccttgcaatgattaattatactacattataaacagttttcttttatttcatctacttcaaaaaaatatacataaatagtttgacctttttctttctttaggtatgtacgtaattctaaaaacccaacaaaaacattataattaacctaattagtacttaaccgaaacatttttataataaagatagaaataagtcaaccctaacatatatatgactgtaatagtatattgaagagctaaagcttaaaatcatagggtgctatctagttttaaaagatctaatctcacttacttaaaaagaaactatatctatatatctaaactggtcataaatcaatatattaaacaaaaaagagaggggttaacaaccgaaggttatatggtattggtagggagtcagagagcatgacatgagcattaataaaaggtccaaaatagtcaatttgtagaggtaggaaagaacattctaattgcaaaacaaaacaaacacaaaatccaaagggttggatgggtgtaacctaatttccttttctccatcaaaactaaggagaaagtgactatgggtgtggtgaccctagctcatatcgtatagtaaacacctctctaatctctttctctacaactcttcttagctgtatgttaactagtttcactctcctactttccctaaaattcttcacgcgctcccttctatcacagctgattttaaatttataatcccaattattaaatattacttttttcaaaggacaaaagaaaagagttttaaacctcttatttggtaaaacacaaacgataggatagtgatgtgtggctctacgtaggccgttcatgtcagcatcatgcctagcaggagtgggacctagctactaggccgatcaaaatctaaaagaatggttttggtcaacatattgacggctgagatcttgttgtaaagtcaaggagaagcgtgcgtgtactccacgcataatgatttgtacacagtccactctctactttgactcttactttggccaagtttaaaggtcccacgcggttgcacgcgagcgtacctttcaggtcccatgttgacccatgtcctctctctctctgaagctcataagcatgacgtcttaatccaatttttcttttcttcttgttttattttgtggaaaatgttaaaatatgaatagtatacgagagaaatagccaaatttgtatttttgccacgttcaatattaagctatttttattaatactattattatgtaaatgtaagttatataaatgtctaagtaatcaaaatttgtgtgtgaaatttttgaagtagtactacatgcctcaataattaaaatcggcaaataatattgtttatgaagatttttagaaattgattataaaataaataagtttaagaaaaaaataaat

SEQ ID NO: 162540 - DNA, 4195 bp, Cannabis sativa
tgtgtttaattgcaatctgaactacatatggcaaatttcgtatttaatatttagcaaactcctgttttcagattatatgtgtcttcagcctgtatatttggtgcgcggcagctgatcctgctgactcaggagtatttaagtcaaaaaagtatctcaagattccagacactgctaagcaatctggacaaaaggactctaaactgggtggtgattcaactccatcactacatgatgccgatgctacaaaagttggggacaaacctctagatgaagatactatgggcaaagatgcaacttccaaagtctcaacaattgataccgagaagaataatacatcaccacaacgttcatcttgtctcttgttggtttgctctccatgtgcttatatatgcggttgctcgggttccagtgaggagtcttctagtctacaaatgagtgaagaaggcatgttctattgcagcttgtgtgaagttgaggtgtgttggacattgattaataaatgaacattattgtttttatttgattgtcaattggatacctcgctaaggtttgttatgtcgataaaccttgaaatgctatgtttgggtttccgaggaaacaatctgtttctttataagtaagaaatgacagtaacctgcagagattgagtccaatttcattagctcatattttcacttcattgtaggtgtacaagtacagtaaacactgcagagtttgtgacaaatgtgttgaccgctttgatcatcactgcagggtataattccatttctttgttttcagtttcttcaaattgttttttctgtgctaattctcctgacataaatgcatctgtgcttcttgtagtggcttaacaactgcatagggaagaaaaactacaggcaatttttcactctcatggtttccgctcttctattggtaagcatgagcctttgttcttgtcttgctaaacttcacattgtcactcaaacccttgaccgtctaccaatcccatagatctcagtcttatggaaactaaatgataggcactaaatccactgctcactgcctatacagtattcagttatttgtcttgtcattcgcaatttgatagcagtgcttaattacccttaggtaacttgttcgtagagcttaacatcactacccttgcgaataggaaaagtttgacttgcagttgcactccctacactgcttatttcacgtacagtgctcaactcagtgtttgtcacaactagtttgttttagtaacatggatttgacctttccattgacccagcccaattttcagcctagggagaaaagtgaaaagtgacttttaatgagtacttcgctaaatgatggccatacacaatttaattgttataacaagtttgtgacaaatattctgaattgcggacaaattttgtggtgctccaactttttttaaaagttctccatccattttctctctgataacagggcgtccttcccatcatcttaagaaataatccttagatgaactgcactatacctatttggctttgtgaaagattctgaaattgtacctatattttctcacaagattctctgaggaaatcaaatctttttcctttaagattttggcttccttgacttcttagtcaatgcctttcatggaacacctaagtatagacttgtcccttatctattatggtttgccattttccctttttgctgccgtaagtccttcaggctctcagccagtatctggagatcacctcagagtaagcattttattttcattttcattttcattttaattgattattgacaggtctgtacatggtttgtgcaccttgggcttgagattgcagcttattctacaatggacaactggactccttgtgcttatctgctgctttcttgagaggaaacaattctctgtggaaatcgcaaccaagttgggaagcagtttctctatggcgccatttgttattgttgtggtgagtactattggcatgaattattctaatttagctgttagtatttagtttagttcagatcaaccttgttgactcagcagtgggactctagactatttcatgtaatgttttttcacatagcttccatcataattttaatacatttaattgaatgtacaggcactctgcaccctcttggcaatgattgcaaccctaccgcttgcacaacttttctttttccacatccttttgattaagaaggtgagctccacagttatttcgtatccctgatcatattctgattttcttgctgtagaggttcaattatattcaattttttttatgttctggtatttgatgtagggaataagcacgtatgattacatcatagctttgagggagcaggagcaagagcaaaatggagtcggagggcagcatagtccccaaatgtctcctgctagctcacttactggattaagcagtgcaagctctttcactacatttcaccggggtgcctggtgcaccccgccacgtctgtttcttgaagatcaggtaatcttgacaaaataatgattttccaaatttctgatatatgttaaggtagctttttgtgattcattgctttttctgatagagttggtattttttaagttcaaaattacctacttttgttgaatttgttcctttcagcctataatagaaagagcttaaccacattgctttgtttgtttactatctgttatttgttttccttccatcagtttgatgttgtgccaccagagactggctctgttagttcgttaggaaaaaaggctgcaggagaggaaacaattaaaaagaaaaatcctgcagcggtgaagatcagtccatggactcttgcaagattaaatgcagaagagatttcaaaggctgcagcagaagcaaggaaaaagtccaaaatcttgcaacctgtgatgagaagtgatgcttcttatggcctagaagctggcagtagctttggcagcagtggtcgtcgaatggttccaaggcctgacaataacagaaggcgcactaataagcgggtgcgacttccagcagagctgcctatggaaccgcttactaagatttcagctatacctgttaccaaaggctacgctgacacatcatctagtttggctcctcttcagcttgaagcacgaagtgctttccagacaagccatgctatgacaagttcagtaggacttgttgcttcttctcctgagagtagtttagattcccctgacatccacccttttcgagtatcctcatcagggccagaagaggcaaggcagctcacaggactgtctgctactggtatagcagcccagaatggattccctttgtcaagatccacaagtgatggttatgaagcatcgggcggggaagacagtgatcgggttcctactagatttgtacaaaggtcaacaaactggagtaatgttttatttaattctgatgcagatgaaagattatttaaactgcaagcatcatcttctggcctgtctgaccatagaaagctatgatcagttgtgattttagtgaaggtttaggtcatttggattcttatccgaagaggaattgttccacttccagtattctttcatttgtgggccgaggtaaattggttgtgagacaggttttgagatggacaagacaggagaaggggtctgtatagtgttttaagagttggattttaactgagtgacacatacttttgtaatttgtttaagtttcattgcagccattctgattatatgggttttcacagattgacccaactgcaaagtttgctgcagtatattgctaaaattgccttctctgcaggcttttgtgaagaaaggacttggtgtggtttcctttctttcagatctgggaagacaattcgtttgtgctggccatggttttacacttttccaatcaatggcaagttggaactaaattacatgtatttgaatcgtaagtaggaacgaacaatttagtcaatactttgatgatgtgtggtacttgagttgatgatttgagtcaaggtgaacatgtcaatttatttgagttggaggttgtatggaatgataatctcttctataaaatcaaatttcttgtcccaaatcttataataaacaaaataggaataaatatacttgtaataagaagaatatgtttctctaagcatgcagttgattttggcattcagaatcaataaataaatatttttttaaaattgtgttataatattacaaaaa

SEQ ID NO: 162541 - DNA, 2283 bp, Cannabis sativa
  modified_base (2248)..(2258): a, c, t, g, unknown or other
tgacaatgttgccttccttgaagccgacgacggttacgggaacgaccttgccgtcggactcgaagaaactcatcatgcctagcttggtggccattaatccgatgccggcctcgacgctcatggtgaattttgacgaggacggtgtcgttttgaggtggagtttgggaggaggaccgaggaaggaggagcgcagagtgaaattgggtttgggtttgttgaacagggttccgactgagaaggaaatggtggaggacatagttgttgacattttcttcttcttcttcttctttgttatgactccaaacaaagactcagctcaccagagcataacattcactctcctgatttccttttcttatcctatttctcttcttcttcttctctcttctctatctctattttgtggattttgggcctcaccaaagcccaatatcctttcaatctgggcttatatgttaataggatttggatttttacaaaaatactggattttagacaaaagtttataattttactactacgcagaaacttttacaaaaatactatcttttttataaaacaactgtaaaacactaaatagaataattaaaaataaatagatgaaacttaacataatacacagtatttttttaaaaaaaaaaaagaaaaaaaaatggaaaatttcagtgtggtgtaaaagtccctaaattttgaggtttgaaaaaaaaaattgcataaaaaagaaaagaaaaagtaagaaaagaatttgaatggtcttttaaataatgagtattttgcgacgtaaatacttaagtttaacttacggttggataaatacttaagtttaatttttaatagtaacaatatttaagttatattctagaacatgaccgttaagtgtcaagtcattattcacgtgtcattttttattgatatatttatataacttttaaataaaaaataaaaatttaatgatctagaccaattgaaaacatctacgtggcaatttatttaacatttaacggataggtacctacagaagttttagaattataaccacaaaaaattaaacttaattatttatttacaaccagaaattaaacttaaatatttatactataaattatttttaaataaatactaaaacttgtatataaattccacaaatcaaaacaaaatacacacatagcagcagcttataattaaaaaataatttagaagtgtttcgagtaaaagaaaaattagaaaatattttttttatttatttaaatatttttttccatagatttatatactatgtactatgtagctcctagagttggctagagttccattgtttgcctcaattatgtaattttaaagtcgttatttggtagtgttagttttgtagtcgagataacttgtaaagattcacatcgtgaccggagaattaatattgaaaatggtaattgacaaatggagggagtggtagaggcatgcgatacgacacgataatacgtttaataaatatatcgtgtcacacatttaaatttaatacgctttatataaacatgttagacaatacgaaattgacatcgttaatataattatatataagaacacaaacaatactatagtttttcacttcacataatataaaaaataaaaaactatttaaattattttatgcaagctataattgtgttatttttggattaagcctcttaattcaaaaatgacacgtttgataagcgtattaaacgtcaacacaatttatgtgtcatctaattttattttttgtgttacttccaaaatatgtcattgtatcacgaattaccaaccctaatgtattctcagcatttttaattgtctattgtttgtttattttcggaaaagttaattgattacccatcttaagaaagaaaatttactattagaggagaatttaatcccccaatattgtcattttggcatataaaattaaagattgtacacactaattacccaatgatatgtattaaatattagccaaggactacattacttttaattgtatagttaaagttaattacaaatgtgtcggaatcattattcaaaataaatgaataatactagatacacattcaaattgttacgccctattcgcattgctacgcttagggatgttcactaagtatctgatccaatccaattcaatccacaaaatgtggatatccgcatttgcgcagattggattgggttgaaaaatttaaaattcgtacttgtgcttgtgcggattggatgttgtttnnnnnnnnnnngtaaccgatccaatccaatccgcac

SEQ ID NO: 162542 - DNA, 6049 bp, Cannabis sativa
aaaaaaaaaaaaaaaaagcaccttagactagacacaaatttgttttggtgaagtaggtattctttcaaaaacaaagacatagagccaacaactttgcctattattgatggacataatgaattgtttatcttccactagtcaacgctaaagacataaagccaacaacaagaggtaataaactgagctaaacaaagctgcatcattttcacctaaataggctgcattaaatatttaaacttacttgaggataaagatcacatgttcccaactccttgacagccaaaggcaatcgttctccatctgcaacctgagtagtaaaatagaagcattggttataaaaaaaaatattaagctaaatcaaacaaaaacttgatttattcttttaatacaaaataaataaagaaaggggctgagtctcagatagttttgagcaagcaggatgatcaaacctcagtattcccaacacttttgatattcacaatttgaacttcattatgcttggcccaaattatttttcccccattgtccatgctggcaactggttcttctcgaccaattttaaccatgattgctccctcatcgtacccaaatacaatcctaccaaagcagtaattatttgttaaaaagaaagaaagaaaaacggagcacaattaagaagtcaaaaatcaaataaagaaagagtgcttacaaaaaatcaataaaagaaatatataatcagcatacagtttcaacatgataaaacatcagatgatgcagttcaatttatcttccttcacatgttggattcagaaatttgttgtaaaattctccagaagaattacttatacaataaatcaaaagctgacaactcaccgtcgtgagcctttcatataaccaatagcccaaactcgttcaagcccataattcagcgtgttctcaagcctgcaattcaaatcataatacaaatcaaaagctataaaaaaaagtaactaataagatatatacgtcttagtatgtgctcaaagaaaattaaacgtgaagataaggagaagaaacacatgaaaataaaaagtttcatacattcatactactgagaatgatgattaaataataacagaacagtcatatgtgggatcaatcctaattaatggataagccatttagattacttatcaaaacaatagctaatagttccattaaaataaaaacatcgtacagaattagtcaagtcagaagtttgcaataaaaccatctaataaaattgcataaaacaatgtgagttgagagtgaaattctggatgaaataatgtagacagggcttcatttgaaattaacattttacctgtaagtggttgcatgccatattcgaacagttccatcctcagaaccagtcattattattggaagttcaggatgaaaacaaactgcagaaatattgtgagtgtgtccttcaagtgtctgaacacaacttttagtttgatagtcccatacctgttcccatggactgagattacaattttgccagcctagatatgcatgtaatacatatgctgtatgggaaattctttacttgccttggcagtttgatcatcagaaccactaattagaaatggcttatcaccaccagtaaagtaatcaacgcaatttactcctttcaagtgaccttccaaggtaaaatttggctcaggtgaaccaaggttccagacctggcagggtaattacaatttcaggacaataacttacactgtatagaagaccttcatacatttcatttcaattcattaacctcgaaaatcaaaaatccatttttaccttaattgtgcgatctagggaggcacttgcaaatgtattagtgtctttaggattaaaagtaatttgcattacatagtgattatgcccctcaaatatttgattacacatccaccctctctcccaatcccagagtttgataagcatgtcatcagatgatgatagaacatatggaagtgttgggtggacagccacgcatctaatatagtctgcatgtgcttcaaaaagcttaaccttgtccattgtattgtaattgtatacacgaatagacatgtcatcagctccagcaactatccactgcttgcgtgctataaatttagctgacctaactgcatggagaaggaatctcattgtcaaataggttaccataaggagaacaaggtaataggcaaggcatacatacacaatgagtacctgggagctcagaaacttcaaaagatgttaccatggtctgaagagaattaggagtgtttcagtcagcactaacaaaaatgtcgttctcataaagcatgcatctatagtcttaaaagttttaaactattatcccaaaaaaaagaatcaattggtaaacaataatgaagataatataaacaggtttgctgtgcattataacaaatcctagcaattggctgactccaccatcttctaattaactctgatcttataatggctaaaacacgctactttggtgttagcagtccttgtgataaatcaaaatcgatacagcagcaacaccatcctctgtgagagattatattgatttcataacaacatcaagtacaagcactttctttgtaagctaatttaatcttttgggagtgaattctacctaagtgtggttgtaaaaatggaatcgcaaccgtcagttctaaaataggtgcattgtgaacatcctacattaattaatggtagtctataaacacttaggaaccaggttagtcttttggaagtgagctcaacggaagtgcatgtaacaaggtgcaagcacttttcaatagctccaggaatgcatgcatccaaattaaacaactatttaaccgaattttactattttttgggtgcagtatcttttaaaattccaccaaaaaaaaaaacaatgtttgaataccattaattgttacatctgatgaacttttttcaaagttttccattgtattccaaaaataaaatctaccaatgttggcaataaacctattaaactcataactatttttttaattgcaaatcatatatctcaacatatgcatgttaccttctcatatattagtgagaaatcttcatatccccattttaataatctaattctaaaggaaaatagctctacccagctaaaaacaaatatttaaccttactttatgcaaaagtgctcaaccctattgtattagttgtttgcataaatatccacaattataaatatcgatcattctaagatactcttatatatcatacatcctcatagaaaatataatcattgagagttccctacatttatctcagttggtgattcagatcttaatgaccaccaatacaagttttaaaaaaaatggaataataaatattaacgcactaaacacaataatagcagcagaataaacaatgcaacaaaataaagttacattgttgtcagaatcagcagtatatgattccaaacaaatccatgtagagatatttttacacttatcttccccttggaagctggtaacttgaacatatatagtgcagtatagtttctccataatactttcttatagatattcaaatagtttattcacactaggcagctaggatttggaggattaaagccgctaacctgtgattggtagttccaaatgtacacagttcctgaatacaaacttgcaagaagcctgcaaaaaggtgtaaaacataaggtgtggcacttgtgattactatacaattaatgatcagaaggggggaaaatgcaatatatattgtatctacaaattataataataaatttgtaattcatagtgttaaagagactgaggtccaagtgaaaagcaacaaatatagcaaaatatactaaatgtgtgtttgtaagaaaaattcaccatggttcagttggatgcaaatccactgattttactctttcagttctttgtataaactttctctgaacaatagcataaatttgttagtggaatagcacaagccaaaaacatataaagaaataaataaagtacacgccattgtttttgtgaggtttaagctacataccttgatgtccagcctgagaggctgaaaatagcaaaaaaagaaaagaagaaacataataagttcaaattcaaaatttagagaagggaaaaaaaactccatatcacctaatttcaagatataattagtttacaaaaactaaccagctactcaatcgattgattgctaaacaaagtaacgcgaacaaaaaaaaaaaaaaatcaacatcgttctatttcaacaaaacgctaaaattcaaccacaaacacaggtattcatcgcgcgaagtctgctttagtttaaggaagactatgaaaaaaaaaatactcagctactgtaacactgaaaatctcaatccccaaagttcaattgtctttttcatttcccacctttctcggcaacaaaaacactaaaagatcataaaaaacgcaaaaatggaaataaggacatgcatttagcagaagataagttcaaataaagaaacgttaccattttcgggcgttagagatgatagacttaggaaatcgaaataaagaactggtagtagagtgaggacgaagctcgaaaagaaaatcgtggagtgaataatcgagttctctggaaccaaagcaggggccggaaacttagttgggaggtcgctcggctctctctgtggcagtccagtaatcgacgatgaagaaaacgtgtgagacaagacgcaaccaggcaagtcgagtgggtgagagagtgtgttggaatccggttgaggctcggtttgaggcccaattagatatccaattgagattaagaagggtagctaagttgaaaaatgccacttttattaattaattgatcaaatttacctctaattttatatttaattgaaacatactttttttatatgtattgtactcaaaataccctaatataagagagtcacatggagagtatcttgaagtcataggggcaaaattggtacagtgtttaaaaaaagaagtaaaaatgatagaatttaaaaaagaaggtaaaaattaaagagaacaacataaaaagagtatagtgtgtaattttttcgggcgcaaaattgtatatctatttattataatttctatatctattattatattctttaatatatactctcttttacatataatgttcttagtagatccttagttaaatgtaaattatatgttagacttaagtagagaataaaggtatattaaacaactcagtaataaaagtaggtatattataataaaatataatataatagtatttttgattaatagattttaaaaaaaaatcaatttatttcaaaaaggcagttaaatcccataggtcctctatttgaaatcaaggccagtctattttgaaaattaaaaaaaaaaaaaaaaaattgaaagatgttataattacaacgagcaatccaaaatggctaaaagaaaaattaaaccaaaaatatacacatatatttttaaagatggtggttaagatgaggttgattgtaatatcctctacatatatatggtttcactccaattaatagaataagagttacttgctatgatatgagctagggtctatgttgactctgaatcttacttatcttaaattatgatatcaaagtccaatctaagattcgatcttagaccttgatctcaaccctggacctcagccccggttcataccttaaaccctggtatcttgtccttgaaccttggtctcgatcttgacttcacaactcggctcctcgactccaaaccccaatcccaaatcttggcatctaccttggtcctaaccctgaatcccagtgccaattttaactcaaacactaaccttgacctcaattccaaacttatcacaatacaacctaagtttctaaatattataatatgggcttttacatccatttgtttatatattacattacataataatatggttatgtttggtagatgggatatgagtaggggtgttcattggatcgcatccaatgtttttaggcccatccagatccgatctaattatatattggatgttagattttaccattcgatccgatccaatt

SEQ ID NO: 162543 - DNA, 4011 bp, Cannabis sativa
  modified_base (3330)..(3351): a, c, t, g, unknown or other
ccccaaaaaaaaaaagtaaatatgtgagtttagtgatggaattttgacccacagagacaatatccactctgaatggggcgaggattattcgccttaataggtaatggggcgggatggggtgaaattttatatacccaaagcgagtttgaggtaggttcatgagtgatactacccaccccatattcgaccaagatatataatttacaaacttttcatatagttttctaattattacatattaaagttattgactatacttataaatttgactattaatatttcctattttatcgtgtaataatagctttttaataggtagaatgcttatttattttaaaattagtatgttattttttattttcattttaattacattacattattttcttataattattgttattttaatcttaatgggtacccaatggggattctcctatcctgaacccatcagagattaagcgaggtgggggagagaatgggggcataaatggaaaataagaacggggttgggagatgcattacccgcttattacccacctaatttccatccctaatgtgagttggacttttttgcaaaaagcccagaaacagaacaaaaatcaataaacaccttatatactttcgaacaacactaagggaacctttgaagaaaatgaccaaaccatcaacaaaacagagattaacaagtttaaagctcttgcagagaggatgaaatttaaaaccttcattgaaagaagcttgttgcagtcgtctagttagataatccaaatccaacataaatagtaagataggtattggatcacctagtcacaaccctttcttcctttcaaaatatattttttgaatcctaccattcatcatgagaagagtaggaagtccctcgtaaactaatcataatacaattaataaactcgaaggggaaacaaaagccttcattaaatattccataaattccactcaatggtgccataagctttcctcaatcagccttcataatgcaacaaggagaaatattcttcctgttgtaacctttaatgagatcttgaaaaatcaagatattatatgcaatagatctccgctcaataaaagtaccctgattatgactaattaagaaagggagaacttctataagtatggcacaaagcatttttgaaatacatttgtaaaaagtattatagtaagcgataggcctataattaattgcactgctagaactatcaacattagggattaaggagatcataatatcatttaaagaaatgagaatattaccaattttgaagaaatcaagaatagaagcaaagacctttgtaccaatttccttctacatttctttatataatctagaatcatacccatcaagacccagacttttaacaaaatagcgccttcttgacattgcccacagtaaaatcctcaatcataccacattattgatctagatcaagtttgttgccaaggtcaatacatcgagatcaatctttgttatttctgaaatctgactatgcagagaacttttaaagtgatttagatagtgagcaacaatctctttgtatgtgttaaccagcctcccattttatcaataaagaagtgatcatgttatcctccctcctttttttaagactagatgaaaataagaaattttttatcgtcgaattgaagtcaggtaaacttacttctttgctttaaatagttcgcaaacatactggcttgaattttaaactgttcatgagaagtcttttctacctggtgtaaaaaattattattttgatcaacttgcaagtgtaactgagcctcatggtagctagtttttgctaaatagtagccttgctcaacattcccatcaatattcatgttgaacttctttaaatcatgcttgggtcgaagaaatatccccataatttgcttcaaacctgtgctcttcagctctttactccagtcatgctgaacaacaccctgaaactccatatgcttagaccaaaaatttaagaaacataaaggtttaatactatggttccccacttgcatagattttacaatgcaaagacaatgatcagacaccacatcccattgaaaaatttatttagtttgagggaataaatccatacaagtttcattcttaaacacgttgatcaattatagaaaagatcttatcaccattcttatgcttattacaccaagtgaaaaaaaaaactcttaactcttcaacttgtttgcaaagcaaagtgccaaccaattcctaacattaattagctaagaatttgtgatgtttcaaccctaaacacgatccttagtttccaaaatagtattaaaattacccagtaagaattaaggttgatcaaaaacccaataagagccaaggttgatcacaaaaagcaaaattagctaaactctatcataaatcaaccctttccaccacaatgttaaatcatacacaaaagtgacaaaaacctcactcttatggccaaacattctcactttacaatggacatattggatctccacttgaggctccccaagtaggatttggccaaaagtggttcttcgatctccacttgaggctccctaggtgggatttggtcgtcggtgttagtcctaagagaatttgatggtggccttggaggaagagttgaggagttagtttcgagacttgctcctggcacttgggacgcaggaatagtcccgattctaactccattaactggcatgcccctagttgattggccagctgtcaagatttctctgttaacacttgtagaacctgttccaaccatatttctggtaacttccttgagtcatggctctcaatgaaagcaccaaaatattgaatcaaaaatttagactagacttctaagctacacccactcactaaattggcaagaacgaaaaagtttttaaataattataagagagacacattaaatttatagtagtttactccctgtatcacgacagtaatggaactacatcttcataattacgattgaactgtgagacatgacttgataaatcattgaattagctttgaaactcaagttgaatcgtgtcaatcagatcaatattgagtgagttatgactattttactgaaggcaattcatgacccagcgcgcaggttgacatccagcacccaggttgatattccaacactcaagttgacatatgacgtcaacctggacagtgggtaagtgtaaaaattttcaagggatgtactttaagatgcctaagtgatattttgacattatttagcctatatttgtgttatggcaaagctgatcaccagttctcggagatgttgcttttatgcagaaatgagagactcaaaactnnnnnnnnnnnnnnnnnnnnnncatgttggaaatgagaaatgtgaatttgtgaatttcacttctcagaattgaaaactagacgaacggttgaaatggaatcaaaattgaataagcaaaaccaagcgcactaggccatttgtcaacctaggcattaggtacgctattctcaagctcccaggatctcgttttgctacttctaaagtttttgaacttgagaatgaggtctcttaccctgtttttgaccattccaaattcattggtcaaattagatttgtcatttgagcaattgaaggtagcgtcccagaataattgtcatcctgggtgctaggcccagcaccaagtcaacctgggcgttggtccctgtttccaagggcttcagtttatggttttctcctaaatttctcttgaatcttcattatttcttatgacaaaaaaaatgctcggaacactttttggtgaacttgattggaaataggccaggttaacaatatgttaacctgggcactaggtcccaattctggccctccaaaatttttgtttagtccttggaaatagttgaatctcaaatattttctaaaaatggagaagatgctcaaaagagttcttgaaaaaacttcattgaaagtgcccaagttgacaaaatgtcaacctgggtgttgggtctgttgggttttgtgccct

SEQ ID NO: 162544 - DNA, 1822 bp, Cannabis sativa
agagagagagagagagaggtatgatgagtacctaaatcagagaatccccatccaaggacatctatagcccatgtttctaacccagcattttcaagcaatggaagtgcacatctccattccaaacaagagctaaaaaattacaacataatgaatcatgttaagcaagaaactacatcaaaattgtgatttattaattcctttaacattttactaacctgtcaaagcaatgaagcaggaccactggattggcctcattttctttaagtggtttcacacaactactcattatgcaactccttgaatcttcaaattccaactataataattaaatcataatcacttcagttcaaattttcaaatgatatcaacggttagtattttattattttctagatatgaagatctaacaacaacaacaacaacaacaacaacaacaacaacagtactccaaaatctgacattgacaaataaaaaatgattttgggctgtcagtagtacttttgtttttatccaaaattgtctaaactttctcccttgtctgtttttttttggatccaacattattataaatacatttttgagttacacaagctaggattcgatctcagtactccctattgccactgagctagactcaagtggttggctcccttaagtgtataaacacgaatttggaatataaaattaaacaatgagggagaaatgtacaagtacaagtcacataatgacattacttatctcaaaaagatttgcaaattttaagaccaaaaatcaaaatgcatgtagctacctgaacaggaagcctttggatcctccgagctagggctctagcatatgggtctttgataagagatacctcttttgggagaaaagaaggaaacccattacagccgccaatgccagtattcatgagacccttaaagcttttacatttatttgatataatcacagacataaatgtttgtgagggtacagaacaaacccaattgaaactcattttttctctttttttttttttgttttgactctgaaaaatgactaacttaaaagggtgcttttatagagaagagaaggggtataatacggtacagtcagtggtcaccaccactggtaaccgatgctagcgctattgtagtttttcgcatactgaaacatgtggcagtattcatcttttttttaagagcactcccctatattttaagagcactcccctcactttctcagctatattttttctttaatgagatttgacggtagtgtcgtatcactattggtattagtgcaaaagcattgtaattagatattttaaagtgttcaaaatatcataacttataaagcaaagtctattctaaaaaacaaaaatttctaaattataatataaatttgtcacaataaataaaaaataatttaaatttaaatcataatataacatgatttaaaatatacatcacataaatgttatgcttttatatttattattatattatttttaatattttattattaaattttaattaacatgctcttttgcatttaaataatttatatttgtattattattattttataaattattatatgagcattaaatgatatactaaattttttattaaaatttgtaatagaataattacataaaacactaattttatatataaaaaaaaaatacattcaaaggtttttttttatatttttacagtattctataaaattacaagaaaaccacataaaagtatcaagaaaacaacaacaaaacaacataaaaaataatatacaaataacaaaaaatcagtaacaaaataacaataatacaacataaaaa

SEQ ID NO: 162545 - DNA, 2743 bp, Cannabis sativa
gccatggagctcagctagtttgagatccattatcaatgaagagtctcaattaaagggcatgccctagcagacctcattgtggattgtactggaataaaaaatgatctggaagaaccagttcaaggactagaaatctagaaagtttattttgacgaagcatcgaaggaaaaaagggttcagagatggaataattttaatctctccgcaagggcatcaactccagagtgcccttcaattcaaattcactacttccaacaacaaagaagaacatgaagcaatgattggaggcttaaacttggccaaaaaacttagagctcacaatgttaaaatttatggtgattctcagctactagtaaatcaaatatctagaaattattaggaaaagggtgagaaaatagatgcttacatctccaaatatagagagcttctctagaattttaaaagatataccgtgaaacaatttcccagctaccacaataggctcctgtatatgttacaaagctagcaccaaatccaaagattgaatagtacaaagaagttcccatcggtcacctaactgctccaagcacataatcactgtgggtaagtgtcattgatcattctacttcctggataggcgctatatacaaatttttaagctctagagatcttctagatgacagtgcgacaactagaaaggttcaagaccgagctccaagatatgtgattctagatggaagattataccgaagagcgttatcactaccttatctgaaatgcataggtgtgatagaaattagtgccactattcacaaaattcacgaaggtttttatagagaccacacatctggacctagtttgtctaggaagatcatacggaagggatacttctagctggtaatgaaaaaagactatattaagtatgtccaaaagtgtgaacaatgttagtgttgtgctaaagtcccaaaggctccaccaatagaaataaccgtaatgggcaatccatagccattttttatttgggggattgatttagtgggctctcttccaaatgagaaaggaggagtaaaatacaccataatttttgttggctactttactaagtgggttgaggagaaccaatgaacacagtcacctgaaagaaggccttagacttcatcatcaaaagcatagtgtgtcattatggccttccatacaagatcgtattagacaatggaaagaaattcgacagtgatcatttcacaaatttatatgccaagcatggaatcataaaatctcctcaactatggtaagacctcaagaaaatgtacaagtggaagtcatcaaaaaattccttaagaccacattgaaaagaatttacaagcctggaaggctcattggccagaagaacttccaagaattctttgggcataccaaacaatagaaagaacttcaacgtggcatactccatatgcaatggcttatggctgtgaagttgtcattctagtggaaaaatattataccttctcattggcgtgaaatttacggccccacccagaaccatgccttactttaggaatcattagattgaattgaagagctctgagagaaatcacaagtccagctaaagatgtagcaagaaaaaatttcctgacactttaattcaaaggttaaaaggcagaggtttggagttggagatcttggcctgagaagagtatttactgcatctcaggaacacgaagtaggggtccttgcacctaacttagattggtcatacttaatacagcacaaggtgtgtaatggaacataccagatctgaaattttgtgaacttggaatgcaaaccacatgtgctaatattatcagtaaactaaaggtggccgaatctaattttactttaagcattttattttctcttttcttttatgtacaccttagagaaaaatcacttaaataaaaaatccaagaatattcaagaaaaattaaagtcttttaatttttagaggtgttataacatgtgaccaggcttctcttttatgaagcatggacaatgtgtaacagcatggtgatttcgtggatcctacactctgtttcgagttccattgcagaaagtatcatgtacatggaagatgcctcctgtatttggtctgaattccaggaaacattctagcaaaagaatgctccaagaatctatgaggtcaaaaggttgatgcagatgtgaactcaggggtctaatggtgtcacttcttactatattcaactcaaaggactttgggatctcttgcaagaatatagaccacaaactgtttgctcttgtggtgctatgaaattatttagggatatcaagatgaagacaaatttcttaagttcctaatttgattgaatgaatcttattccagtacaagatcccaaatccttctccaagatcctcttccctatgttaacaatgcctattcttctgttattcaagaagaaagacaaagaggtatcactaatcatcgatctaaaatttataaatcttctaatgataatctaggtcagtttgctgggaatgttcaagccaaccgtgggggaaatgctcaaaaaaatggaaaacccacatgttctcattgtggaatttctagacatactacgaccaagtgctacagaattcatggataccccccttagcaccgtttgcatgggaaggttcctagagatcttcctaataaaccaggtgtgacagtcagtagtcccgtgatccgtaaggggaaatatcaggtaagctgtgcaatcccacaacgcct

SEQ ID NO: 162546 - DNA, 2790 bp, Cannabis sativa
  modified_base (2552)..(2566): a, c, t, g, unknown or other
  modified_base (2620)..(2633): a, c, t, g, unknown or other
actaagcggtctttacacatggtcagaccaaaccttttgttagagctgaagtggaagtggcgctgcaacaaatgggaccggataaaagttcgagaattgatagaatatctgcagcatctattagcaaaatgggaatattgtcactgatttagtcaccaaggcagtgttgggagttctcaatgatggcactgaccccacaggtttgaatggaaccatcatcacactcattctaaaaattaaaaagcctcaaaccatgaaagactattgaccattttacccttctaattatctattgactcattttgtaccattaattcaatgtgaacaattaatctataacttatgatagatttggatccaactgttagcactcccataattaacattataagagaactaatattcaaactgctaggaaatattggatttcactattgtatagcatgttccaagccactcttgttattaagttcccaaaacagaagttataataattatcttctttgagaaaatttaacgagtgaatcaaagaactcaatggacaaatatagaagttcatgtatactcacgattcaagttgatccattaatgatcatcgttgtgatatgaataactctttcatggtaaatgacatgctaatgaaagatgtttattacatatcggtctagttatgcataatctaattttgcacaatacatttactatatgtctatccacatatgtgatctaaatcaaaatcacatacacttgaagtatagtgtatagtaaatcgtacttagcaatttcatataaaaaattctcattactttaatatactactaacttgttttattcatatcatataatcttatttttcttacacgtccttacaagattatacatttcccatatgaataaggaattttcagatatttaataattatattattatgattattgtatcatttatcgtataattatatatattctctaatattatattcattaattactttcttttagggcataaaaacatcgtttagggtagggaatttcttttgaaaggtttatgatgaaatattagtgaagggagattagttcattgtgcacttgatctctggatacctggccatgattctttccttctgattcaatatttaggacctatggatggggttttggcaaacttgataatagatgatcgacaatggaatgttccactgctgcaacaatgattttcctagattgatatggatcgaatcctgatcttgcctttgcatttttttttttgaaatgatgatacacttatttggcatcatcacacctcaggtgtttacacagtccaatcaggataccatttggccacttctattgaagaagctcatgaaagttcatgctccacctcaccctcttcttggtggaaatatttttggtctctaaagctaccacaaaagctaaaaaaattgcttggtgagtttttcatgacgctttaacagtggctacatctttagtcaggtaaaaaatcatcatcgactctacttgctcgatctgtaaacaagcttgggaatccattgaacatgcactctttggatgcaagtacgcacgatcagtatggggcattacacatctgagttttgattggagtaagtcgtccactatgcataagggtgattatttggtgcatctctcaacaatttacaccaaagaagagatagaaaaaattatttgtatgctttggtcaatttggtcagaacgaaatcgtattatccatgagaataaagccaagccaactccagttcttacttcttttgtggttacatatttgtagaattttagagctgtaaaaattaaataccacccgacggtttgtgcaaccccaaatctctcccaactgatcgttgttcaagaaccatggaaaccgccaactgaaggtgatttcaagttgaacgtggatgctgctctcaatgttagccaaaaattcataagcattggggctattatttgggacacacatgaccaggttattactgctttctcaaggccattaattggaaccttggcatctcatgaaacagaggctaaaactattttttcatagtctaaattaggtccttcagatgcaactgccaattgcacaagtggaaattgacgcatcgatggtttcaaatgctttgagagcacctttgtctgcaatttcttcatttaaggatttaattgtagatatttttagttttttttatccttttttcctccagtgaatgtagctcatgtcaaacgttctgccaatatggttgcacatggtttggctaaatttaccttaggggtgaatgaagcttacttttggttagaggatatacccctacctatttactgtaatgaccgctttagtaatttaaattagtgaaggcaattagcactaatttctgttatttttataattgtttatgaatttaattatttgtggaccccaatattagaaatgagcattagagctataatttctcaatttcagaaattttatttaactctaggggtattatttaacttatatgtgaaatatattatttttgtannnnnnnnnnnnnnncaacggaaaatgcgatggagggctagttttatcacatgggtaagtttagaaccnnnnnnnnnnnnnnaaacattttagagaaaataaaatatcggggttgagcggggttacggaatttgactattatacccctagttttggaaaatgcctaagttataacttggagggcattttagtcttttgtttaaaggagagtaggtggctgcctaattagatgacaccta

SEQ ID NO: 162547 - DNA, 4970 bp, Cannabis sativa
  modified_base (3534)..(3545): a, c, t, g, unknown or other
cctggtaaaataatttcccacatgtaacccttcaacaaatcttaaaaaatcatgatattatgggccaaaagtctatttttaataaacacaccttgattactatcgactatagaagggagcacttctgacagtctagaacagatcatctttgagatgcatttatagactgtattacagcaggcaataggtctataatctttagcagaggaaggattaatcaccttttgaattaaagatatgactgtcttattcaggtcattaggaagtcggccactagcaaagaagtctaacaccgcagtggagacatcgtcactaattttgctctaaagacccttataaaagcctgaaccgaagactagggctctttgtagtatgaatactgaagagggccttcttgacatctcccttagtgaaaggccttatcaaattcacttgttgttccaagtacaaacaattaccaaactttatacaagcctcatcaatagtactactcccagtgctcttgctacccatagaggtttcaaaatgcttgacaaagtgattaactacttcctcaaaatcgtccacaattgtgtcccccgtagtgaaagtagtaatttcgttttccagtcttcttttcctcattactacatgaaagtagctcaaattctcatcactaaacttgatccaattgaccttgctttgctgactaagaacctcagccattctttcttttgctgtcacaaaaacctactgtttctctttgacctattgatgtaacacaacatcagtcgagttcaaggctgcttcttcttgcacattgcaatacatatcctttaccttcctataatcaattgcaacatcccccacttcatgcctactaaacacttttagcgcatgtttgactctatacatcctctgcattagactttcaagcccagtaccagtcacttttttattctagcagtccatcactctctgttcaaagccatggtaagttggccaatggttaccaaatctgaagggttttatccctacattatcgtgcacctgattccggattaaacaaaagcagtgatcagaaatgacctcccatttaaaacaagcatcaaaattcaaaaaatcattcaaccatatattgttcataaagactctatctagcttggaaaatattctatccccaacttcatgcttgtttgtccaagtgaaaaaggatctcgagctttaaaactcgtcaacttgacccaatgcgagctaagcttgagcatccacaatatctctattttggataggccttcctccccatctgtcttgaaagctaaacatggcattaaagtctccaaaaatcacccaaggctctttttgactacctagactcgctagtttatcccaaagatccttgtgagcctccatcatattgttaccatacactgtcgtaactaagaaactctttttttgcccacaaaccttcaccttacaatgcaccagctgtgaagattcattaagaatttccacttacacaaatttatcctgccaaactaacaatattcttccagagattacactactagaataagcattccaattaggaaagttatttaaaataatatcttgaactttttcatgtttcacttttgtctcaaacaaagcaccaaaacaaattttattcatcctacacacatcaagaatcgctttttgcttttttttttattcatgcctcccgcgttccaccctatcatattacttacttccatcaagagttaactttgtattgggagccataacatcatcagctgttgtagcttgtagtacaacatatccattgctagaattaacctcatttggagcttctttagtcactttaacctcattttatctcatagcttttttcttgagagtgatccatttactaccagcattgtccttttccaaacccctctctttattcctcttctgaacttcaactttcttttgattagtttctgctgtaggagtgttttctgtcatgcctcctattacatagtgatctttttcctgttcttttggagcctcattacctgccatcgatttcttcttccacacaactttcttcttcttgttacatttcactactgaatgccccaaacctgtacaaactacacatttagttgggagccattcatactctatcccttgttccaccaattgctttttatcattgataaatgaaattgtttttggcggttcatctgagatctcaatgtccactagaacacgggaaaatttcaccatagatctttcttgagtcaccttgtcaatcatatttggcttgccaattatgctaactaaggcactaagattgttcttttcccaatattgcagccctaccctattcaatctaatccatacaggaactgaagctgtgcagaagatggttagttttttttaattattttttattcttttgtttttttttttattttagtgttgttttacggttgttttccataatttatttttttttggcgttagtttcactgttattgctccatctcgctaaaattaatgattattttctgggtgttctcgtggtgctgtggtggttctatccttgagtgtggaagatggaggctataaaatacatttattcttccttctctatggttattttgtaattttttattctggttctccttaaaatacatttgacgagctcactagaaaaaaagttttgagtttgtagttcttttatgtttttctaagttcttatatttacttatagttttatatttatttttgcgttgttttagtagtttttttgttctgattttttaaaattaggcttgcaaatataactgctattgcatttggtattgagactgtgcaaaacattgttagtttttttttaatccttttttcatttcttttgtttaatttattttagtattgttttacaattgttttgccattattatttatttaaagtcgatttcactatttttttctcaatatcactgaaattaatggttattttctgattgatctggtattcttgtggtggctctgtccgtgggtgtggaagatggaggcctcatttttttgtgtgtttacagtataaaagtaaaaaaaaatatccaagacagttaaaagttatttctgcagtatggcagtatttttgtaaagattgggccaaaagttagtatttttgtaagttttccatcaattatggtgtaactttcaaaaattaatttgagccatttgattgaatcaaaagctataaattacaattcatattgataggtaaaatacataacccctacatatataaagctataaaatatggttatgtaataaaattaaaaatatggttatgtaatagaatttttaatttcacgatattttttgattttttatgttaactttaacagaatataatattacttcacataatattctttactaattttatattattattatatatctaaaaataaaaattatgtagatattttatataataaattttaattttattatatatattttaaaataaaaaattatgtaaatattttatannnnnnnnnnnnaatttaaatttaaaatacttaaatattgtaaatatttttacaatatctataatattgtacatataaaataagtatatatgtaattatatttaaatgacacactaatgtaactgcaataattaaaaaaaaatatcaaaatctcaaatctcattttaaaaattaaaaaaaaaaaatatattccctaattaaaaaaattaaatatatattacatttatatataattaaacctaactaaaaaaactaagtatgcatgtatgtattacacataattaatatatatcttactattataaaaaagtgtggtgtttgtgtgataattttaatgacaataatacccttaatatttaaaactatccacttacttatttatatgtttatatctactatgtgaatatatgaccataactggtcgactctcatactcttatatatatatttaagtagatttactcttatatcataaccttatatatcttatttatttattttacttattttttttttatttttataaaaaaagaataatttattatgcatagtgttagttggcttggctatatgctaatatactttcgttcttatttttcggtatagtgtatttttattttgttttactttcataatttttatcacatacaattaattattttcttgctaccacaattattaattattgttatcatttacatctcatctcaatttttatgttttttttgtcatagcttaatatttacagtattttcagaaagaaaacaaatagtgtaaattattttcttactactatgtttttgtcatagcttaatatttacacagtatttttaaaaaagaaaacaaatagtgtaaattatttgtctcactattatatttttcgtcacttgtagcttaatatttacactatttttataagggaaaaaaataaaattagcaaagataactataaagtaactaataatatattttaattattcatttcatatatatttcaattatattattaattattctatttacaaaaaaaaaatatattaattattttactattttaaaaatgtggtgttgggttaataaatttaaaaacatttatacccttctatttagagactattctaccttttataaaactaaatatttatttatttttttaattatgttatacttgctatttataaatcaaactcttagcacttttgtcttattaagagtattaaactcctatcaaaatcattattagactttaatcaatcactttttcttattattttatatttatatatatatatcttttgctaacatatatttatagtatagaagtttattcatattatatatagggaaatttaaaattctatacataatatataaactctaatattatttccctaaatctaaatgttataccataggccatatatgactacatttcct

SEQ ID NO: 162548 - DNA, 2910 bp, Cannabis sativa
gagggtggttatgatgatgttggtggtgttagaaagcagatggctcagattcgtgagcttgtggaactgcctcttagacacccacagctgtttaaatcaattggagttaagccaccaaaaggaattctactgtatggacctcctggatctggtaaaactttaattgcaagagctgttgcaaatgaaactggtgcattctttttctgcattaatggaccagagatcatgtcgaagttggccggagagagtgaaagcaatttgaggaaagcttttgaggaagcagagaagaatgccccatcaattatttttattgatgagattgattccattgctccaaagcgagagaagacacatggagaagttgagaggaggattgtgtcccagctattgacactcatggatggactgaaatctcgtgcacatgtcattgttatgggagctacaaatcgtcccaacagtattgacccggcccttagaaggtttgggagatttgatagggaaatagatattggggttcctgatgaaattggacgtcttgaggtccttcgcattcatacaaagaacatgaagcttgctgaagatgtaattatcagattccttttttgtttcatgctttttttctcattctattcaagcatgttgaaccttttgagctgtttttggacaggtggatttggaaagaatttccaaggacacacatggttatgttggtgctgatcttgctgctctgtgtactgaggctgcacttcagtgcattagagaaaagatggatgttattgacttagaggatgagtcaatagatgctgagatactgaactcaatggctgttacaaatgagcactttgctactgctcttggaacaagcaatccatctgccctccgtgagacggtaattgttttaatgatgtgtttgaagtgaaatgtattctttgatggtacagtataatctgtctcggatgaaatctaatttgaagtttaatgatttaggttgttgaggtgcccaatgttagttgggaggatattggaggtcttgagaatgtcaagagggaacttcaagaggtaattgaatacattgtgatgtattctgtgcttgaagagacttcatatatctgtctgcttacttttccttttatttatgtccatgcagactgtacagtaccctgtggagcatcctgagaaatttgagaagtttggcatgtcgccttctaagggagttcttttctatggtcctcctggatgtggaaagacccttcttgccaaagccatcgccaatgagtgtcaggccaactttatcagtatcaagggtcccgagttgcttactatgtggtttggagagagtgaggctaatgtaagggaaatttttgataaggccagaggatctgcaccatgtgttctgttctttgatgaacttgactcaattgccacccaggtttgatatctctctctctctctgtcttgctctttactttgatggattaaaactgtcatttggaatctatagttagtctgtaactaattctctgtatcctaaaagagaagcgacgatttaacaatttatatttgtaggttgtgcatttgttttttgggattttgttaatattgagctcagtatttgactgcataagttttgcatcctttgctgatgcattgcttttctttttggctacaccatgcagagagggagcagtgttggagacgctggtggtgctgctgatagagttctgaaccagcttcttactgaaatggatggcatgtctgccaagaagactgttttcattattggagccaccaacagaccagacattatagaccctgctcttctacgtcctggccgtcttgatcagttgatttatattccccttccagatgaggaatctcgttttcaaatcttcaagtcctgccttaggaagtctcctgttgccaaagatgttgacctcagtgctcttgccaagtatactcaaggatttagtggtgcagatatcactgaaatctgtcagcgtgcctgcaaatatgccatcagagagaatatcgagaaagtatgataggagaactcttcccagatgcttctatattttcacttattattgatttatgtttcagaattaaccattaaagacttgctcttctgcaggatattgagaaggagaggagaaggaaggataaccctgaggccatggaagaggatgtggatgatgaggtggcagagatcaaggcagctcactttgaggaatcaatgaagtatgcccggcggagtgtcagcgatgctgatatccgcaaataccaggcatttgcgcaaacattgcagcagtcaagagggtttggaactgaattcaggtttgccgaatctggttctgcggctgcaggtgctgacccttttgcaaccactgctggtgcggctgatgaagatgacctttacaattaggcttatctttgatatttgtcctatttatgtttgcaattggattgtaatgatggcaggatgctccatgttgggctcctgtggatgctctctgacttagtttacaaacattttacttataattaaattgaatactgccaaatactctcttgaatatcttcatttttttttgttattgtttttcgttatagagcacactcgatctagcaaaatataaatatttcacctttccttttctagtttacaattacatttttttttttttttttatatttcacttcacatatttaaataatatttttacttgtttaaaatatatatatatatatatttacaatacaaatataataaaatattataatcatccactataacttaagaatattgtagttaagtaatagaattcttgcttcttaatttttaacatgtattaaatcatgcctcttgaatttttttaatcgttaaaaatttcctgaactattaagattatt

SEQ ID NO: 162549 - DNA, 2336 bp, Cannabis sativa
  modified_base (1052)..(1056): a, c, t, g, unknown or other
ttgaatgaaagtgcttataatattaattcttatttcaatgcttgtgtgattattattcagtgtgagaatgggcatacagcttgctctacctgttgcactaaaattaataataaatgtccttcctgctcttttcccatcggatataaccgttgccgagcaattgagaaggttcttgaatctgtaaaaataagatgctcaaacgcttcgtatggttgtaaagaaacagtgagttacaacaagaagaaagagcacgaaacgagttgcacttactctccatgccattgccctattcgtagctgtgacttcatctcttcatccacagagttataccgccacttcagaagtcaacactcaatctctactggcgttcgttcattcgactacaactcgactttttctgtcaccttgttaaattgtgttgatttcgttgttcttcaagaacgaaaggacaatgtcatattcatccttaactcgactttcaaaactttcgggtacatggtctggattagttgtatatggccttgcccatttaagggcttctggtacgaaattctggccaaaaccgatgaaaccactcttcgattagagtctttcacgagctgcaatcagcaacgggttgttactaccggtccatcgtcgggttacctacttattcccatgaatctttttggttgtagaggccaacttgaattggctatatgcattcattcacttcctgttgctgctgtttaaaacttgtttattgtagtgttactgtatgtacatacagaatccttaatctatttattataattagtttcagaatcatagtcatacaactcagttttatttgctgcatgactggaggggtctttcacgtttgtatattaaattgctcgatgtggcactttatgagtggtttgcactcttttggtttttctttttttaagtgtaaaataaaatgtatgtgaaacgggataattagaattacttgtttttgtttgtttatttcttttttctttttgatcaaatgtcaataaccaagtgtgtcgattattattattattattatnnnnnttattattattattattacaatgttactacaatattcacagttatataacaaaagtttaggttataatttttctaaatgtttaaaataataatgttcctacccataagtgaaaagtagtaatgatttatttatatatatatatacatatatctcgttatttttataaatatatattgaaaaatttgtgaaactagtacttttattaggcatatttaagtttaaaattaagagaattattttatatactatatatttttttttaaatttattgttctggtagtttttatataagttgttatgtgaattttgattgtgatataggttgttatgtgtattttgtaaaaatataaaataattgatttgaagtgtaaaagtaataaaaaaaaatttctacattataaaagtagttgacagtttattacaaaatcaagaagaaaaatgaagataagatatttccgggatttctttcttaagaagctcttcttcaagaaattactaatttttttttttaaaatgcttttttgagttaaaatgagaaactcattaaaaataataaaaagaaatgacttctaaaagcctagtaaaccagcttctaagatcttcacaaacaaaaaaaaaaaaaccacattgaagaattaaaatccattaacaaagaataaattaatgtttatatgtagtcaaatttcttcattcacccccaaaaaaatagtcaaattttttctagaattcaaaagaaaaataattatattagtttattgatagaagattactttatattacataacttataaaccaagttaagcttataaatccattttggtgtgtgccactaaaatggcccaacttaagctcatatatgtgacattaggttactctcaaatgaatcttttttgttttttaatatttttctcttatttaacttgcccattctatatacctatatggatagactattatatccttcagaaaatttttaaaaaattaatgagtttcgatagattacaaagtctcacgtaatctcaaaactaaaaaaaaaagtgtcacgtatatatcgagtttacattgtaattctgacataaaacatattttaggggtcataaaaatttatgtatgggtgtttattacgtgagttagatataaaaagagtagaattaaaagtgcttccataaaaaaaaatacttggattaagagattattatcaagttgttagagtctgtttggttagttatcagttagttgagagttagtttgatcaatgtaactaacttctgctgctata

SEQ ID NO: 162550 - DNA, 1451 bp, Cannabis sativa
agtctcctagttagaccaagctcataaatctcatctacctcacataatagctatgcatacacatccactctttacacaccattcttcctacctacctctctttccttcttctcctctctctctcttactctctattcctatttatacattctcactctaaactctctctcatcatttccattaactcattactagaaacacaaaaaaatccccataatcatcatcatcatcatcaatcatgatctccattgctccaccactaaaaacccaaaacaaacaagaaatctcaaccattgatcacaatgatcataaccaagaacacatctttaaatcaaaattaccagaaatacccatctcaaacaacatcccactccactcctacatcttccaaaacctaccggaaaaatcaaaccggccatgtctaatcaccggaacaaccacccaaacaacctactcctattcccaaactcaccacattgccaaaaaaatagccaaaggtttaactaaactaaacataaacaagaatgacgtcatcatgattctcctccccaactgcccagaattcatcttctctttcttcggagcttccatgatcggagcagccataaccaccgcaaacccattttacacatcgccggagattttcaaacaacttcaaatctccaaagcacagcttgtaataacccaaacccaattcgtatcaaagctcattgacttcccagaaaaagtcatcggccgagatttcaccgtcgtcaccgtcgacggagacgaaaacccttcgccggaaaattgcttacctttctctattctcaccggagaagacgaaacagaagaaatctctatcgacccaaatgacccaattgcgattccattctcctccggcacgacggggcttccaaaaggggtggtgctaacccacaagaatttaataacaagcgtagctcaacaagtcgacggcgataatcccaacatgtatttgagatcagacgatgttgtgctctgtgttcttcctctgtttcacatttattcactcaacagtgttttgctctgtgctttgagagttggagcttcggttttgctcgtgccgaaattcgagatcggaactttacttgagttgattcagaagcaccgtgtgacggttgctccggtggttcctccgttggttttgggtttggctaagaatccagtggtgagtgagtttgatttgagctcgattaggatggttctttccggagcggcgccgttgggtatggagcttgaagatgctctccggcgacgagttcctcaggcggttattggacaggtttggacattgctattatttgaatttatttaaaaatagagtaatagataaataataattcggaaacttacaaaaatactgtaattttgattaacttttacaaaaatactgtcacacggaaatctttttaaaaatactgtgtttttat

SEQ ID NO: 162551 - DNA, 3656 bp, Cannabis sativa
  modified_base (3584)..(3588): a, c, t, g, unknown or other
aactttttgttgatcttgtatgaaatgggggatttacaactttgtatttcatctcatgctcttggtgttggagctctacaactatcatcagcattaatgcatggtttcttgtaatcaacattgtaatgaaatgatgattacaattccaatctttacttagtttgcctttaaacttagtaatggcatttcattgtaatgacttacatcactggtatgaactcttatacctcatgaatcttcattacaattatttaaaatgactatcttacttttattttatactttttcttactaaagtgaagataattttataaatttaccgcctatttcaatattcattttaacaataaattaaacataacaattattaattcttattccattacaattaccattctattctaccaaaccaaacaccgatggagccattcagatgttccaatatgtttggggtcagtagtttttcaatgatctcatgatacctgttgtttgtaatatttacacttcatagccttacataaaatttgtgtggctttgtatcagctcagacacaattttagtacggctaattcatatcccatcgtgcattattatttctcatatatgtaatttagaagcgtataacaactattaaaggcttttcttttttgacgatttcacatgttttcccatgtttttttttagtccacatttggtgttaaatgggaaataattcctagaaaaaatcctggaaggagcaagcagatgataagatcaaccaacagtgttgttgatcacaatcaaattgcttataaaaatcttataatttattggcaaatggtttgtctaaagactctaaacagctcttaggagaatgcgttccaagttgaactcaaacagatgaattcatattaggatgacatttgaatggaggtaatgaaatgaaatagaatggaaatgaaataattttatcaattttttttaagcattttaaatctgatttcattctatacttaatacttattctcatttctattttaatgttttcattcctttctaaccataagctacctaagatctgtagtaaaaatatcatggcttcttggcatgcctttggcagaaaacttttagtctcccaagagcatcttcaagacaaggaagctcagcggcgaaagtgattcgaacccagtttttcagcccaacaacaacacctgattatgaacctttatgtcagcacagttacatgttttgaggataatttatgtaatctcacagtaaagataaaatgaatattttttacctggcaggaaaattacagattcctctttggctagcttcagacaaaagtctacatcatcgacaacgttttctagtagtggtaagtttatcttaacctgttaatagctaacactgttagtaatccttaaggtatgaatatagcaaaaatattgtcatacagtatttactatttcctcaccataacagccatggatccttcaggtttttgtggacaagtgaggcacggaattgcctctattgcttcatacaaaaactctgcagcttctctcattatgttcttaatattcaaaaagaattcattgtttgttttctcaagaatctgaggaactgctccctgaaaaacacaagtgatatcagttttcattttcttctgctcaagagacaagaagatagaattgaatcaagtacctgaacgaaggttgcagggtcactggtgatgttcaggcagttgttaatgctctccactatctataaagaagagagtaaagttatatttcatttagtgaaaatgaaattccaatctgttcatcaaagacaaagtccatgattaaaaagttttaagaatcaaagaaaataaacgaaccccagtttttataaggatgccattggggtcgtttgtgacaatccaaccaagtctccaaccaggaacaatccatctctttgatatggagccaagtgtaagaactggaactattgatgcaaactctcccatagccacaaatggattactcccaatcaccaagtgtccataaacctcatcagcaatcaccaaaattccaagcttcctagctgtttcagcaatctacatatacaaaaacttcaagactaataacacatacaacataattaagagtgaaatttcatgatcactacctaacctttttcagatgcttgtatttatagacacttccacaaggattactgggattaattataacaattgctgcagtgttgtcatcagctagagcttcaacagaatcaagatccacttcccaacccttttctggaacaagatcgaaatggcgaacttggagcttttcgtatgcagctctagcttcatattgtgggtagcctggtcttggcagtagaatgttggctcccggctgtgccaaaactgatataacaagttctattgcttgtgtgcaacctgatgtgaggtaaacatcatcttctgataatttgtacgagaggtcacttgagaggtactctgcaatcgctctgtttacatataccaattacacataaatcggatttgattgaaaaatttaaaatataccaattcgacgttgattgaagaaaattatatacattaatactttaatataaaaaattaataattaaaagtttaatacatacaatataaatatatattaaaatttaataaatcaaatatatattttatttttatgtgtaaaagaactataatttaaaacaaaattaatatttatttcaacatataatattttttgaattttttagttgttattttatttattttaatatattattgaagactaaaaattaataatttattttattttgttgttaattaattaaaaaaaatattttttaataaatattaaataatttaatattaaataataaccaattcaaaataaccataataaattcaattagatttgagttatggtgcaaattatattggatctaaaatataaaatctacgcttagtgcgaatgaaatgcactatgaacaaaatagtgaaattagatttagataaacaccataattcaaatttataagttcaacaaacgtgactttcttgggattacacatcatatatattacctaaaacattcacctataattcattttcatcactagatatgtataatatataaatatatttttttactgaataataagaaaaataataatttcttccaagtagttcacataagccttcaaaaataaaaaataaaaagttactagacaacacatctgtaatcaatactagtagtggatctgaaaatgtatggtaaataaacatataataataaagctacctcctggcctgagggacgccaactgtgggagaataagaattgaaattggaagatcggagagcgtcgacggcggcttcgacagcggcgggggtggtctgaaagctgggaaactcagtggggtcaccacggccgagcataatggttgggcgctgatcatttggggtcagatttttccaaagcatgttgagaactcctcggacagagattgcagaggtattgagttgtttgttgccttggaacttccattcatcatcggatgtgttatagtgagatttctcnnnnntagaaactcgagaccagactcctccttgaaggacacgtgtatccagacttccagtgaaggctgaaatg

SEQ ID NO: 162552 - DNA, 1215 bp, Cannabis sativa
attgattgagaaactaaattatgtttgcaggattcccttgagagcaaaaactctgcctgtagtaaattcatcgatcaattaaacaattctctggcggttttgggtgatagattaccagtcgatgccaggtatgtcacctcaataaatttgttggatttgtaaattgaaacatggaataatggttggtattgtgatgttttggcagagtggcttactcaaagatgggtgaggagatatgcagcttactattgtcgggtgttggtgagggcagaacgcgcgatatgcagctaagctgcttcgacacagtgtctaatgctccaatacccgaggaagtccgatctagtcatctgcaggacgcagcctctcttttcacttgctttctttctgagctggctgcaccaacctaacctacactttttgcaaatctttgaatgtttttgctttcatattttgtacacattgagaaagtccaagaggttttttctattgtatattttgctcgagcaacctattattattccaagcatgtagttttctgacttttgagataaattagttctttgctcttaattgattcagtcccttaaaaaatatattgccaaatcaagtcattcaattttataattcgtaagtcattattgattatttttttttttttatagatatattaatattttttttttcgtgtttgatctttgtattaaaaaataaaaaattggaagtacacgtaaataaataaaaaccagttaaaagtaaaaacaagaaagaattaaggggtgaaaagttaaactcggagtcccaaagagatattattattacctggcaaagtcgaaaagtgagtggggtccaccataggctccttccttctttccttccttcctataagaacgaaacagagctcattttaccattctttttgctaccgtacgccgtcctcatcccaaaagtagccaaagagtttattaaaaaaacaagcaaggaggggcgtagtacgcatcccaccaccaccaccaccactgtcgaaatctacaaacaccaccccattacttctctctctctctagaaacttggttaagcttcgaagctcagtcgctgcttctctctctcaatctctctgggtcggttcgctgcgcttgttctgggtcgacgatgaagcggtccggcttgagaaaaacgggtcagaccaattcaacagcttcccttaattcttcggcg

SEQ ID NO: 162553 - DNA, 1919 bp, Cannabis sativa
  modified_base (1867)..(1872): a, c, t, g, unknown or other
agagagagaaataaaataagacagctaaacatattcccttatgataaaagatagaagggaactaaagcttttatctctttgttaattaataaagattcttattcatctggctatgtatctacacaatcaggttttgtttattggtaaacacaacatgtgccatagttttaaataattgaatcccaagttttttcttttcacatttataaattaaaactgagtacattattaaagaacaaaagccagaattcagtacattatagaaccgagctctttaatggctggctgacacagaaaaataattgtccaaaaacaataattatgcattacgacaattcatctgtaataataatgataaaagagcctcgtatcataggcaaagccacttagagcatttcgaatgctaaatttttttgagttacttgtcttgtgagagtaaatggacccaaaccaacataatttgtggctgtgcagtagcaccggttgctggtcaatttttttttcctcttttttaattggctaacataattaaaaaacataacaatggatccagcagatatataactaccatcgttgctttaattggtcttgctcttagagcccaagtagagccatagtcccaccttaaatttagatcagttctaagttatttgaggcctatgcctaagtaaaaaaatttagacctttatacaaaatactattatcctcgaatattgaaaataatattgtttggtgtggtagtaaatcggtaatatattcttagaattcaaggatgtcacattttttatgattattgggatttgaacttagcaattaataatgtaaaatatgattacaataaaattcttttaaacatatttatgtattattttatattttgatatagctaattctataattttatgttgatgttcacataatataaaaataagtattgatgttaggcactatgatttttagtcttcaagcaacgaaacatccgtgtgcaaggctagctttatgttaatttgggctttagacaaaaataaaaaatggggccaatagaaaagtgaagttgttgggatttgaacactaaactctttacatattactctaatcaaattaccgctgagctacgacatatatttagtatattatgagtattattttttaattttttaataactatatcttaactttctttcaaaatgtgggccctgagtggtggggggcctaagacggccgcctccttcgtctcacctcagggccgaccctgcccgtgtgacaccttgacttctctaagctaaggccagccttccaactatccgagtaataattgtttcattttttcgcgtgaccatctgtctcgtgcacactttcgtctcctgaacaaactctcatcgagtcatgcttgcaagcattcatgagtgcattcatgcatcgagactctctagccaagatacatacactatccataggttcttactatgataagataaaatcccaacacacgtcactcacctagtcacactagtgaccaaggtagcatgtgtagccagatgtaaacaccaagctggtgtgccaacatctctagtcatgccccattcgatactgttcgaaaaatttccctcatggcccaaggactcccatacttccatgttccaatcctcacagtacaatgcctccatgcatgtctgcatgcccttaagacaagctcaacgaataactacctgtgtcatctcatgttgagacttggggccaagatgcaccacgtctttcaaaggtttaggtcatgttccatgcaaagcggcatacctaaaatccaatagaaacgtactagcactacagaaaatcttactttttgtcacaacaaaacttgtgactaaannnnnnaaaattgtgactaattattaattagcattcttatgttgtgactaaaa

SEQ ID NO: 162554 - DNA, 2404 bp, Cannabis sativa
atattgttcttgcttatgtgtttagaccaaaacaagaacataaatggttttgtgaattctattaccccacattgatctttgtatgttaaggttgatttggaaggctagtgtggattctacaacttggaaatgattcattatacaaaaagatatcaaggaatcttaatagtcatcaaaaggtaattatattgattatttcctaagtcaatatacaatagatttaagaaacccaaaaaaggttactctattcttttcctatcctaccatatactcttgctcatatgttgagaccaaaagaagaacataaacagttttatgaattctattagttcaatccttgtgtgttgaggctgatttagaagactaaggtgtgagtttctacaacttggaaatgaatcaatatacaaaaagatagagcgaggaatttgatagtggtaacttttttgcctatctatttatcgttttacatttaatatatgtacatatgggggatcattggggtggtaagatgataatcataataaaatatcattgtatgtctaatttagtaccacaaaactctacaatggtcatagtttaggcgagacaaatcctatttattcttaaatttattcaattctattttttattcctataactattcatactcttatttctttgttttcattcctcctaatctaacgtatcttaaagttgaccaagatatgttagcacataaaattaatccttgaaaagggatataatggtgtaatttattttagcacacaaaaaaaaattataatttgctacacttttgggaagacacgtgttaccacctaatttgtgttgaagggtaaacgagaacctactaagttttatatgggaatgtcaaactggacctactatcatggaccaagaatcccttgatacttccataattagcttcctagttaagagttataacactaagatgatgtcttctagatccatttggtcagttctggatgatacaagttatacgggataggaagattatcctctcgaaccactatgatcctgaatcattagatttttgggtgagatagtcttgaatcaaggtgtccgtggactacttgcatctcaagatatccccaacatgcaggtctcaataggaaaaggagaaaagtattgtaacatgtcccctctgtaccaatgaaaaatgagatttctataaagcataataaactttgggacacacacccactattcttatacaaacatttctcatgcgtctataagtgactctacgttcacctatcaccatcaacatccagacatgacatgtcaactgtagctccatttttaatgggtcaacccactgggctagagattaggaacaagataattaattttctgtaaaccctccgttagcaaggtcacaacataaatagtacttttgggcctagttaatccagccattacgtatgactccctacaaaataggaccatttacatactgtgcaaggattcaaatttcagttcttaagtaaaaacattgctgaaattctaaggaacctccattccattgttgtaagtttgaacaattttaatacagtgacttgtaaactatggttgtttcaagacctgaatccgtaaaaccttgtatgtggtgctcttaagacctcttcaatctctataatcttctcatttgttaagttgccaaaaatctcgatcaatagttattattttaattcttatttatatataatagagtacatcatagttaaggtgttcaaaaaatatctcatttaagcaagttcaatctaaccctaccatgtctataaaaagcatgggaggtcgatttacacaaaagaaaaatcatatatgttacaagtaagcatgggaggtcggttgtagaagaaatgaccacaatatcataatggatcgatactttgggaactgacctactacaccctattatctcaacatagtagttcgatatcataattgaatagtgtattagataaatgtaaaaaaaaaaaaaaaaattatatttattgatggcacattataatatttcaaaatatataataaattaattacttataattcaaagaagtaattatatttgataaataagaaaatatatattttaatttattgtgtagtgttattgttgttccaattaagttattattattttaaaaaaaaaaaattgaattgtgcatactaaaactataaatacggatccaattttttttagcataacacgaaataaatacaaacctgagatgtacaatacaaagaaataaaatatgggtacgtgttggacatgacatgatgttgcaaaatgacttagcacattagaataaaaaaacaaaagatttgagcataatatgatacgacaaaaatttgaaattctatacttacaataccctaaaatttt

SEQ ID NO: 162555 - DNA, 4299 bp, Cannabis sativa
ttttgaaatgtattcaattgtgaccgtttctaccttaaaataaattaacaatgaaaaaacagagaagagctgttgttacctgtaaaaagaagagattgtcttcaacaccctttagtgaatctctcacgacaattaatctctccctttcatcgaatgggatctgatctgcaacatcgcagaagcgaccatgctttgagcaaaacctgcaaaatttgatgctctgttcaatctcacagttgagcttatcatgcaaaccacatgctctcttaatgagacaccttaggcctttattcaactccatcaatcgaatgaaaaattgaacagtgcccaccaatcaaaactagctaaataatacatatagtaagctttattgttagtattattatatcctttcaacttgccaaattttccaaccttttttttttcttctatattaattcgttgcttgtggttgaaaggtcaagatattcagaacatgatggaagcttagttgagctgtgcctgtgcctgtgtacaaatcatgttaaccacttttttttcctttcatttttgttggaagaaagctagatttttttattgagaatatggaggcttagctggttcatggtccacagacctatgtgcccaccccgttgccatctcaatgtttcatcatcatatatacatctgtttgtctatctccattatacatacttatattatataactagattcaaaatcaagaaaacatcataatgattactcaacattggtttaggtctcaggtttatagaatcactcactatcggaaaagctaattgagctttacattatatatgcgatacgagcatgaccattcttctttgattacgtttttcctttttttggtcactagtacaataagaatacatcaatatagtaaacgaaatgaatttatgtaacatttttttacaccaagttggcaaaagagtagaggagactcccatgtgtggaaggccatagaaatcattttaagatttagttgtgggaactgggtaggggacaaaatttggacccgacccaccaatggttggtaggctttttctttcaattgaattgagggcccaataaacttcaactcaattttggttcgcaacatatgggacggtcatgaaatgggcctttttggcacaattcaacaacaaagtcttaacaaatcttgcactataataagtagtttgttctgctgcattacaataaggaacattatactgcgtgtcgattggagacataataaatatgataagactaaagttacaaagaaggaatttttgcagacaaatttacaaatcaaaaggggaaaaaaggttcgagcaaagaaagcactaataacggcaggtatttggaatccactagggagcttgtatgtgcaaaacaaacttaacaatatgtgcaaatttggttttaaggaaagaaagaaagaaaaagccttttgctttagaatttagtttaaaactaccaatagtatgtgtttctctttttctcagtcctagttccattcaaatcataccctacaagaaatcattaaaatatttaagatttcatactttctctgctctctggttaatacaagtgggaatgtaatgtccatatacataagagagcttcttcacctataagatagagccattacatcttcatcacaaaaaaaaaaaaaaaaaaaaaaaaaacactttagaagaaaaaaaaagtgaatcatatcagatcagtaaggagtaggacccatcttttgggaccaaaattcattaacattctcgacctaagatttcctaataagctctacctaaacaaatagtaagaaactttttcttttaaaataataataaaaaaaaagtaatcaatgtcacataatgttgtagattttggagcccaccagtgctcaaaattgccgtatctattgaaaatctatttactttgtattacgctggttggtatatataaaatatgcatcacctaccctacctagctatttaaattccccaaaatatatgtcacgcttgtattataagatttttgaataagccatacgttactcagcaaatcatcatttattttgggttatcattttcattacttccttaaaggaatatagtgacccacctcattacacttaaaaaaaattatcataggtccattaagcttgagaatgtgagctaattctcttttttttcttttttcttttttttccagtttttctcttattttgcttttacttattgcggctataccccacgttattcacactagatatggaaattagaacaatatacatatattaaatgatatcatgatttgagctaaagttttggaatgagtttgttaaacaactttcatcatcttttaaaaacgaacccataatcctcgcgcttttcttttccttcggctagcttgtgttttgattattatgtacgtagttataagagaaccatatatatattaaccttcttcttctttggtttaatttttaaatatgccacaattcgtcactgctttctacccaaaattttctttgtgtagctgatgatacccacttacgcactgacataattacatgcatccacaaaaataagtatacgtctcaccacgaaaatttactagttacagaacaatatcatgacattgctataaattaataaagaataatcattctagttcaacactgtacgatgatcaaacgcactacacactagtatattcgtttcttaaacaagtctttattgaatcctaactaagcatatatagctcaaggcgttagacacctctccttcttaactacacactattatatataaggtaattactggggaaggggaccacacccacttgcacttgacttgaaccatggcaaatggcaatgttggcctttaagaaagaaaaaaaacagtaatattgtacgtacgtagggccctttatttagtcagacttacgtatagcatgagtaatgactgtctcgggcgaagctctaatagaagatcaataaaaccataatcaaacgtacccttaattgatattaatagtcctgggtctctcaggtctcatgtccctctctctttcaagtttttttttattattatttttaggaacaagtttcatccactgacctcgtttccaatattaaccactttaaaggccaatataaataagagagagggagagagagaacggtatatagtgtaattaagcaagttgagttcagtgaatcagtggtatcaagccgacaaaatccatcaaattgtaggctacgtgctggtgattcattccctttttatagctataaaatatatataggggtatatgtgtataggcccagacccattgtccagtctaccattcaaaagtaatgtcttgtttattcaaaaaattatccttgaaaaggggttatgcttattggtgcagtagcataaaaatataagtatccgataaccttgatggaatgcaatctaacacaatcaaaatgaattaactaaaaccacaaaagctacctcgatgtccatgcacactgattacattactggggcagtctcagcttaatgctccgtttcccaataaacacccctaaattctaaacaatacaccacaattttttaatagaacttaagaaaaaattatttgaatgattaaaaaattaaaattttaaaaataattaagagatttaaaaaattatttattttttataaaaaattcatttaaatatttaaaaaaaaatattaaaattcaatttttataaaaactaaattttatggaaataaacttagtacattttatttttcataaaaaatataaatttgtttaagtaaacataattttttttcaaaataattttatattgttattgaatttttaattattttattctttatttattaagatatgagtttatagacataaataagtttgattttttttttcaaaaaatattagtttatttaaattatttattagattctcaataatttttatttaattttttaagaaacgtgtttataaataaaataagtttgaaaatattttttcggaatattttaatttttttaggtaaaattaatactttttaattaatttaatattttttttcaggttcttaataatttttattatttttttaaaattaatagaatattataattgcttaaaatagaatattataatttaggggtgttcattggatcacatccaatagatttggacccaatcaatccaatccaattattggatattgaattttatcatctgatccaatccaatcgaattgagtcatctgatccgatccgatccaatgga

SEQ ID NO: 162556 - DNA, 1996 bp, Cannabis sativa
gaagtaagagaggtagtttagcagcttcttcttccggtgttttctctggaagatagattctgactcgaagacccgaattcgggtcggctaggacgtctctagtggctactccgtcgatgtattgctcatgaggtggaacggagtcgaccatgaatttgacctcgggtgggcctgtccatgtacggtcgactgagccatcgtcgtagagtctgagccagccagagacatcttctacgatcttcttctcttgtaccattcctattattgttgtagtaaagtaataattaattaagatatgagtggaggaggaagagtagtgtgatgaagcgaaattggagttggaaagggtggtttttataaaggtataaggagttgaattaggagtaccttctagctagggaaaatgtgttgaagcttcaaatttcacataaggagagaggcctagctaggaagctacacacctttatgatcgttaaggataagtaaagtagggcaagaaaaaacagtgttaagtttatgttgtgtactgtattaagttttcacggttgttttttttattctactgttgttttaattattatgttttgttgttttataaaaagatagtatttttgtaaaaaattccgccgtacagtaaaattataaacttttgcccaacatttattatttttgaaacaaataaatagaaatcacaattactattttaggttgtgttcttgttaaatgataaaatagatttgtgttttctataatggtataaataagactctcatttcaattttggacaattttttttaatataatcgatcaacttgaagacaattcttgatatgaatagatgcagaaaacgtaaccaattttgttatattacttatttattgagttattattaagttttattttaacaataaattaatttaaaatactatttagtactttattttataaaatacaaaataaaatattatagaataatttaaaaattagagagataaacatttgttaataactatcccctaaaaaacagaggtaattaatgcatagaacacaaaagaaataacaagaatcgacactaatttcaactaataaaaaataatataataagactaaacacaataacatcaagagttcctgtgcctttttgacattcttaaattaatatctaataaccttgaatatttaaatttaaaattagaaaatatatgatacaacaaaaaaaaaaaaaaatatgatgaataactgcactaatcttaaaatagtctctaaagttataaaaaagtattcaacaaaacatatttaaagaagacctgatcatcatcaattagaaagttcctaattctaaagaattaatccacgatgaaatttatgaaacacatgtaaggaataagaaaaacaatatcatacttatatatataagtaacattaaaagaaatatatttattgaccttactatatattatactatatattatccattgctaactaattcaatttttattgaattattaattgtactaaaattaaaatgtttttttttttttcttcttcttctttagaatatgaaatttgcatatttattaattttatttattttgatatgtacgtgtattttcctggcattagtgattgatgggaagaggctgcatttcatgaattgtggggaaagtgtatggaacacttttttagggtggagtcgagtcaaagtcatcccccaaacaaacttcaactaaatataccatcgtagacgacatttctttttgaccaaactatatagtaggcacacccagtcccacgtagaagtggacagtcacgcattttaatatagcctaattaaaatttttgtcgctgaactttgatatgcatcaaatcatatttttttgaacttttaaagttattaaaatacctatgaactatgagattgttggatttaaattttttttgtctaatttcattcaattttactatttcggtgattgtttatatactaaatcatact

SEQ ID NO: 162557 - DNA, 4552 bp, Cannabis sativa
agagagagagagagagagatccagctacaaaggaaggaaggaattatatggtcccattgtcccacctaaggaatccacctaaaaagcaacaatagacaccacaatatactatttctatatactatatactattacaatttacaacaatagaataatccattcattcaatacttgtacttatacacgtatcatcatcaacatcataattattatcattattaaactcccaaaagaagacacactcatttattccattgactcatatatgtatatatgtatgtatggtatgtatgttgtatggtatattttcatatataacaatttacttactattattattagtggtgtataatatatatgaaaatggaacacaagattaattccactcacacttgtcacacatcacattataaacttttttaattaataattatgattggtaggctttgatttgatatatatctataaaaatctatataaattactaattaataaattttcaaactttatcccctaataatctaatcaatccaaacctactttgagattcaaaatctaatcattctcatttacatatctaactatttataaaaaaaaaagtaaagactaaagggtagtgtagtgttttgtgtacaaattaaaacacaagaaaagaaaaaagaaaaacataacctttggctgatcaaacggtctgttgttatcgatatttacatgcaaaactttagctttttcttttcataaagttaaagatacatttacatatatctataatacaaaaaactatagaaaacacttaactttggatgctctatataataatatacctataagctcttcaaagttcaaaacttttatttataagagtaacagaactctcttccttccttccttccttctccttcttcttctcataaattttccatgaaacaaacacaaaacaacaacaatgaacattcttcttcttcttcttcttaatcttcttctcttgtctctttgttgttgttcttattcataccaattctctctaagacaacaagcttcaatcttggtatcactaaaacaatcattcaaactatccaattcttatttggatagttggaacttatcaaacacttcttcactttgtttctggccaggaatccaatgtgatgacactaaaaaatatgtcctttcaatcaacatatcaagttccaacatctcaacaactctttccccactcataactctaatcccaactcttcaaaacctctctgtctcagataacaacttcacaggcccttttcccttctcaaaaattcaccatctccctaaccttaaacatctcaacatatcaaacaaccagttcagtggtgaactcaactgggatttctctcaattacaaaaccttgttgttttggatgcttataacaacaacttcaatggctcacttccttatggagtagtcactcaccttccaaacttaacatacttgaactttggagggaactacttttcaggctccattcctagaagttatggcaacatgggcaagctaaagtttctatctttagctggaaatgatctcagtggctccattcccagtgagcttgggaaccttacaagcttagaacagcttttgttgggttactataatgagtttgaaggtgggataccaagtgagcttggtaagcttatcaatctctttcatttggaccttgctagttgtggtttggaaggttcaataccacctgagttggggaaccttgtaaagttggatactttgtttcttcaaaccaatcaactaagtggttctgttccttctcagcttggaaatttaagaaatttgaagtctttagatctttccaacaatggtttgacaggagagatttcagttgagttagtttcaggactaagtgagctgacccttttgaaccttttcatcaacaagtttcatggggagattcctaaagcaattgctgagttgcccaagttggaaattctcaagctttggcagaacaatttcactggtgctatccctcctaagcttggtcaaaatggtaagttgactgaggttgacttatcaaccaacaaactcactggtactgttcctaagtctttgtgttttggaagaaagcttaagattttgattttgctcaacaacttcttgtttggtcctttgcctaatgatcttggtcaatgtgagactttagtgagagtaagaatgggacagaattatttgacaggtactttaccaaatgggtttctttacttgcctaagctttcactattggagctacagaacaattatttgagtggacaactagagacacccaaaaaaaacaaggtactttcttcatcaaaactctcactccttaatctctcaaacaaccgtttatcaggttcaattcccacttctctaattggaaacttgttctcaagtttacaatatgtgttactaagtggaaacagattcagtggtgaaatcccatctgaaattggtcacttgaaaaacacactcttgaaattagacattagtaagaacaaactcactggccaaatcccacaaaccatatcaaattgtgcattgttaacttacttagatttgagccaaaaccaactcacaggtccaatcccacctcagctttctcaaattcacatccttaattacctaaacctctcatggaacaacctaagccaaggccttcctaaagaaattggctccttaaaaagcttaacttcagcagatttctcacacaacaacttgtctggtccaatcccagaaactggtcaatacctcttctttaacacaacatcattcataggcaacccaaacctattcaccaacaaccactcaatgtcctcatcatcatatcacaacaacaacaaccaaaacaacactttggggtctcataacagcagcaacaacaacaacagtgttcctccaaaattcaagctcatatttgctttaggcctattgctgtgttcctttgtgtttgccacttttgcaatcatgaagacaagaaaatcaagaagaggaagagataaagatcatcaccatcatcattatccatggaagctgacagcatttcagaaagtgaactttggaagctcagacatcttggaatgtgtcaaagagaacaatgtgatagggaaaggtggagctggtgttgtgtacaaaggaacattgccaagtggtgagattgttgcagttaagaaattaggagtgttgggatcatgtcatcatgacaatggattagcagctgagattcagacacttggcaagatcagacacagaaacattgttagattacttgctttctgttccaacagagagactaatcttttggtttatgagtacatggagaatgggagcttaggtgaggttcttcatgggaaacaagggaaatttctcaagtgggaaactagacttaagatagccattgaagcagccaaaggtcttagttacttgcaccatgattgctcaccattgattctccatagggatgtcaaatcaaacaacattttgcttaattctgattatgaggcacacgtggcagattttggactcgccaagtttctgagacctgacaacaatgggaatggaacttctgagtgcatgtctgccattgctggctcttatggctacattgctccaggtaccttaaaattaaaaatctcatctttatttcatcgtcatcatcatccattactcattactcattttagtttagtacggaaaactatgctattgctataccatatttcattcatttcttatattttttcacacttttcataacacatagaacatttacaatataatacatatatatctatggagtgatttttatgctgagagtatgcattctgtggtcttcatatataatcattggatcaatattaagttgatctaacggttgaaagtcaaaacacatcaaaccgagcctaaaatacattccacaccctaatcaaattacataaaaatatcacataatgcattgccttttcttttatataaaaaagaaacaaaattatataataaggtgagtttcacttagatcaagagcatgtggtgaacagaaatgcttattcaattatttgacccaagtcagagagaaaaaaaaaaagattgaccatattataattatgttagattggtgtagaatgttagatactttactttgaaccaaagtgaaaaaagaaagaaaagcatgtggtagattccaatattggtaaaaataaaaagaataaaaaagatatataggctccactcactcactcacaaacacaaaagatatcaatgttgcttttactatatatattggggtatgagcttaatttgcttttgcatgtcttgaaagttgaaaccaacacatcaattcatcatcttcttttgcaacaccctataaagaaagaaagtaatttgatttgagttaatagagaaataagggtcttaggtgactagtattcttataagctataatatcctttattagtatatcgggtttcatttattttattttaaaaataattatagaaaatcgttaactaattatgaagttttttttttttt

SEQ ID NO: 162558 - DNA, 3535 bp, Cannabis sativa
tccattagaaagagaggggccccccccccctcttgtattgtcattattctcttcatcagttgtggccttgtcatcaccatattcagcattactttccccattatttcaatcttgttcctctaaagtaagtgcctgaaatgtgttcaccacccttactgcagcagacacctgttgctttccattcatgtccattctcggcccttttacaatcttggtaaaaccatcagcatctgcagtaggaatgttattctttctattgtcattcttcacaatccactgatgcttagcaggaacaacagcttttttacattcctctgcagaatgtccaactccagaacagtgggaacaagtaatcggcctccattcgtatttgacacaaattgaggtattaaaatcatattcattttcaaattcaatcaagttcgggagttgttggtccatttgcacttcaattagcactctaacatagctcagcctctccctatctttagtgatagcatcctccataagaggcttgccaatttgcccaacaatcttaaaaagagacctttggccccaatatttcaattcaagatcctcaagttgcacccaaattgctacacacttgacatcctctttcttgaaattagtattagggtcccaaggtttcaatattacaggtctgcgattgaagaaaacataacccccattcatgacctgatccctgaattcaagagaggtaaaccgaataatgaagattccatgagacaaaacctttactcgatcgaccttatcaagcaatatcctttttgcaaatccttcaagaacgtgcaatggtggatttactccaagaacatagcacacaattaaaggattccaaaacagaatctcttcttcaatatcatctagggtgattttcactttcccagagtcccgctccacatctttaaacgaattttccagatatatatacatgattattctaataaaaattaatgatatatacatatgaaaaagtctatggtgcactcctttgtgcttttgatatttggatgattttaattttaattttttgagaattttttttatttttacatttaaaagtagtatttttcgtatttatgtaaaaatacgtacacagtaaattaaatcgcaactcaaatttacttcgcaacctacacagaaattactcttgcaacccaaaccgtaaaaataaaaaaaattaaaaaataatatatgggtgattctcctaattttttatatgattgtatacaatatagttatttaagacattttgtaaattttaaaaaattataaaaattttaacatgccaaaaacaagttcatttttgttttacattcgtatgaaatagattctttgaattttgctttctataattttctatattttgtaaattattttgaatttcttaacactgtataggatgtcgtaactaactatgtcgtcactatcatataaataaagtttaaaactaaaacaatctggatgtcacacaaaggaagtgcatccgtgcacctttcttgaaagttgtaacgctctaatatctaaggcacattacgtacgtatttttcaattattttattgatatttactaatcaaaggatattgaaattataaagtgcatttaaaaaaaattctctgataattaaaactttaaacataaacagttttaagaaatattcacaatgcgggtttgaaatctaattacaaaatatttgacatcataaaatcacaacccataccacctgcactaggaactcctctagtcaaaatcatgtctctaaccattacaaaacattaatatagatacctcatgaaaattgaattaaagatatgtaatctacattttatatattaattttgataatttagttagagctacaaatcttacactttaataatttattatatttaatttaatcaaacattattgcactaaaattagaggtgtacgttagtcagtttggtcagattataatatatttttattaacccaatataaatatcaggttgtaaatatttatcgtaactcgtctaatcaaaaattagaaaaagttcaaactgcccaatgattttttcagtttggtcgggttaatccgttcaaatcgctttttactcttttttttttatatataattattattgttagtttctagtattcaaataattagatttaaaaataaaaatatattatttatattttaagttaaaaaatactatattaatttaattttaagataaatataattaagtaaacataaaataattgaataaaataataaaaaaaataatatggtatagattttaaacttcaactacaatatccaaatacaataaaaattattaactataaagtctaaattttaagttaaaaactaaaacatccaaactttaaatataaaataatttaactaataaatataatttatgtaatataatatatacagttttattaaaaaatatataaattagtttaattcggattaattagacggtttaaaataatttgtaaactacccaatatatttattaagcggtttggattttcatttaaatatttcgggttgggccatgagagaccttattaagtatttcaaaagaaagggcatgctgatagagttgggcgggaagataatactagttatcaagtcagagagacgcctggcctgtaagctggcggcctccttaaaaacccattacttaacaagggggctatgcggatcctcggacatatatgaaatagaataaagatgtaccaagctacttataaatgtaactacaattaatattactgcagtcgggctatcgaacacggagtcagaagtgaattacgagtcagaccaatttacaaattatttattcgagttggacgatttataaattttgttaaacactcctaactaaaataatataacatgtcgttgttatgattaactaaaggaattgctagaaaggaagttagtaacgtgagttaatttaacacattgaaaagcgacaaaaataaggattccaatagttcttgcaatgaaataagtttcattaaaatcaccgggaaatcttaaaattactaatacctcctaaaaaaatatatcatcgtccacttattactattggtgaataaatatttttgttaaaaatttataaaacatcagatattatattgtatataatttataatactatgattaattgaacaatataagagatatacctgttaatttattgaaataatgaaaaaggattttctgaaaaaaatacaaaaataacaaaaagattataaaaatatgattgtatggaattttaaatatttttacagttatttttaaagattttttatatttatacttatgttattttacaattatttttttgttatttatatattattattattgatattgtttttgatgaattttttttattgtttttgtgttgcattataaaaaaaattaaacgtaaagttataaaaaaaaaaaaaaaagagagagagagagattattttacaaatacacaaaaaaaaaaattaaaaaaatta

SEQ ID NO: 162559 - DNA, 2613 bp, Cannabis sativa
cgacaaatttgaatagctattcttctgcttccccgagcttttaccagagccagtcaaagccacctttaccaactcagaacatggcttctagtaacgaagggtcttcgtatgtgaatcagttcccgacgatgagaactgggggtgtaaataactccaatcttatcagacatagcagctcccctgctggactttttgccagtatcaatatcgaaagtatgcaactttttgttcgttgtgtgtttgatcttttgtctgaacgaacaataacgtgatattttggtcttttttcaggcttgactgcaatgagaggtatggggagttatggtgccactaccagtactaatgaagatacaactttttcttcgctaaacaagttaaagaatttctcatctggagcaggtttgatgagtcctttagatgaaatcatcgatgacaaaactttggtggctgccattcaagacagtagtactgaagcatttggtgaaggtcatagcaatagtaatttcgtcccaaactttccgttgggttcttgggatgactctgctttaatatctgataatatcagtggcttgaaacggctgagagatgaagatgagaaaccattttctgggttgaacaagagtctatcagaaactcaggtatatctgtataaggatagaatagttttcttaagtattttaaatgctttgctttgccactaaatttaaaagatgtgatattaatcagagcgtggaagctggcactcgacctcccactatgctagctcatcacttgagtttgcctaaaacatcatcagaaatggcagccattgaaaagttcttgcagtttcaagactctgtgccttgtaagattcgagctaagcgaggctgcgccactcaccctagaagcatagctgagagggtactttattatatatatatacatacatattttcaaatatatatatgtttgtgtatgtataatgacataaaatgcacgtacattgagttcattttcaggtaagaagaactaaaatcagtgaacgaatgagaaaactacaagagcttgtccccaacatggaaaaggtactattaattaagattaagaccttcatcaccaccttcttttatcatttgtagagcttgatggtcatggtgaaaaattgaatacttccactttaatcttttaacagcaaacaaacacagccgacatgttagatttggcagttgagtacattaaagatctccagagccaagtacaggtaaaaaaaggaaaaatctaaaatatatgtataagtataattattgtgtattaaatgctaatttctttatcgatctattgattttttttttcttaaagattgtttttggttatgatcttcagacactttctgatgatcgtgccaagtgtacgtgttcaaacaagcatcagcaataacagcaaaagccctggaagtgactttggttatgtgatatgtgtgtacagagagaatcataaaagtttgggtataatatagctgagtttgtcttttgaaaaagaaaaatgataataatgagctatagcttatttattaattagacatgattcgctttgaggagtggaaaaatgaaaaagaaaaggtactactgtgtagaatcagaccccaaatatttgatgacccaaaataggaattcacggtgtatagtaatagtttttatttttattatatattttatattatattatgcttgtagcaaataacaccatgtaacgtgctgcttttcagttctgtaactcagcctagttgaatagcatttatttttcttgatagagagatttctatcattgccactaaactaaacccttcctttttcccttatttggtttcatggtatgcatgtgcacagggaaaaaaatcaataaaaaagctttcctttctatttttttttattatggagaaagtgactgagtgagtgcagtggagtaagttgcccaaatctttaaatatatgataacattatttagagtataggtttttttttttttaatgaatatttataatgtagtttgtattttatagttgatatgtggtgtgtgtcaccatagctaatattgttgttagtgtcatttgttgaaactgatactagtataagtattattatgatcatgagaatgctatgggatgcaagcaatattgtatggggtgcgatatcgtgactgatcttgtataaccataatggctttttatttgggattatttaataaaaaaatcacaataaaaaaaaaatactaaactacttgtacggaattttaaatactttacaactttcaaaattttatttacataaaatgtgatttttttgatatatttttatgttatattttagttattttgttgctttttttgttgttgtttgtatattagttttttctttatgtaattttgatattggttaaatgttattttcatgttatttttatatgattttttttttttttaattttagtattgtttttattagggcatctacaacccaactgtattttcttatatatagtgtgaaattttcttttttttactccaatgggacggcaatggtcaccctattttcatggggatctatagtgtcccactattaatagtggggcactata

SEQ ID NO: 162560 - DNA, 2835 bp, Cannabis sativa
gctttcgctgtcttgccaatcgccgccaggagggttgacgccggcttggaaggtgacggcggtgatgagagccgccaccactagaagaacattccgggcatccgctggtttgtcatgctctttgtcgtattggaagctcttgaaccatctccaagaccctgcagtgctatttccctttggtggattcgccattaattatgttattgttttctaattttctcttttgattttagctaagttttatcttaaaaatttggttggttactacaatgcacacgcaacatatatataagacaataacataatataatagtgagattataaggagaaattctaatctagttaattttttatgtatagtaatgtattgttgaaaataaaattaaaaaatttatgttgttgaaaataaaattaaaataatcagttccactcaagttagttttttattccaatttatttgaaaagtagtatgatgtattgtataaaattggattataacttttataaaaaatattcatagaattgaataaagtatatatgcatgagtcaggtgaggaaagaacaaggaagaagaagggaaatgtaggagagagtcatcgaagactggtcggctgccacctgttgttggcacgtagtctgaaatcccagaatgtattgtttggacttacaaaaataaattaaaaaatgttttcgtgtagattataatagtaaagaaaaataaaaagttttatttaatcaaaggtaatggtagttggcatattaattttttataataacacaagcttttttatcatacggcacacaacctcaactatagataggtaaattaaagtggaaattataaattttatggatttttatacttttttttgtgtaaaaatatgattttttgaattatttcatgtgaaaattaaataaaaaaaaagttgaaaaatggtaaaatcaagtaagggtaactaggtacctttatggtaatcagagggtaaccaattaccataaaggggtaatcaagtacccgaacttccattttagagttctcaaagtcaacctaggcgcaagattagggacccctcccaggtcgactgctatgacttgggtccactaaattctgtgatgtcatctttctcaccacgtgtcaaacattgatgtctacgtcatcagggaaagtttccaagttaacatttgctcccaagtcaactttacacttgtgtggagttgacttgatgatgtgaacaacccatttctcttaaaactaccagataggcaccaattttgacaatcttagacaattgatcctgtccttcaagcttttccaataaaattaggactttaaaatcccttgctcttgtgtgtggaaattttcaaaaattaagtaacaaagaaaaagaggaaaaacttattattttcacttatcttttatttttcctttgaaaacttgaaatttgaatctaatcctatttttaaatggcgccattcgaaaattagaggaaaaaagaagaagagaaaaagatctttgatcttgctttaaggattagcattaggaatggatattaccttttaaattcacaaatcctattcttatttctataggaatttcgaattttaaagcttaaaggtgaagggaaagatatatttttatctttttcttatcatttaccatttcctctaatgctttgaatttaaaaggctcttaattgctctaggattaggagattgaactcatttataataagagagctttcaatcaaatttctcacaatcaaatcatccacgcccaagcctttagaaaaaccttggattttcatcttcatcaagctatcaagctttcaagtgctcttcatccttcaaggtaggatttttttcgaagaattttcttcttctctcctttgtagagcttgctttaaggattctcaaatcccaaaaacccttgaatttttttcccaagccctccaaaattccaaaaaaactatcccagtgaattgaaaatttcttccttttacatttcttgaacttctcctttttaaaagtcaatacaactttttttgagttgtaagcaacttgaaattttggagttagcgtggctaggatgaaaagaagtagaagattgtttgatgaatatgatacccatatggctcaattcattagagtcaagttaactgtgcccaagtctaagaacttagacaaggcacatggtgggaagataatggcaattgaactccttaaagttgctatcgaaagtgaggaccctagagatcaagcttttagattaagacctctcgtgtttagcactcttactgaacatcaagcttaattattctagaatgattattgtcttcctgaaattgtcttctaaaagccacaatatggtggtcacaatgactcttagaacacttgctgtagtgcctggtcgaggttccatatgaatatgggtgtttactggcccttacatccatgattcatatcaatcgcagatttctttggagtttatccctacaaaattaatctaaatggctattgaattcatgccaccttctacatcttttactgcctgagaattggcctattgtttaacgcccaaaatgtgactttcactagcggtggttatagtatagatcgggcggtcgattccacagggaggtgattatggacagaagcgttagtagaaaaatcaacacaaaaggttaataaaaagtaacaaatgattttgtgatttttgttttggtaataaatattaaaggaaaatgtttaatcaataataaaagagagaaaggcttcaagaatcatccatatgcttgtttagctattttgtacctttgattcactaagttgacacaa

SEQ ID NO: 162561 - DNA, 4076 bp, Cannabis sativa
cgatcacctatttctccttcgagtactctttccaacactactactactactactacggcttttcatgctaataatggattcaagaaccacaccataagagtaataattaataattgattcaaacctatgtattgttaattgtttttatatagtgcttattaattaatcgatatataacacaatgtgacagagaaaaatctggactcgaagtggaaaacgacagattcttgaacgaggactagctgcggctcgagctgtgattcggagagcaggttcgagtagcaacttcttgacaacaagaaacgacaccgactatgttcctaatagtgtcgtttatcgtaacccaaaagcgttttatcagtaagtttttatttatttatttatttttgtaagtatataaaaaataatgaatatacaactctttctgattttcacatgaatggaaaataaaaatgatcggacgactttatttacaagtcatcgccaatctttatataattcttgattgaatgtggaattagtttcttggatatgacgctatgtgcgtatttcccactcacaaacacaagtttctctcaagtttttttcactcgagtgacttttcataaagcagtctgccacagttattaattatcgtatttgatggccatggcggtccataatttcatccatatggaccaattttttctttatatatatattttttatagaatagtattttgattttgaaatttaattaaataataaaattcaaagttagctgaggaactagtaataagtagcctctaatacaaattttaatcacgagttgatcttcgagaagtattatgttctacattattatatattactatttattaattaaagcacttcgctatagcaatattgaaaaggaaggtagcaatgatcatttttaattattccatattgcttgggttttaatagattatttcataagcgaaaaatgtataaatatatgtacgcagttacatgcatatatatatatatatatatatatatatacacggtctctcatcatcattttcattatatcttaggccttttattactaattgtaatattacgtattaatctttataatcttgatcatttgcagtcatatatatattaaatattttttcatattattaatgaattaacttttaaaaactgcaggagctatgttgaaatggaaaagagattcaaagtgtatgtgtacgaagaaggtgagcttccaatctctcatgacggaccatgcaagaacatatacgccattgaagggagattcatacatgaaatggaaaacagtgcaaagaggttcagaacaagagagggtgaacgagctcacgtttatttcatgccttttagcgttacgtggatggttaagtacttatacgaagccaactctcgcgatctcgaccctctcaggcgctatgtagccgattatatcaacctcatttctaccagatacccattttggaatacaaccaagggtgccgaccatttcatcgttgcctgtcatgattgggtcagtacttctatactcacatcttttttttcttcacagcttttttcgcatgcttagtttctttgtgtgtataataatgttattttcagtgcaatttcaacttttctttgttggttacgttatccccccaccaaaaaaaaaaaaaagtggattactaatgtccattcatgatgtatgtatggctggttagttatgtagtttacacgtgcattaattttaatataataagtatttggacgtccacattaaaaaccaaactggatttgccttaactctttgttatttaattgattttgcgtaatatctaagtttttgataaagtacttgtcttctagctatactaattaaaatgaaaagcaggtctagaataataacataatcacacttttaaattgttagacaattgcttaggttagggtcctaagtaatatttgggttcacatatatatattttaaatatttaaatatatatttaattgctcaaattggattgaatttatatgtacgggtaaaggtcctaattaatttatgttgttgattatttgtttataatatatttctatgcatgcatgcagggtcctcatgcaacagagggcaatcaattcctttacaacacatccattcgagtcttttgcaacgccaactcttctgaaagcttcaacccacaaaaggacgtaagcctgccagaaatccacctcttaaccggcgaaatgccatcggcattccactctccacccgaaaatgccacgcgtccactcttagccttctttgccgggggcctccacggcataatccgacccatcctctttcaacattggaacggccgagacggcgatatgcaagtccatgagtatctccctgagggcatgggagactaccatactttcatgctaaaatccaagttttgtctctgccctagcggatatgaagtggcgagtcctagagtggtggaggctatctacgccgggtgtgtgccggtaatcttgtctgatagctatgttctgccattcagtgatgttcttaaatgggatgagttttccatcagtgtggagatttcagatattccgaggttgaaggagatattgagttcggtttctgaagaaaagtatcgaagacttaaggaagggttaaagactgttaggaagcattttgtgttgaacaaccctgccaagagatttgacgtgtttcatatgattcttcattctatatggctcaggaggcttaatgttgggcttgcatagttatgagtttactttatttttttctttattctttcttttttaggatatgtttcatgtacaaaggtactaatatgggcatagttgaaagttttattttatttcatttgtaaaagtgtaagggtttacacaaagtgaaagtttatttattttaactatataatttaaaagactaatatataatactattttatttttctttggtaaatataatgataaaataagtaatgtattattagaaaaactattgaggtactttctcgtctcaaactcccgtgaaaaactcggtttcatatagcccacataaggcaaatgatcaattctaaatcttcttaataatagatagaagaaaggtgtagcattaagtaattaccattaaacatacgttgtgcttatccatgatcaataaaaaatttgaaatgctttcatattgccttgcatgtttacatccaaagagcgcatgcccaatcgatttccaacttgatgcacatagagagcatgttgttgaattaataatttttttcataaaaagcgagcaacacataccttccaagcaataatgggaatctttagtagcaaattcaagttctaaaaatattttcaccattcacgttgtggatcagaagtggaggattgttgttgttcttccaatgatgttaattcctaaatgaaaacccgatttcactgtgtatgaaccagttgtagtatggtgacatatgagtcggttttggtttgcaaaaaaactcagtggaatcgacatgattcgatcaatatcgataggcttgaagtaggtattcagcaaagaaacatcccattcccgattaacagtgataaaattggaaatgtgcattaatggatcgaggacctaaaaatgttaatggcctaaacttattgtgacttgggatccatggatcaattccactagtaatatgaagaccatttctaatcttgtatctcagccctttatgtaacaattctcttttccaacatatactttgccaagttaacgatggagagtgactaattatcatccaaaaaggaagagtttgagacatgtctatgcttcagtaaacgacttaacaaggagttcagcctttcgaaaatcctccaagcttatttggctaagagagtttggttaaaatgaacaaatgagtggaatcccataccacgtttatgtttcgatttgcataagaattttcacattttccaataattttggaaccatttttttgataaagtgattagaatcactcatgaatttacgatgcagacgtccgccaccggcgctggaacctcctcgaactaggata

SEQ ID NO: 162562 - DNA, 658 bp, Cannabis sativa
  modified_base (590)..(619): a, c, t, g, unknown or other
ctctctctctctctttctctctgcagggaaatatatataagcggaccattagaggtgcgatttaagacgggtagatggtgttaatgcttgaggacaaacaagtcaccggagttgggcttcgtgaagctggaagggaggttaatgaaggaaccgcgcgtgtggtgctctgtgaggaactcggcttaacgttggtaaagttgatcaacaatagtggagtgaaggcagaagatgacagcaccaggggcttggagtcgcaacctgggttttttttttctgatgtccacgatctgctatttttttacaataaaataagtaaagtaaagaaacaatgaacataaaattgagagttaaatggattttgttttgtaattttaatttttgttcttttgtaatcacaaatttgtaggatttgtttttttaatattgggatctacttttgaatttgttcaatctccgtaaaaattattttgtaccattatgttactcattttttatgtgttttaatgtgatcaattcttataaaagaaatggattaatgtttattttattttaattagatattcacattattgggttttgtgccctaaatnnnnnnnnnnnnnnnnnnnnnnnnnnnnnnaattaataaagatcagaaattgcattttatgttgcatgg

SEQ ID NO: 162563 - DNA, 3045 bp, Cannabis sativa
  modified_base (2649)..(2667): a, c, t, g, unknown or other
  modified_base (2822)..(2823): a, c, t, g, unknown or other
ctctctctctctctcctctctctcgcttttagtctctaagatcctctcttccttcaatttcatacctgagaatagcatgacaacataatacattcttaaagtgggaatttttttctaagatttgaattctagacctcccagttattactccaattaaattatcaccaagcaccaacatacatttagtaatgtgtgtattattttttattttattactaactctattttaatttgtatatttacaaaatatggtcctgagcggtggggagcctaaggcaactgcttcactagtctcacctcagggccgatcctgcttttatcattaagaaatttgggtatatataatatgtctgagtttatatgtttttgaaggcattatttgatttctgctgttaatatttatcttttgttgtttatgatcctctttttaatctttcaatgattccataggatttttttagttctaatatttgtattgaagatcaggaagatatggtgaatgctctcggtattgtggaggttgagtgtcacgagaaatatttgggtctttcttgttttgatgggcaaaataaatcctctttatttgattcggcttgtgactgtatttggaacaagctcaatagttggagggccaagtctttttctatgacaggtagataagttctcattaaggcggttattgaatccatccccacctacacaatgaattattttaaacttcctaaataatttatcagggatatccatagaatgtgtgcttggttttggtaaggtggtaataatgtgaagatgaagatgcattggtgcacttgggaaggtctgttgttttagtaatattcatcttttcaaccaagctttattaagaaagcttagaggctttataatgctcctaactctcttgttgctttggtgttgaaggggttgtatcataaaaacaactcctttgactccatcatttcgtcaaaaaagaggctcttattgttgggattttatgccctaaataaaatccattttaatgtaaccttatttgttgtcaatagaagattagaagtcatttacgtttacatgttattttcatgattatggtttaatatataatttttgttaaatatagaatatatagtcattcacaattacagtaatgtcatcacagtggaaagtaattatgattatatgcttcaaagtttagtcccatgatttatcagtgcacagaatttacgctgacgtgataatcatcgataaagtttacttacacttggataagtggtgtgtcctttctagggtattggtaaagtatgcaagtattggatgcatggagtatacatcggacttgaccaatgctgaacttagataagatatcataaacttactgttgtatctttttaagtcaatatcatttagttgatcttagatcaatagatcttaatcctaaaatggttaggttctagcttaactgtattatttgtgttctttaacttgttcgttaaagttgaccaaatgatcatcccaatacttacatcttaaaatcatagtagtacaattgagtgagagcgctaatcatagatacgaaatttatagtttctataatgacatagaagtaaaatgaaaatttcctatgagcttggcttaatagagataaatggaagagttcttgtttcagtaattatattagtttactaaaatattatttataggaagctaattgttttaaggataacatatatcaaagggtagaacagttaatttgtccctactcaatgtaaatcatctatagatgatctttgattattagattataacaatagataattaatagtttatttatatttagaacatatagcattctatataatcaggagtgcgattctgaaatgtcccatgacttatcaatacactgtatttacactgacgtgattatcaataataaggtttacttacacttttggtaagtagtgtgtcttttctaggacattaagcaaagtaaacttgtcattggatgtatatggcttacatcaagatggaacagaaattgacaaatagaacacattataatttagtgtttactgagacttttgaaaactaaattaaataagagcttaagaaattaaaatactattaaattaagagagattaagatttttacgtggttcgggcgttaatgaaccctagtccacgagtcaaaatcttgcagtaggcctcaaagtcatgtattctatgtatttaccccaatagtgggcctgttttgtacaaaaactctaaatgggtcactagtatggcaaatccaactctaagtctataaaaacccgtttaccccttaatgtaaggggggtggacgaaaaatcttctaagttctctttaagctttcttcttctcttaagaaaaacatagaggaaaaaacattatagcaagaattaggattcttcaagttgcaagacccattagtaatacatcaagccttcttagtccaatacattgactcgtggactagagttcataaagtcttccatcaagaatgacatatttgggaacttgatattgaatcttatgttaatcagtgttggaatatattttaccatgaccttgatttactaacaagtttgtttttaacatcctaaatatgaatatctaaaacgatgaaaataaacacannnnnnnnnnnnnnnnnnntacattggttgcagcagaattaaatgactctttccgatcagatctttaacccttgtatcctttctgtcacagagtatgaccaagatctgacctcgaaactctttcagttgtttggattcttcacagtctcacacactatgattgaggactaactnnctatgggtgggcatgcactcaatccctaaaggctaattttgttttgtgaagaaggctataggattttgaaaattagaaggaaaagaagaagaagaagtcttaaactctctagttgtctgacaagaagaaaactaggtctagagtctttagaagcattcgttggataatgagacatttcttttctttttatactaattaacttagggttaggattgatttatt

SEQ ID NO: 162564 - DNA, 4278 bp, Cannabis sativa
tatatatatatggatagaaattgtattaattattatcattaagtgtcggcacatcttatataatatatatacataaactttcacaatataattacacaaaacatattaatctctctctctctctctcttaattatttatgtatggacaaaaaatgttaaactatatacaatcaaatcattcataaatgtgatcttgttggattgatttttgtggacttattattattattataattagtttttgtcggttaaactaaccctctttgattatcatttttaaccctccatatatagatatacgtcaaaaatatgtataagttattatttatcaaactctttattatttatttcttggtatcttaaatttagattcatatttaatgttccaaaaatagtggctaaaatacataaattataatttattacaattgttttgtattacaataaaataaccaatttagtactttttatttcaattcaatatcagcaaaaaaaaaacattttcttttacttctaaacaccttaagttctgcatattcttgtaccgtcaaaagggatttcgtaaaggaaaaaaacgcggtatgcagaggagggttaaaagaggggcaagtgtgaaggggctgggtgcagggacagaggcaaggatgggatttagggggaggccaaaagaaagaaaaaaattacgaagggaccaaaatataaattttgaaaaaaacaaaaaaaaaaagagaaatacaacaaaaaataaacaaattaaaagtttcatcaatatttggggggccatggccactcttatgctgagggtgcatggctccgtccctggctgactgcgaaagagctcctattttcgaagttagggtaaaggtagggtaaaaaaaagagtgggacgagtaaggaggcagcatgagcgagaacaatatgtagtcattacatgtgtcaaggatgaaatttgtcgcccaaatattggtgatgattgtttccttgatgtatcttgttgttacccaaattgttgcagtggtattccttattcaagatgtgtgggccctgcttctacaccattatcatcaatattgatgttgatgaataattatataatatatatgtatgtgtgtggtttgtttttgaagtgtataataagaaagtacctctctagtacttaaaataaggatatatgtcaaaccatgttatcatatagataatgtggaaatataagatgtacatgcatgtatcccaattgatactttcatatgaataaatgcatgcttgtttaatatatatttctatttctcatttttgatgatatttttagtgacaacattttaattataatataacaatcctaccactactactacttctaaatcattgtcatcaatattgtcactaggtcttggtgatgaataattatatgtatgtatgtatgttgtgtgtatgatttttgaattgtaataagaaagtatcactagtacttatatatattagggtatatgtcaaaccatgttattgtaatgtggaaatataagatgtatgctcaaattggtactttcacgtgaattcaatatatctatatattggggacatcactcaaattgaaaatttctgtacaaaccgtatttttgtaattttatgtatattgaaattattccttaattctttgaagtaaacttataacatcaacgtatgggctacttcttcaatgatcgcgtagatgaatagtctcactcttcacaaaacaactcaaaaattcatctactcgacttagcaaagaaaatcatgtgttctcccaatttttcaatcatgtgtgggattggagaataaatttcactagttattattgttgattaattttatcttttttcttaaaaaaaaaaaaatcatttttgattctttattttgtaaaagttattgattgggtcttattctgttttgttaaataacaaattagactctgtatttttcaaaatagtacaaaatagaccttaaatttaatttttgtcaactaagtggagatttttttgttcatttgataggagttttgtaattagttttatacttaataaaattcaattgatttaccccaaaaaaaaacatttcaaaagattttaataattgatagcaaaattttataatatagttattaaattaaattatacaagattcgacataacacatttgatgatactagatactactggtacatttatctattaatataatttacgtattttaatttaataattgtgagaaaattacaattaatgtgcagagacaaatcaacaaataatttgtaatgataagattaactattcaaagtaaataatgagatgtaaaatgggaaggaacagagtatctaaaatcagaaataatcaaagcaataaacaataaaattaacaccaagatatatggttcaagtcctataaatcgatgtgatctgtgactctacttaagttctagaacaccaccgaaatttttttattgattgagcaagataggatactatacagtcaaaaaagattttctgttagattcttcaaagtgtttatctctcacactcttactcaagaatcttcttcatttacaaaagattcttcatacaaaactcaaactcaatctctctcttttctctacctctcgatttctctcgtctgaactcgaactctttgtcctgatcatctattgtcttcgaaaagttttttctgtacctctcaatttctctcgtctgaactctaactctttgttctaatcttcattcttcgaaaatataagtgttcgtggtatatagtttaggatatagatcctaaattcggtggatgcatatattgttaagttagttacaatttaacaaacttaacaaaatcttcgtaacagtatctttacgccaacttaagataaagtgctcctgaagaagatgaacgtttcctggaagaaagaccaaagcgtatgctaaagggactttccgataggaaaggcaacaactggagtcgactatccgaaactctcttccaagagaaataactagccatctggaactctttttcggaggatgactagctttcctgaagactccttccgggtggaaccaatagacatccgagaatgccctttcggatggcatctatcatttcccaagacttcttccggatagacaagttagactttcggaaattcctttctagaagacatctaactttacatgaccagaacaacttttgaggatcttttcatttggaggaactataccacaaattccacttagtttcttcgaattaaaatattgatggtgatgaaaaaagaatgcaatcatcttgattggttttctaaatatctcagtatactaactttttagaatgatcaagtccaaataaattatgtttgaacttggttactatcactacacaaaaatgccacttttagtgacaatcttttagtcacaacaaaaaaaaaaattgtgactaaatgtgacttttagtcacaacaaaaaaattacttttgactaaacatttagttttaatcacaacaagtacgactaaatacacatttagtcacaataaattgtgatttttttactaatacttttagtcatagaccttttagtcacgacgtaggaataataatttataattagctacaacttttttaatttttatagtatattaagacattaatcctaatatcaacatgattatttttctaatctaatattttttaattcaacaaatctttcctctatccttctctctaatttagtaaagttttatgtctatatatttgctatctttccataaaagaccatatactaattaactttattaataaataaataacacttttggtgatactagtactactaatacatttatctattatataatttacatattttaaattaaattgaggcaggttaaagtcaaaagctaacctatggaaaaggtatttattagtgttataattgaactttaaaattaagaaacgtgatattaattaatttattgttattagtacgtatataggtaggtgtctcgatcaacactttctcatatgaattattgcataataaaataattgggatgatttacatgaaatctaataatattttctattgtgagctttcttaatttctccatcaatgcatataataaaaagaagaatattaattatcacaatatatatatagatggttaataatattaggggtgggcatcattcaatctaattcaatagaaccgaaccaatccaattcaatccaattactaaaagttggatatccaattacaattg

SEQ ID NO: 162565 - DNA, 809 bp, Cannabis sativa
  modified_base (736)..(737): a, c, t, g, unknown or other
  modified_base (764)..(767): a, c, t, g, unknown or other
aaaaaaaaaaaaaaaaaaaaaaaaaaaaaccaaaaaaaaataaaaaaaaaaaaacccccccccccccccccccccctaaaaaaaaacttttacttttcaaaattatcatttccaacttaataaaaaaaattataaatcataaatcacgctaaacaataaaatcaatactctcttgttaaaggttagggtcgggttcgtggtagggtttgactctggggccctaggttggggcggggtccaaggtcgaggctagtgtttggggttacgagcaccgaactctaagatgtcgagtcataactaacacctataataactttaactgttggttagtagactggcactaaacaataactgagacaaaaaaaattaaaaaatatatacatacagattgagtataagggtcgattcataaccgatactaaaagatcatttggtgtcggttagacacattttctttttaaaaaagtttctgaataaaataaaaaaaaaaaagacaaaaaaaggagtataagtacaatattaggaaaccctaattggaaaaccctttctcttcccttttaactctctcccgataccctccttctctctgctccctatgatccctgacggcagccacgaccatgcgtcgctggcctcatcctaactactttctccaaaaatgaccaccactatggtggtccgtgaccctaagaaccccaaaaattgcactcccgatgtaaagaccgcttagtttaannttggaaattagcagataattaggattnnnntatgaaaattatttattgatatttgaataattatttatattg

SEQ ID NO: 162566 - DNA, 3892 bp, Cannabis sativa
aatgtacactatcatatacctaaatttaggttataatttctcttatatatcaaaaataaaaaatatcttacgatacttatcaaaactgattcaccaaagaatttttttttatatatatatatatataactattaatggatagtaattattgagaagtatatatatttgcatcttataaaggaactagctcagtgtcacataaactgtgtcctgttagtgattgcttttgcagttatttgattggttttactattatttccattggtagctgggcttctgttttgcttaggaactagtaataatggatgctacatgtaaagtgtaacctgctttgtaaatgagtcataggtttctcgatcttatcttatcattgaagcacaatctctcaatttcaaatttgtttttctaggttagatggaatttcatctacaactaaaacatttgatgaatgatatgattttcttttctttcttgctaagaggagttttatttctttatatagttgcattccttctttggtgattttattttgttcaatttctttctcctttttcttcagggacttgaaagctgagaatcttcttttaggtcctgatggattgtggaagctgtgtgattttggtagcacctctacgaatcacaaacgctttgagaagcctgaagagatgggcatagaagaggacaatatcagaaagcacacaacacctgcctatagagctcccgaggtctaaaacaatctgattttcaaaattctcattagtgttctttggttgtagcaagttttgatttgattttgcattactttattggtttgagtatttttgtaaataatttttttgtgtttttctttgaagatgtgggatctattccgaagagaacttataaatgagaaggtggatatttgggtaagtcgactggcaacttaatttttgcaaaattagattttgaacagttaaaaatatgcatttccctaaaatttgttgagaattaaggttgcattcttactttacaggctcttgggtgtcttctttttcgcatttgctatttcaaaagtgcatttgatggagaatcaaagctgcaaatactaaacgggaactatcgcattccggaattacctaagtacagctcaacaattacggacctgatcaaagacttgcttcaatcttcaccagacgacagaccagatatcacgcaggcaagcgctttgcttgattggccattcatctccatcaatttaggttagttttagatcatctgtgcatcagcaaagatggggagaaggaccttagattctgttttctgatgcttttttgttttatgctgcaggtgtggtttcgtgtcaatgagcagttacctgtggcattacagaagtctttacctgataggccacctgaaatgaagtctactgaaacacatgaaggtgatgaaattattaatatgttgtaaaattttagtaagtgttgtcttatacttctttggcacaacaaaatttatttgaccctcaagtcttgtaaatttctctatataattttttttcctttctttttaatctaaagtaagaagaaattctggaaattccgtttttgattcaagaattaactggaatagaaatttatcttgaatattatgacttttgttggagtacacttggtgtttgctaatatgtatttgacatttaacttttgagttgtagaaataatgcgagccaggttcctgctattttattttctttgtttattcttatgattcatgttcctttgcaagtgaaattgttgtcattgctctgcgtgtttctttttcattgatgagggaaaaaagatttttcttatttaagcaaaaagataagatgtttcaggttttgacttgaatattgtgttttctaattgcatttcagcaggtaattcaaggttgccgtcaaacaagtcaccgtctatgcctcgtagaagcccacctcccccaccttcaactttggaaccttctagagattcatcacatcaacctacatctaaggcaggaggaggtgctgggcagcttggtgctttctggtcctcacaacatgcaaaggagtcattggtagacaagagtgagccgaaattcgatgaggagccaaccagccatagtatggcaaagcatgataagtttcgtgcagataatcaacttttatcaaagaacattgtccatggaaaagaagatacaacaacacaaagccaaaatgtaggaagaaactcgtatggaagatccaagcctgaggacggatcatcaaaagactttgaattaagtttctttcaaaaagacagggatcatcacgttgagaggtccaaggcatcaaatactggcagcttagaaagtttccgtgataactcttttaacacttttgttgctgaatttgataccagaaaactcagcccagaagccggtatcaataaaaaatcaagtaaagaagaagccttggaggctgaattagagaagctgaaggaacaacttgttcaagtaaactctgagaaggctgaaatgacctccaaattcgaaaaactatctgccatttgtcgatcgcagaggcaggagttacaggaacttaaacaagcacttgcagctaaaacgccatcaccaaacaaagatgtttcaagaaatcaaatttcccctgggatacggccttctggagctccactggtatgttttctttttggaaaatctacatgcttgctactgtaatggtattagctttttttctttagtttgatatattatcctttgatcaacagctacgagatggagcaattagggaactccagcaagagaaggataacaggagcactgtgagccccgaggcaaagatgtggcagccttttgcagaggaaacgaagtcacagcaacctctttcagcgagcaaatctgtcaggacgagaaatgggcagcagaacatgccacccacgcaagtaaattctggttttgaatcatggggctttggaacagataattttactgccgcacctactgggagctcgcaaatgtcaaggccatttggagatggaaataattctcagcgcagtggtgaggcaaagatgatggagaacaaagcagcatcacaacctgccggatgggctggtttctaagacaccatgtggagagccacacaaaggtattatgtgatgatattttggaaattgagagggaaaaacttttattatgtggctgcttgaggctttagtttgtgctgtttgagtgctcttatgtagattctccttctgggtgaactttatcaggctgttggacatgtaactgattgcatacctctgtcatatctttactgtttgccaaaaaataattctcttttgaggttttttatttggggttttttcataaatacatttatatatttatacatattatttatggctttactaaaactttttatttgtaattttacaaatttaattttttaaagtatttaaattacaaaagtaagacttcttcattaagagaaaacagtaaaggaaaataattgaaaaacaacgaaaatatggcacgacatcaaaaacacttaaatatgtcaatcaactagtgatacgctataaataaattttaaaataactgaaaaacattcaaacatggtaactaaaaaaaataacattgaagagcttatcaccctattttaaaagtaggattattagtggcaaaattatttgaactatacaatgtgtgacactttactccacaagttgatttttttacggcaaaattatattgagaaatagaacaatctgatttgattcgttcttaatagtaggggtgtacgtcggtcggtttagtcgggttatagcatatttttatcaacccaatataaatatcgggttgcaaatatttaaccataacccgcccaatcaaaaattag

SEQ ID NO: 162567 - DNA, 635 bp, Cannabis sativa
tcaaatgcatgttttggagaaaattgcacagtaatgggcgacatgtcgcctagaagatttatggaattacaaaataaaaatattgtcaaagtcctaggcgacatgtcgcctaatggtgattcgagctttgcgattttggtttccaatcacgtgacatgtccctctagtggtaagtgacatattgcctgaatctttgcatgagatttaattccatagttttgtgaaatccaagaaatgactcaataacatgattaagtgatctaatcacatggaatagtattaatgacgatccctacagtatataagtgtgttaagtgagccaaaatgacttgatcactcattttgcaatctctctttaaacatgttctctagttctatccaattattttagagttttgctaaccctaacaatttaaggcttgaagtcccaaatcttattcaaaaaagaagccattagcaatccatgggaggctttgagtaaatattttatggatagcattaaacttaatgtgcaagccttcttaaagatttgatttccccaaactaaatttggttatctctaacatttatttgttgggaattattttaccaagatctagatttactaactattgggaatattttaccaggatata

SEQ ID NO: 162568 - DNA, 1471 bp, Cannabis sativa
aaaagttgttttaattatttttaagcatctataggactagtgcttattaagttttgtggatcatggtgacagcctataactgtaacagaccaagaaattgtggagatggtactctttcctgtagtaaatgaggcatgccgtgttttggatgaaggaatagttgtccgggcatcagaccttgacgttgcatctgtttttgggatgagtttcccatcctaccggtgagtgattttattatgactctgaggatgttacttaatactataagagctattttaccaaaatattttttaggcaacagagagttttctttctttttttttttttctgaattataggtgttaaattttcagtaatctttgtaaattagtatcttacaagcttgcatttatattgtgtggcagtggcggtattgttttttgggcagatttggttgggcctaaacatgtttactcaagtctgaagaaatggtcagaactatatggcagcttctacaaaccatcacgatttttggaagaaagagcaacaaaaggcatgctactggtaagaacttccacacctgttgttgttttctaaacatttacgcaacatgacttggttagcaacatcctccacgaaaaagtacataaccgaaaaatcctagtgtgttgcatagttttggcacctcatttcttgtgattactttttcttgaaaatgtcccatatgagcccttttttctcatattaataatacaatgaaaagaaatagtgacagtggtggtatattttgattttctgtttttttgcagagtcaacctgcttcatcatcagcagcagcttcaagggctcgcctgtgagcaataagaaaagtaagttacccttaatcgtgggtttgattgggaaggtttctatgtttctcgtaataaaatctcgaaatgtaatcagttttagctttcgaagcattatccgcctgtaagcctgtagcatacaatcgagaagtgttttatatctagaatatttatgtattggttttcatcgaataaatatataattattgcttatttgtttggtaatgcgagtgctggtagaaggagagagaggtattaaacgggaattggattaaatgtgaaaaaacacatttaaagaaaatgtaacttaaaataaaaaaatctaaaagacagacaatataaaagtgttggtttttagtgatcaaatctgaaaataggcaggtgaaaaatgatctacatctacattgtagaatttacaccattttttttttacttaaatatggcaagcaacttttaaggttggttattttttatagcattttttaattattttatggtgtttgctatatcatctaaggatgttcatcaaaccgcttaaattttttgcactgtaaaaaaaaataagatttaaatttttttgcggtgcgattgcggtttgaatttttcttaaatcgcgcagtgtttgcgattttgaattgttaata

SEQ ID NO: 162569 - DNA, 1871 bp, Cannabis sativa
  modified_base (225)..(235): a, c, t, g, unknown or other
ttaacattgtattattattacctattggatgtggggcaactttcccttcagtcatgaaggactttgcagaagtatgcagttttttctttaccaaataatcataaatgtacacatcaagcctggaaaaaattagaaaacagtaattatatatactaaaaattcaaagagtaactttaaaatttacaaaatcacataaatttatcataaaccaagaattctgttatnnnnnnnnnnnttatatagaatagatatatatcaactgtattagtactgagaagagacacatgcagaacaaattaaagatagaattaaatttggatacttacatttaaactcaacttttgagtaactttggctctttaacaattttaaattgtctcttcaagatcttcaatggttgactcaagttctgagatttttcgatccttctccttagccaaaatagttaaacgagaaacttcagtttctgccttcatcttactcgcttcactctcatcaacactcttttccatttcattcacctttgcttcaaattgggctatgttctcgataaacttcttctcatcggataaaccacatcaatttattataataatctcatgcataaataaaagtaattaatgataaagttatgatctcattaccttctgttcattttgcaaatactcaatcttttgcttcaagtttgcgttttcttttgcaatactttgtacctttttcttttctgatcattattgtgaagtatcaaaaatggtaataataatcaatgttcatgtacttatttaagcaatttgtagcgaaattctcttatgttttaatttttatacacttaactctcttatatttttttagtagcaaaatttccttatgtttatttttctttgtaaatttaacacactaattgaatatcaaatttatcaattggatgattgctgtatacacttgtatatatgtaacagtaaaacttcaaaatcgatacagtaataatctagttgttatttagaattttgccactaaaaaaataaaaagttaagtgtataaatattaaaacatacaaaagattttagtgcaaatttctttaatcattattaggactcttgtataatacatgatattattattttctaacaaagcagaaaaaaaaaacaaaccttgataatttgcttcatacaatcgagacagttccttaataagatggcaccctctctccaactcagccagataatcatcattctccatattaactcacaaatagtaataatctgaaaattttaaatgaacactatcttacatacaattagtatttatatactaaaccggtagcaatatcaaatatatcaatctctctttctatttatatgtattgttttaaaatacatattgcaaaacacttgaaatgtaggagcaaaggagatatactttactgaaatacaatggtgtgtgtaggccatgaaaacaaaatgagcataccttttttgcttgttattttgattttttttttaattttcttatatctgtttagacagagataaaataagaaggtgaaggtggctttatgcattagcacaggaatggcaatggtctagtctaatatgaatagtgaaattaccataatagcctcatggactactgaagtgtgtgaaattaatagtgtcacatcttgaaaatgtgaagcggccaattcgccttttaggcttccacccaccaaccaaagtcattgatttgtttgcattaccaattaccatttaatttctattaatcctctagttaatgattctagattttgaactatttcataattattaaaggggagttatatttgcacccataaaattataaatacaccccattattaaaaaaaatataaactt

SEQ ID NO: 162570 - DNA, 1108 bp, Cannabis sativa
ctttataaaagcaatttgaataatatatgatgaattaaattcaacaatgtttgctagaatatttttaggtaatgatttatactttttttttcactgttgattttattgagatatttctcactagtttaaatccctaatttctctcactgattgtgtattagtatatttccacttggtatgcgctaaaatattctgaaattttactttgggatctaatcttcaaattttatatgcatccacatgcatatatatacttgatgaaaaaaaaaaacctttaatgaattgacttttactgccataatcatgcatacaaatatatagtatatatgtataatatatataatggtggattgtatgatgtatttggcattgaatgtggattagtgcacctttgtttcgtatgatatatataattatgaaaatgttggaaagaatgaataatgttccttctatacatttatttatattactatactgtagagaaattgtaaccttatcaacaaaattttgtaaggatctcaagagggatagttaaggtgatcagttaacaatgttaagagcttaatttattttattatctttttagacccaacatgatcacaccttcttttgtctgcatattcgaaagctctttgtgtttgaacacttcccatgcaaatttacatatgtattgcctagtttcaaaaacttgcgaaatttgaaccttttttttttctttgatgtatgctttaattttctttaaagaaagttgacagcataacatctcttttatttaagatttatgtatttctctttgattatgcactcctatattgacttattttctgaagtttagggaatcaaagagaaatataaaaatcatcaataagaaattggcagcatagcaattctttttttctcttatatctttctctttgattatacactcccatattgacttattttctgaagtctagggaatcaaagagaaacataaaatctatgaagaattaggcagcataaaggcatggagacattaaattctcttatttttcctttggctatatctcacttttgaagatcttttatggcttagagagcctaaatcaaagtggaccaaagagaaaat

SEQ ID NO: 162571 - DNA, 3010 bp, Cannabis sativa
tatatatatttctctttctttttggaggggaccccatagatggtgtcaattattatgatcaacaacacaaacgtaaatctaatagtactactgttgccacaatgtgtaatttctgacttgttttatcaatgaaatgatagagatatatgtgtctatttatatatattatcccgcaaatctctcacgttgcataaagtatattattaactatatatatatatcattatctttctataggattttagataatgtttcacatataaatatatacatacctgtttactaagattacatatggaggagaaaatatgaatacatgcatggataatgtttggacagttgttaataatggtaataatagtaatatattgacaataagaaaatgatttaaactagcaaacaaaatttggtggtttggtactgaaaggcactcgatttttatggataatatcacgatgtatatcataataatatggagtagtcatttctcataatatatatcaactacaactattgtattattatgtgttgtaattccccactaccatatgcatactatgaccattaattgcccaccatcttcacattatctatgcatgcatatgttcacttaatcatgctggcaggtccctctatccacccagtattataacaactttttatttatttatttattttctgtatatatataatttgatatatattggattttttggtagagttttgtcaattattttttattttattttcaaaatatctgcatgaactatcaaaactattactaattcttttttaggtaaatgagaaagtactattattgctctaaatcaaatatacaagcactgtttagttaggtattcctaacttctcaaacaacaatctatcttttaaattagttttcttctttttaagaagagaaaacctattacaaattattttcttaattctatttacaattgtatgcacagtatacattttgttctcccaaaaaagcaatgtttcttgcatcccaaatataatatactacaatatttatagttgttatatcttatatacacctccctgccaaacttggaatgtctacatctctttaatttatccatttaaacaagcgccaagctccatcttcttactatgaagcccaacccccaatcaaaaatctgtttacaaatgttattactaattcacaagtgaaaaacaagtgagagttagtttctttctcaagatcacacaacaaacaagtatcaatttgtatgcagtcaaatctcattaaccgatcccaagtttgtaatatttgcttgcaagctaagcaacaaatgaacttttgttttgggtcactatataacgattccaaatcagcgaattctaaactctaggagaatcaatttgaggctacattctatcacaaagcttgaaaatcgaaaaattcatgccaagaaattcattacaaccaatatgcctctttatcatgtccttcacttccacaaatttttttttccaataccaactcccactttgtggagcattatagcttcaccaatcatgacttttcaaataaaccgtattaatctactttacttataaattatctttcttttgagaaatatcccacacatatcttcccaaagcaccaaagttccattgctcaatattcctaaaccccaagccaccacgcaatttagaatgacgaatctcaatccaagaactaaggcctggcgaggaagaatcagtcgtacctttccataaaagattcctccaaatactattaatttttcctaaaatgtatttaggaagaatcatgatttgagcccaatagatatggatagccacgagatttgaattaatcaatacacatctacctgcataagagatatttttggtacctcatattcgaattcgagtaaccatcttatcaatgatactctgatcactttagagattttttttgaacaaataggaagaccaaaatatctaaaaggcaaagagcttctaacatatcctgaacagtctaagatgtgatgaacattatcattggtcatagctgaacaatgaacaactatattttactgacatttgcttgcaaactcaaagtctcagaaaacctcataaatgttctcaacatgagcttaatggagtggatgtctcctcaagaaaagagaagaagatcatccacaaagcataaatgattcaacttcaaggtagtacatcggggatgatgtttcttttttaataaacatattattaattttttggtaaaaatatatagatataatttatgagaatatttgtctacattcttatcacttgtgatgattgcataattagatatgtaaactagcagttaattagtgaattataattaagtgattaatcaattaattatgattatatatgcatgattataaaatacgtatattattcatcctcacatccttactcctatggatgccttaatggcacttagcttggattggtaggggaaagaagctgcaatgtgtggccctagataaagccaatacttaatggtcttctttccattatcaacatcactcttggaggaggatatacatttagggttcttcttctctactcctatactcttaccctgccattgattctcgaacttctccctctcaactttgttagagctggtttggggatttgtcttcttttaaagcaaattctctggggtgtaatcaatcaactactcggttgcagcttgagtcgtggctaggtttgtcacacactgcctctacaaattttgtttggcccatggcttttgtcctccaagaaaatagaagaatcaattgacttcgttcgtgtcctttatgtcaagcatcgatccaaagaatttttttacatgttctcggactgtcccaacttgctttaggtctcttagctaacatcgagccaagtaggcaacattttctaataaaaattggtctttcaattctctcttaaggtcatcccatgtgaaaaaccgtgtttttgcaaatgtcagttgtatata

SEQ ID NO: 162572 - DNA, 7480 bp, Cannabis sativa
tgaaccgcaccttagtcctaacagaattacccaaactttatggaactcttctgtgtttgatatcatgggtgatgtaggttacattacatcttgactgagattaactaaggttttcatttgattcatgggattgctttgcttggccttggactagttacgcttgtgccactttacttgagttgtgctaactcaccagcatagttcaacttgattgttattggctttaaatacttggtgattctttattgaaaaccaacatgacttacatgtttgtgtcaataaaatctgtgaaatatatttaataagcagcttatggagaataatctgaagtccgtttaatcactttgagcttgttgtttcactcctttcttgcatctttattgattaatatatcccgaataactttctcaatgagttgcagtcgtgtgacattcttgtgtggccgagctggtgtttgtgctctaggtgctgttgcagcaaagtatgctggcgatgaacgactacttgaccactacttgacgcaattcaaagaggtaaatttatttgttcctttcaaaagctaatcgttttgttttcattgattctgtaatggatatatatacaactctaattaagaaaaatggtcccggcctaaaattctcctttgcctcttggacagattaaactctctagtatattgccaaatgagctactatatggaagagttgggttcttatgggcatcatcattcataaatcatcatattggtagaggtacaatctctagtaaccacagtgtaagtgtaacttcccccttttatatctttgtgcctggctctgagaacagaatcacgtacctattaatttggcaatgaaattcttttagagattgcttgtggatgagatcataaatgatggtagaaaattagccaagaaaggaaaatgtcccttgatgtatgaatggcatggaaagaagtactggggtgctgctcatggactagcagggattatgcatgtcttgatggacatggaactgacacctgatgaagttgaggatgtcaagggcacgctacactacatgattgataatcgctttcccagtggcaattatccttccagtgaaggaagtgaatcagatcgtcttgtgcattggtgccatggtgctcctggagtatctcttacccttgcaaaggcagctgaggtagttccttgcatatttgttaagtaatagtagtagaaatgaaatacattatttagccactgcttatagacatgcaagtttctaagtctttttatgccagtttaacttaacccttcagtgtttccatccacataaaggcttgacgtactagctccttttctatttgtgaatttccttctcacttatacattattcttagtgaatattccttataggctttttcagtgggaacaaaataaggattttctaatcgtttataaccttaggtgtttggagataaggattttctgcaagcagcaatggatgcaggggatgttgtatggaatcgtgggctgctaaagcgagttggtatctgtcatggcatcagtggaaatgcttatgtctttcttgcactctaccgattaacaaataaagtggaatacttgtacaaggctaaagcctttgcatgcttcctccatgatagagctcaaagactcgtatgtgatggtgagatgcatggcggtgattgtccctactcactgtttgaaggtattggaggaatggcttatctctttctagacatgattgaaccttctgaggccaggtttcctgcttatgaactttaggttcccttttttctttttcttttaatatattaggaaaattacatgtatctatatgtggaatctatgtgagagtgtgagactgattggcttgtggggtaacactctagtgtttgaaaaacttatggtccgggactttctaaatttagcttttaccttcctagtactgtgattgatggagacttgttttggatattgctgtggcctatgcaaggcttgagggtaacaactagcaatagatataaaatttaaagctgagttggtaaaagcagaaactagtctcatagaagtagaagtattactcccacggatttaaactaagattgcatttgattgtaagtaatgaaatagaatagaattaatttttttttatttggttgcattttaaagtattggaattaattttttttatttggttgcatttcaaagtattggaattaatttttattttatttttttgtttggttgcatttcgaagtattgaaatgtaatttcaattaaatgactttttcaccgcttttgtggacattttgaaatgaaagatgaggaaaacattaatatttttttatttatattttaaatttgattccattcaattcttattcttattcccttcatttttatttctatattaagggaagagttttggtaaattggtttatctgaattgcaaaataatgggcaacaataaaatgaatattgttattcgtcatcaaactttggaagttaataataagcggttttaattttattttttgaagaattttcttgaaactatatcctagttctcactaaattgatgtgaaatcttgatacaaattgattttgcagagagtctttgttatctattatcctcttcagaagtattgttaattgagatgtactttccaacaatgctgtgtttttctttattattgaaagtggttgcaaacactcactcctaaatcatctacaagagaattttctctacagcaaaacaaagcttcctaaattctccaaacccaaacactgtaaaaagaactctcacatatttggtaacagaagagattagttgagaaactcaagttggtaatttattaggccaaacccacaagcttttcactgatatcccacactttacgagccttctcaacatcactagcttcctgtgacaattggttctcgaaggaagctgaagccttgttccagctccagtaaacccctgactttgtcaagctcgggtcgctcacaacctgtttcacaaaacagatatgttttttaagtaccatccatatttcttttatagttcaatttcatgataaaatcaccactcaacaattacctgagcaagtcttttgccagcatcctcttctgacacatatcccttggtgatgtacttttggaatggagggaagagaagcttgaacaagggaatgtgctctctgaacaagccagttgtggcaatgcagccaggataaagggaagcaaatgtgatccctgtttcctcatgaaagcgtctatggaattcctgcatggtcagcatgttgcagactttgctgtctttgtacgccttggcaccgtcaaagtctccaccatcgatcatggatgacgagtttagcccgtttagtcccccagcaagccccctcaagtcacctaagtttgccttgggaggtacatttccagccaaagtgtttgtgttccctgaaatagtttatagccagccaattgagagcatcagcaccctttgctctaactaattttccttgaaattatttactattgcaatgcagctaaacattaggagacatcaatcacatcttcaatattaattttaagaagcataaacagtaccatttgaagaaattataattcttttgaggactttgttgtacctgttatggagccaacaatgatgagacgcttcgaagggtaatcggatttgttcaagtcatcaataagcaaccttgagaggagaaagtggccaagatggttagtcccaacactcagttcaaacccttcagcagtaaacgaaggctccttagctgttggctgataaacagcagcattgcacacaaggacatccagtggcctctcggactggcgaaagttgttcacgaattggcgaacgctgtctaaggaggccaggtccaaatgcatgatggtgtagttttctttgctaatgccagcacctttagctgctctttcagtcttcagaaagtccctgcaggccatgatcacatgccattttccactctcagccagagccttggctgttgctagacccaatccagaggaggcccctgtgactatgacactccccttccttagagttttctttccttctgaggatgactttgtcactgatggggttgtggtgggcgttgtctgagctttcactggccctgttctctgtacattattgatcagaaaataaaaacctctttgttactaacaaacccaaaacagcaaaacacttaacattgctcaagtccaattaagttattttatactcaattatacaatagaatttacccaaaaaaataaaatgagaaagaatctaatgcctttttttccactgaccttgcacctaagagcacaagaactgaattcagctttgaagtggtctagagaaactccaaacaggtttgagtccttgaaagaagcactagtttttgcctgcaaagcaaacgcatctcccaaattaataaataataataataataatcttatttttgctcacatcaatcaatgtattgtaatgcaatgtaatggttaactaacctctttggggacagagaaagcagagggaaccaaagaagcagcttgaagagccattctcactaattaagggtactcaaaacaacttctgatactgttggactgtacttaataataatattaatagaggtgggttattgtatctgaaaactaacgaaaattcaggtttatatgtagcgtgacatttgaaagatatttggcagaaagcaggttttggatatgagaggataagataattcaaagcatgtgactctgccacatcatattagacagaccaattaggatttgaggtctggatttcattttgatattttttttgaaatatataataattgttgcctgttataaggtttggaggaggtggaagggatattttggtcagatggctgaattgtgccactacctctctgacttcctgtgactgtgagttatggccttatggccttatgggttatgggctatattgtacgcgaaagcgaaatgtttattgatagtgacagagtagtggaggcattgcagtggattaggattacagacgttggtttggagtgaggttctttgggattgggccacctccaaacacaacaaaaatttggcccaactctcctaattgttatactttaacataaagggtgaattagcatttttgcttgaattttgacgcgtttaaattttatgtctaattttattcaattttgtcaatgtgactattatccatgtactaaattattctctctaaattttaatatctactaaatcatgtctcctgaactttaacatgtactaaattgtgcttcttaaatttttatcaatagactttatttaataaaattgaataaaaatccttaattataataatctcaataatttaggaaaaaaaatttaacgatctgaaaagttcaagaggtgtgatttggtatatgtcaaagtttaggaggcaaaaatttaaattagcctaaaaaaatattggatacttcattcaaaaggggtccaccgatgtattcctatctatttcagcttttttaaaaaaattagtctaatttttttcatgatcatctatactgtagttatttaagacatcttgcaaaattttgagagattcaaaaaaatttaacacgccgaaaataaggttcaaactgtctattgcactcgaaactcttttattttatacgcgtgtgaaaaagactgtttggaccatatttttcaacatgttaattttttttaatttctcaaaattatgttggatgtcctaaataactacaatatagaccaacatgatcaaaattagattaaaaaattctcctaaatgcccctaacacctaaatgggatcttaaactcaaatattcacgtataatgtcacgtattggattatatgttaatataattcctcattaatacttaattaagttatttaaggttgttaattcatatcttatttttcagaatatcacaacaacagacttgaaattgcactcttgattttataaaatactctatatgcatattatagataaattgaaaattatccactattttaatgaaatcaatcaatgatcttctatagatagtttacaaagagaaggaactaaaattaccattttacctctcactgtatcttatccttgaacgcttaatttcttgtaaacgtatttctaagaattaatataattaattaaataagatctattcatttaccgtatttaaccaagttcaaagaaaatcatcgtttcacttctaacatagaagctataaaatgcctatagctatgattaacactttcactcaattatactacaaagttctcaagatgtaggtatgggctaaaccttagggtaagctggtaacgaataagtaaaataattcgaatagtaggattagcttaaagcttaatcatgttaggattcagatcgaattgatctataatcaactaagtgatattgactgagaatagatataacagtaggattataataactgttctcttgtcaaaatccaatccaatataaatatatacatttaatagaagtctattttaccaatgtcttggaaaagacatatcacttgccatagtttaagtaagtcaaatcgttgattatcgcgttagtgtaaatccagtacactaaaaaatcttaagactaaagatatttgaaacatataatcataattatttttcactatgatgatattagtataattatgaataacaatatgttatagatataataaaatctatgtatattaaatatataattatgtaaataaacatgtggacaagggattgaaaaagtcaaaatatgatttctgaattttattgagataaaataatatttaattaaatttaagtacgggcttaggacataaaacccaacaaaaacaccctaaaacaaattaaaatgaaaactatccgaatatcaaaatatacaaaaagtgtattgatatactaattttaaggagtgcttcacataaatagttttccataattttgtaactataattttgattaatttgtaatcttcttttgtatactaatgagatattctttcttcttttttattttatttatttattattagaaacaacaaagttcatgaaagatgggaaagattccctccccttgtaaacactagccctttgactagaacaaattctagcacttttgggcatacaacctgcaagcatactgtcttcacgaaaaataaaatgaaatttacttaggaaaataagaccatgtccaaagacttcaatacctgccactgtagaatccgagagaattgctaaagaagttgattggtttataatttaaaataggatttttagtgatttatcaaaaaaagaaaaaattgtgtgtgtttttatattacacctaggtggcgtttggttgaaggtaatgaaatggaatggaattaattttcattccattcttttgtttgtttgcatatta

SEQ ID NO: 162573 - DNA, 2804 bp, Cannabis sativa
tttttttttttttttttcagggtgttttcagaatgtagtttaggatgttttatctatgttaggctgtttcgaaacccataatgattagggtttgtccagttgtgaaattagggcttattttgggatttggttaagttattcaccaagttttattgttgtgacataagaaccgggatcgtcgagcattattcaactcaggtcgacccacacacctaattttggattcaaggtaagaaaaaccaattgcactacttagcatgtcaaatgtgatacaattattatcgtttgtgattggattataatcgaggtaaagatacggtaattatcgttgttagaaatgagttattactcacttttgaaaactgctgataggttccttatttatcggttgcttcataagcaacgatagtgacatataaaactcgttggtaacgagtggtaaggatactttataaagcatcaaggtcagtttgtcttataagacaactagttgtttatctttactgcattatgcttgaatgagtatttagtctatatgatgcattattttgagattatgctttattgtgttgatcatgttttatctgcttttcttcctgagtcttcgtcactcacgaggtgctctgtggtataggtaagggtaaaggaaagctggaccaagcatgagtctgaggtctctcgacaatgtacatatcagtcgctgcatcttggctctcaatggacaggatccatcttttggctgtattttgaaaatataaccttattttgtaatagctattttgttacatggtgtaaaagtttataaacaaggggatcctcgaaaccagtagtattttgtaagaaaagttttaattatgaaattaagttattttattaaaacttttagttaaacaaaattttcttaaactgtaagtttattattataaattaattgataaaagcacatacgtggcgcctttacgagttagggcgttacattggtgatctctaattttttttcgtagtgaggttgcaaacattatcttctctttgttgttgtagaagtcatctcctaatggtgttttctctttgaaaatggcttactgggatttgaacaaaactagatttatgcagtaggatgagatttacttgaaaatttagtcttctcaaattcatgatcgattgaaattatttttgtggaagatgtataaggattctctcccttttggaacacgtctagctgtaattttggcaatacggtgggatcttgttccttatgtggagaggattatagtgattctgcagaacatttctacacaagtgtcccataactaaaggtatttggttctctagtgtgtgcaacattcgcactgatgaaattccttttcatttgtggagaggttgttaattggatttttaattcaaggattcttgatgctaataatatacagggtaacaatgatgattttgtggtttttgctgttgtcctttactattatctttggtactttaaggatactaattaccataacggggagagatggcttacaggagagatcaaaaacaagatcaatgtggcttttcttcgctatagaaaggttctcatgactaaaggagtcaatggcaaagttacgggcagaatacatgacattcgctaggtaagattgtctcaagcttcaacaaggccttaggcaaagcttgaacaaggccttaggcgaaaattaaattagactttttgacaaaattattaattatatcagtttattaaaattttatttttagttagagatatattaattaattaaattcttattattaagattttaatttttatattaatttcattttattctttacatgttgtattaataatcatcgatttttttttttttttgtcttcataaatgaacttcaattcatttataagaatctttcataaaaaattaaaccaatagtcatacaaatgatcacaataaaataagtataattgtaaaaaaacattataatattatttagaggtaatttatatataaaatttcttattaagaaaaattcattaattattaattgatagttccaaaattttagattaattgaaatgtaatattcacatttagtagtaaatattaatgtttaaatttattgaatttaattgtttcaaaaaaaaaatattgaatttaatgtttatcacctatatttaaaaaaaaaatgtatattacctttaaaatgtaagtcttaaattatgtgaggccttaggcaattgcttaagttgtcttatgattaagcttccactgttgttgaggtatccctaggtctgtgaaaattcgagtttatgtggcttatactagcaaagcgggtattgaagttgtcggggtggtggtgcacgattggaatggagaagtgctggctttgagtgctttaaaggtgactatcaactttgctattcttagcgaattagcagcgactatttctggccttgaattggctcttcagtttaattggggtgacgtggatctttttacttataattaaaggattgtaaaggttgtgttagataagattccaccttaatgacagtgacaaattcaaaatttaaagtgagagaggcgtaatttttttaataagataagaggcaaaattaaacttaaaaagaaaaataaatgctcttggtgagatttaaatccttgacttctataatatatgtaatttagcttaaccattatacaaaagctaatattatatttataaatattatcttttattacaaatatatgttgtaactaactaatatatatatatatgaaacacttcttaatgggtattac

SEQ ID NO: 162574 - DNA, 2961 bp, Cannabis sativa
tttttttgacacaactcgaaattatcgacataaatttaggtggcaagaacacaattaaacatgaaaaaatttaatatgaatttaaatatgatacaacaataatatatattggtacgatacaatataaaaattatatacttaagtacgatataatacaaatatgaatgatacaacatgtaagtacaaaaagactaatttaaaatgcacagtatgggacaagccaaaaatatacagcacaatacgttaaaaactctacaatttattattaatgataaataaataagtatttgtcaattatatataacttaaaataatatcaaattttcaataatattttgaatattataattttataattaaaattattataaaatataaaattaaaattatatattcatttattataagttataacataaaaatttgagtatttataagtaaatattcaaattataataattttatttttctaatgtaaaatattcataaaaaattatataaatataattgaaattatgaaaagtgtatttaatttagtaattagtttattaattgtaaaaataaatgctaaagtaagaattcaagcttgaatatgaaaatcgatcggtccaataaagtataggaagaatctgagcatagcacgaaaatacttggtctacaggctgtgccgagcatatcttttaaaaaatttgataggacacgacacaatctatattatctatggcattgcacgacacgaccatattttaaaaaacatgatataatatggttcggactagcacgacacgcacaaatttacgatactagttaaacgtggtaaaaaagtaaatgtggtaaaaaagtgtgggcaacataagagagaagaaatatataaaaataataagttaatttgaatttttataatctcaattttgatatgtataaaattatgttcctggttgaaaattttctcaaactattaaaattaatagttgttagatttaatgaattttatttaattttattaacgaaattctaatataataaaaatttaagttactatttggttcatggtaatgtttaaaaaatccaatttagtatatatataatcatcgtattaataaaattgattaaaattagataaaaaaaaattatgaaagttaagtatggaaaaagtcttggctacaaatgtagaagtgatatggaatcaatttgggtaactactttatttattgaacaaattagagatgcccaaataaatctaatcgatttttacatgtatataatcaatactaaatatataacttgagaaggagaaaggaaaaaattataaagggaaacaagtgtcaactaagtcaaggagataacgagtaaaatattgccacgtaacaagtacacctactcttgaaaacaccagattattctttccccttctaaacactctgagaaattcagttgaaaaacgagtaataccaatttctttttttatttctattttttcaaaatattttaattcaatttattaatttaaaaaaaaaaaaaggaaagtgaagaactgagaacggagtaaggcggtggtagcagtaataatatttttgctttttctctttttaattttttgttattttgtttatgaattttcttttataaatagacatgtaaaacccatgatttaagattcccccaccactcccaccacctctctttctctctctaaaaataactagaaagagagtgttgtttgtttcgcgagaaaatcagcccagaaaatgatttggtcaatgtctacattccttcacatgagtctcttctcatcttactctcttctttttcttctcatagtttccaaaggtattaattaataaaaccaactcacgttcttataaactcttaaatattttcacttctaaccgatgtgggactcatttcaagctaatattatttactctgttttctctttcttcttcaggggtttcaggagctacattcacattcataaacaagtgtgatttcacagtctggccgggaattctcgccagtgccggaagtcccaaactcgacagcaccggattcgagctctcaaaaggtacatctcgtttattccaagctccaacgggttggtccggtcgattctggggtagaaccggttgcaccttcgacaattcaggtcaaggctcgtgtataaccggagactgcggttccggtcaggcggaatgcaacggtgccggagcaactcctccggcgactctagcagagttcacactggggtctggttcacaagatttctacgacgtgagcttagttgatggttataatcttcctatggtggttgaagggagtggtggatcgggtacgtgcgcgtccacggggtgtgtatctgacctcaatcgtagttgtcccacggagcttaaggtggatggtggtggagcgtgtaaaagcgcgtgtgaggcgtttgggttggatgagtattgttgtagtggcgcgtataatacaccggcggcttgtaagccgagtatgtattcggagatatttaagtcggcttgtccaagatcgtatagctacgcttatgatgatgccacgagtacttttacttgttctggtgctgattatactattacattttgccctaatcttccaaggtaatttctcttctttttttaattcttttttatatatagattatttttgattaattattttgtaaaaataattgattggacatttataatgataaattatattatatattttttgaatttatttgttttagaaattatttttaagttatttttatcaaaaaaaaaaatattaaaaattgaatttgagtactattttgtattattttgtaaaatattatgtttaatttgtcattttataaaacaaattatttttacggaatatgtagtctaaaatagtattaatcttaaattaattgagttaatctactaaattgttatttcaaaaattaattttttattaaaa

SEQ ID NO: 162575 - DNA, 4277 bp, Cannabis sativa
  modified_base (3746)..(3748): a, c, t, g, unknown or other
  modified_base (3797)..(3803): a, c, t, g, unknown or other
  modified_base (3879)..(3880): a, c, t, g, unknown or other
  modified_base (3926)..(3947): a, c, t, g, unknown or other
  modified_base (3997)..(4016): a, c, t, g, unknown or other
agaaacggtctatgtatgtatgagtccaaaagagccactgagtaatattacaaaagcaatcatacacagaagaagaataattcgaacttgcagtctctatgctgcagaccctccatttgtgctcctcccctctcttcccatttctacttaacttctctctctctatatatatctctacatattattatatctataaatgtatatatagggatatatattctctttagaaatattaacctgtcaactattattgtacccattttgatttaataatagtgtgtaaaacaaaccaattataagaattaattaatgtttatacgataatccactttttaaagtgtcaaatatcaataattagtgttgcccttacaaatatttgatattataaatatcaataaacactttgagtgtgtttccctagtccctatgtagtgtccccaaagaaccgaaaaagaaaaattaaccttatatttttttaagcacatagcttcccaccactaacaccacttccagtggctaacggtcgtttctacggggatgaggagaggaggagagttttgccattctgctaggtcaggggggccacttctctaatatctctacttacccattcatagtttaattttatcaactgttttaagagcattgtttttaagcaacgtggtgccatgagtgttcaatatatggttaatgtttttttcttatattatattgttcaaataataatataacataatagatagtataactataaactttgtgctaaatttagactcaaataaataagttaatgatatacttttgtctaaattttacaattatatattctaatatattaagtataaaaaatttaacttttattaaaagtaaataataattctttaaaatttggggcacatttttttttaaaaaaaatactattatattaaacatgaaagtgcaaatacaataggcattagtagcagaagcatttcttcccactaagaacatttagtatccaccgaaagtacaaattttgctaacaaatgagcagcattattagcagatctataaacatgagagatatgagcactagggaaattggacactaaaagtgaaatattgtctaacaaacaatcaaaatcagaaactggcatttgtgtagattgtaatcttttaactaccaaaagagaatcaatctccataaagtgtaatggtagatgaagttcttgcagccatttcaaattgtgcattagagccatagcctccattatttctggtttaaaacatcctcgaaaggggactttcatggcagcagcaatatcacttgaacaattccttaggactgcaccacaactagtaatttctttcattgtgtcgactgcaacatatgttttaagcttcagacggcctgacggaggattcaaccatggagcatcccgagatgcagattttgcaagcagattgtcattaggattgatgctggttgaagcttttctagcatcatggtattcctccaggtaagaaagagcaaagtaaaggataacatcagcttgctttggttttgtgctatgcatctctttattcctttcgctccatatacaccaaagaatggttgcaaattgttccagctgcaaagaagaccaagttgcagcaaaatgcaggattaattcattcaacttcatatggttcgatatcaggacatcgagaccaaaagaggatagctgccacacttgtcgagcgcgtttacagaagaaaatgcatgaataatggtctctttgtctcggttataaatagtgcaggtggtcgagccttttatatgtatggtatgtaaaatatctgctactggaagacagtcatggattgcacgccagaggaaaatgcagatcttcgatggtaatgacagcccccagaattttttttaccaaagttctacttggatgccactagctgaaggagtctgatcttctaaatgcattgccaaattatagccatatttaaccgtataattaccatgtgattcatgatgccacataagactatcttgttgctcatctaaagttagaggaatgcttagaattttgttgacatctgaatccaagtataaattacttaaaagtgtatgcttccattgatgagaattcaaaattaaagctgacactttcattgtagtatcctgtcctcgaaaaaccaaaggcttaaaggaggtgaaacctggcagccaaggttctgaagcacaaagaatgttagaaccattatcaaccttcaaacgaagacctttgataagtaactccttgcccccacataatgcccctccatgttaatgaaggataagaacccaaaccagcatacaagaatgaacaatctttgaaataccttgccttcaagactcggctaagtaaagatgaagggttagaaaagatcctccatgcttgtttagctaataaagcttgattaaaatggacaaagctcttgaatcccattccaccttcaacctttgataaagaaagtactttccatgtcttccgattgattccattatatgaagagttagagcccctacaaaaatttattcatcatggtctcaatttgtttgactaaagatttagagaaatggaaacagctcatagcatatgttggaatagattgagcaacaacctttagaaggatttttttgccaccaatggaaaataattttgcttgccatgcggataaaaggttccataacttttctttaatttccctaaaaagaattttcttgtctctacctgagtaagaaggaagacccaaatatctttcgtggcatggcttaatcggcatttgtaaaatttgatatatgcgtgtttgaactgctagaagtgcatttggagagaaatacaatacagatttcttagtgtttattctttgaccggaggcactgcagtaacgatcaagggagcgcttgatagcagtagctaatttatggtttgcacgacaaagcacaatgttatcgtctacgaagaataaatgcgagacagttagggcaccacgtgaaacctgtaaaccttgcaagttacctctggcttcttcctgctgcaatagtcaaaaaagacctttagcgcaaataataaaaaggtatggggacagtgggtcgccttggcaaattcttcgagtaggaaagacatgatcctgaaccttgccattaacagagaaggagtaggagacactgcttatgcaacggataattaaactaacaacatccataaaaaaacccataactacaatcatactttgcaagaaatgccactctaccctttcaaaagccttactcatattaagtttgatggtttcatagccctgttttcctcttttcaaatgtttcaaagaatgtaataattcaaaggctaccagcacattatccgtaataagtcgagattgaaggaaagcactttgtgattctgagatgaccaatgaaaggaagggcttcaaacggagcacaatagatttggaaaccagcttgtacagcacattgcaaaggctaatgggtctcaattgtgacatagtattaggctttttgaccttcgatatcagattagagtttggttgaaacaagttgggctgctactatcattaagaacttttgacattgctgtagtaacaagatcccccaccaaatgccaaaaattggtgtaaaacattactgacataccatctaatccagggctactatcatcactcatagaagaaaatgcattgtatacatatgttgttggaatatgttttaccannntctagatttactaccatgtatgtactttaacatcctaaatatgaatttnnnnnnnaatgtaaataaacatatataaagtttaggaaatcttacagtgggtgcagctgaatattaatggctccttccactcnnatctctaacccttatatcctgtctgtagtagagtatcaccaagatnnnnnnnnnnnnnnnnnnnnnntgattctggattcttcacagccttacacacaatgattgagataccacttnnnnnnnnnnnnnnnnnnnnctatcactcaaggtatgaaattatgatgaaggaaagagaagtggctggttcaaaatagaatagaatagaaggctcaggaaaatttgactaaaggtgaattttcatcatctttaagtgtgagccatcgctatctatttataggcaaccatcgaggtttaggttaggatttattaggcattaaaataatgaagaaattaaatggaaaataccacacaagtgtccggccatggatatgggccccactttggaattttgccattt

SEQ ID NO: 162576 - DNA, 2706 bp, Cannabis sativa
  modified_base (454)..(454): a, c, t, g, unknown or other
agagagagagagagagaaatgggaagtttggtgttttatttatttaggggtaaaattggatgaaaaatgttatccaagcatattttgcatgatgcaaaatagggtagcatatttttagtgggtaaatttattttaatcatataatggtaattttccctttgtttttcgccaacttcccaaaagatctcataacaatatatatatttttcatttatatatctatgatcttttgtatttttttgccaatttagaattttagttgcacactcaataataataataaattaatagataatcggaattaatgagatgcgccctatatgggctggggttgttccatcgtatttaccgaggtttttggaacctaaaatatttaggagctaaaaaaataacaaaataaaaaaaataatgagatggtgatatttggtttaggtgttaattaaccttagtccangagtcagtctattagcctctaaagacatatttaatgagtttacagtattttgcatgaaatcctaactctatactcttagtttctcttagagaagaagaatacttagagcaatattggcaaagcttcgactatttaggtggtaatccccccattcatatagaaatagaagggtatataggctgtgtggcgggtatggacatgcccatgacccgcctagggtttttgcgaaaagcctactaatggagtaaattacatgcaaaaagagctaaccatagggccccttggaaataattgtgctcatgcgtgcatcagctggacgattaggtaccattgtacttggtgggcacatgtcaccaaaaggtttaacctttaaaagtggaggcatagaataaatgtttggaaaaaaggtggatgaggtacgcacactaccatatctggacaaaggggacaggatctgatcctgtgtccgaaaaagtataaccgttgctgggcaattcgggttattccaaaggtagacgtcttcgacactcttgggcggtcaatgtccatgattggccttttgagtatccatttgagtatcgattggccagattctaggtttggacctctttgtatcctggagagacaatatgtcttctgcatccgagaagcaaagatgaagcgaggtagacatccccttatctcttggtcttgacttgttcccagttccgtgaagcttctctgcaacaagactattatgggagatttcaattagggagattacgagattatctcttcctttttatgctacatgtcactcattgagaaacacatataatattgagtcccaagtttctgggactcttcgagatctaggagctttcagtcttcttccgcttcttaaaaataagtcttttgacacgtggtgattgttagggttacgaacgtggcactcatgcggcgcctttaatgtatctgtggctagcatgcacatgcaaggtgtgtgtgctttcaagagagttgcaatactcgaggagtgcaatgataaaaaaaaatgccctgagcctgttttaattgccatattttcaactttccatccattggatcaaattatgatttttttagagaaaagatctgggccattcatttcgaattgcatgtttttggtcgaagtacaaatttattccttcaatccatcttgccatttttcatcactttaagccttcagaacccccattttagacttccaaaccaaagctttttgctttccagaaaacttccatcttgcaatcgtctcttgtggtgaatgcaagaagtctttaagtgcctcatccaatatttcttcacacagctcggtttccagatgcaaagctgataaaccccgaccttctccaccctcggccagacgagaacttcgacactcaagctggttacgatcgcgtgattgactaggtctgacactcttggcagatttccgcaacaacctttcattccccactcaaataccaagtaagtatcccgatgctttgttcattttttgctatttcatatctaggatagaattgcttagttcaagctaggtctaggttatctggtatgtttgaatggtggaatgttgcccgtggaaatatagttccagagtaagattgtgtgggaagttttgcaccatgagagtgtcaatattgtgtggacagtttgggtatggccattcatactgcataaacacttgcatgcttctatgattttgaaattagggtttgaaccaagcatgatgaacttttaggtaaatacgaggtccgtccatcttctatgcatcgatttggaattttcaagactccaaatggacttaattttttgaaatatttctttagatttcattttggtaacttttccctgggttcccaatctatcacttcaggttgtctggtgaagacaagcttttaggagtgatgggtccagcagggaccactccgagcaatttttaggcgaggcctttcccaatgcccattttgtcatttggatagtgggtgtctaattccttggctcttgttttcctttcatttctccagtgatggatttgaaccaggagttccatcttgaggcggtggaaattaaagaaaacaccacagttgcctatgttgagggaatggccactaagggaactcaggcagaacttcctgcaggggaacttcatttgggtgttgtgttggaaatattttgccaggatctagatttactaccatgtatgttttattaacaacctaatatgaatt

SEQ ID NO: 162577 - DNA, 2045 bp, Cannabis sativa
aaattaaattaaaaatagtccataaaaccaaacacgggattgtttgagcatcattcaattcaatttagtcatttttagtcgaattttgagtttcaaagaggctccaagggttgttctcatagagagtagtatgcattgtctcatttcctaattcattgtaaactttttaaatgagtgtatcaattcatctattttgtgttttcaatatttagatattttaattttaattttttaaaaaataatgtatactgcagtataaaagacattttatgaatttcttgaaaattcataataacttaacctactaaaaataagattcaaaaaatttattacacaaatacatttttttatttcattcaaatgtaaaataaaccgtttcaacattactttctgaattataaattattttaaatttcttaaaattttaaaaatattttaaaaaactattcacacctccaaaacacaaaaaggtgcatcagtgtaccaaaaagcaccttattaattcttttattaaagatatattatttcttaaaaaataaataaaaaatctttttttatgcaactaaaaaactaattttaggaaataaaattggcacttttttttttaattattattattattcggtgtttctataatgtattccactaaaataggtacatttgtgccctaactatttcgacatctaaaaataattttatttaatttttttcataatcgtgcatcttatagttatttaagatattctgtaaaattttgaaaaatttagaataatttacaataaaaaattcaatgttaaaactgtcaatttcatatgcgtataaaataaaaaagtcacgcgtgtaataaactcttcgaactttaatttcggcgtgttaattttttttttttttttttgaatttatcaaaattttacaaaatgtcttaagtaactataatatttataataattaaaaaattcagtttttttttttttttttctagttagcgaaaaagataagagtatatcggtaaaccttccatgaattgtagaattttgaatttaaaaaaaaaataaaagtaaaaaacaatatatagtgtagcgatcatattacatatttcctagaccatcacttctttcattgactattatacaaacatactgactttagaagtgggtctaatttggtctttatatttagataagtgtgtgtgattctatattgtacaagttgtaatgtacagaactagaaggtaataattattattattaaataaaataaaaggatttttttttttcttgttgtagagttttgccttttgatttttttttttatgttgtgaaaaatttatccgaactatgcaaatattctcctcaagttacattttactcattatttaaaacaatttacttatatgactatgagtaacaattataattataatctaatgaccgatttaataattttaagctacttaaattttaatttttttttttgacgtgaaattttaatttattaatattaaatatacaaacaatagatctaagaatccgcatatatatctttataatattcatttgctatttgtacatttatttttttttgtctcgactcttaaatcatactaactaacattgcattagtgttatttcaaaaaattgtttaagaaattgaataaaatacaactatagatggatatttacaataatttttataatttaagaaaacttcttgcaattgagaaaaattcaaagagataaaactttacaataaccataattggggagaattaaccatatttattctaaattttaaaaaaatatttattctattaaatattattatatataatatttgtaagtgaacatgtgtgtggctataaataattacaaattgtgatatattgagtacatttatctttattaaggagaaaaaattcttacattttcaacagttataaaataatataaaattatataaagtagatgagaagaaagaagaagaagataaagagagaaagagaaagtgaatgagaatttctttgttgtttattccaatggggtgaa

SEQ ID NO: 162578 - DNA, 2829 bp, Cannabis sativa
tatatttattctaatttctcatggataaacttggaaaaaaaaatctcagaaacgtggaatttttttctacactgaattgaaaatgatcattgtatgaattttcaagtgaggcaagtcaaaaccattttaagatctttatcatgtatcatctttggttttggagatctaaagtgacaaatatttagttttaaagttatcaatgttagcgtaaaaattgtaatttttttaatgagaaaataatttcagagaacattacctaagagcgaaaagcggctgagaattatagaaattcattaatttaaagtttcaaccaaaataaggtccttaatataatttggataactaagctaccaaattatacttgttgtaccagaaagaggaaactaagcaatagaatcaacaacattaacagatcttggacaataattaaaactcacaacaaaaaaaataaaaataagtgatctaatatcatcaagaattaaatctaacgaaaaatctaaaataaaaaatattattaagcttgtaaactaaatttttgttgtcggtatctagttaaacattggtgagtccaagagtgacgcattgagacatgacatttttgatagcaaggctcccaataatctcaagggagacaatgcgtgacactatccaagtaccaaaggcaataacatcttcgaaggagtttgaagtttcaaacgactatgccaaaaccacaagtcttcatggtattctcgatggatggcagcatccatattgatacttaatagttactttacacaagtattttcttaaaaaaaaaatacataaagtttattgaagcttgtatcgtttgtttttcagaacaaaaaaaaagtcgcaacgccaacaaggattatataatgttagtagtctacaaaattatgtaaatttttgtaacttgacaccaataaaaaatactatagtagtttatattcctattttaaatgaaatgttaggggtcttttctcctcatggtgttggtggttactctgcttgatagctttttctgatcatggattgttgttttgtattttctcttgtcttgttttaccatttttgttggtataataatagtgttctgtgattaagtcttttgacactttgattttaggccctttttatgagtattgtctcttgatttgatccagttttgggatgttaaatattttcttatacctgaataaaaattgattaatgaaattaatttaaattttacaatcctattcaagatttatatagttttagaaacaatatttcaatcaataaatcaaaactattcaaaataatctacctaatttttgtacatatttatttttcttataattattaatgaaggaaattaggtgataacttttcttgaattccaatttagtactttagttattgttttgttttgataattaaggcactagattttgagttggttatgctttgagtgatattttatattcgttgagatttgtgttttgagtttttagaacgttgtttttagctaaaaactaacacttttggctaaatttcttaaattttggttgggatttcaattttattttgtttaattttgttgagtttgaatttacaactttgtgtgtttaaatttctttttagcttattgatttttagttcaaagattacttttttttcaatacatgatgttgtttttgttatctttcacattcgctttctctggtcacactatcaataaaggaatggtattttttaatgagttgttgtaattattgagtatattataattttattgtctaaatttttggagacagttttatcctatgtgacatgcgataaaaattctgcagctcatagtttggcaaagcctttcgattagacaataagttatcttggttcaaggaaatatatatctgcatcgttaatttagatcactacatcaaaaattttttttttttaccaaataagcatataaatatatataattatatagattttctttgaatttgattgaaggaatcaaattaaggagaacaagaatgatcattacagaacacaaggggaaatacaaatcaagtctagctccccaaatctgtttaaagtcctagcctaagcagtcaggttgtgagtataaaagttaaaagttttgaaaataaacttaaaaatacaacaaaaaacagattttttaaaaaccttaatattagttaaaaaatcttcaagctgccaaagattgatatttccgttgaaaatgttgatgacaggcaggtgtacatcgtgcgagtttgtttggatttgagtttcgggttttgcataaccatatatcgaacttgcccaaataaaaatctaacacattttttcgagttttacgagtatgggtcggtcgggtcgactgggttaaggagtttcagccttttaggcagatacgttcaactctaattctgcataaaaaatattatttagaagaacattatttattgaaagctagttttatttaagttatttagaatttttactctccaaactattatatatgtattattgtactttttgggtttttttttctcaacctgttaaaaataatcatggaattattcacaatattgtaaagtgatcattttattaaattttgtcacacgtagcaaatataaatctaaatatttaaattattatcacatcagccttaccagtgtaattgaaactacaataattaaaaatatgtagtttgaaagaaaaaaaaatattaaactaaaaaaattaagtaaaaataatactaattttaatttttcttaaaaatacacacacaacgctgataagagtgtcacaaaatttaataaaatgaccact

SEQ ID NO: 162579 - DNA, 2155 bp, Cannabis sativa
ctgagtgaaatttatttggggtctaagcaaaagagaaatcaatgttgaggtggtttttttgtatgatcagatacacaataataatttgggtaacattaaacattacattaactctattacttacgcagatcaatctatttctattttagtggaggcgtgatctcctcccctcaagattaggttaaattaaattgtaatgttagagtaaggatgaaagacatgtgtataatggtagttgctagaaaccatttcggtgtggtggtttgggcaacttctaagagattgtgttttcctaacctactttgtggcgagactacgacttgtttcttggctctaaacactctagtgcggtcaccaacactagtcattgtgaaagactttcttcctcttttgtcagttgtttgttttctaatattgcatggacttacagtatattggatatattctctatacctacgaacctttttataatgtctgtgaaatctaattttaattttaatttatgaacacttatttaaaagaaaataaaattctaattttaatttcacatacacatacatagaattgtttacgtgcaaatagttactttaatctacctgttgggatcagaaccacttttatgtctcacatgtttatttaatttattcatatgccaaaaataataaaaatgaatctaaaacatattcgtatggtttactcaaagttcctataaacatcatcagacaatagagtacagcattgctgagtgtacccaaaactggcaagcatgcccactaaactcaaccattcgatacaaagttttattacatttaaggcaaaaaagtttcagcaaaacaaaaaagaaacacaaatagattatgataatgctaaatggtatctctattccagaaactgaacttcattcctaagaagactaataacaaaaggcactctagtattgaatagtaaaaagtgcccacacaacaacaacaacaaaaaaaaccttcgaaaaagccctagtcggctttggaagcagcggcggcagcttgtcctcggagacgaccagtcctcctggcagcaatgagaccgaccttttgcccaggtgcagcgtctcttgcaattgtactggcatgaccaatgtgctggtggttaccaccaccatgaggatgctccacagggttcatagcaacaccacgaaccttaggccagctattcctcttcactctgaacttgtggtatgcatttccggccttcaacattggcttctcggtcctgccgccaccggcaacctgaccaatcatagctctgcatccacttggcaaaatcttcttagctccggatggaagcttaactctgtacaaaatgaaagcaatttaaggtctaaccagaagccacagaatcagaaaatcagtaacgaaacccaattgggaatttagattgtcaatccaaatggcaataatacctttcaaaactatggttaaatgcaaattcatatcaagataagcatcaaaataacacacattaactctttataaaatgaaaacaatgtaaggtctaaacagaaaccacagaatcagtaacaaaacccaattgggaatttcgattgtcaatccaaatggcgattatacctttcaaaactatggttaaatgcaaattcatatcaagattataacaatacataacacacattactgacataattatacatcaaaatggactacattttctccatttcctcatttgagcttaagcatcatataaataagagcaagctttctattgataatggaattgaaccaaacagaaacatccaataacattcatttttcttcttaaatacttgaaattaaacaatgattatgttgacaataaacaaaaccccaaaaaaagaatatcattaaaaatcaaatcttgagccatacctgctagttccattatccgggttgtgactgataacaacggcgtaatcaccagatgccctagcgagaacaccacggtcaccaacgtggtgctcaacgttgcaaataacagtaccttcaggaagagatcgaagaggaaggacattaccaacgacgagattagccttcttcccacagtagatgaactgaccggaatacaagccctctgcggcgatgaaaagctccttctggtgcttgtacctgaatggatgacggaa

SEQ ID NO: 162580 - DNA, 3271 bp, Cannabis sativa
aaaaggggggggggggtttcctggtgcatgatcaacctcctctacactttgctgatgaactattctcaaccatctcaatattaacctttttgccctaggtgtttcctctttctcaatggatccaattattacaatctcaggggattcacgttcaacatcaattactatatcatcatgtacctaacacaaaggcaaacatatgttaaaactcaaggcaacaataaaaaaataaaaaaaaaaatcacagacagagaactacaatagttacaatagttacattttcaagctcttaacatataccatgtaatcttcatctccatgagcactgaagcattttgaatttttaacaaattcctcctcttcatgggcccaatcatagtaatcatcatacacatctatttcatttgatataggctcttgaggtagttcaaatatcatgaaagtagacgtttttgtctcagtaaatgatgttgatgaaatctcaattggttcttcaatttcatcagatttaatctcatcactacacccatgtgcaagtaaatctccaaaagccacaaacaagttgtaaaagtagttttcttggttcttctgatctggggggttcacaaccacgtcaggcagcctcctactgtctttcgaaaactcctcaattgtacacctggccaatctttgaggaggctatcttctttccactcaattacacattctgaatctggtaacaccaagtaaatagaagcttttgtataatttctacttctcaaatcatccaccattaaagcaatctctctttacactacaaccataaaacccaaattcaagtgcttctcataaggcttgaacaaaagtcgaataggaatttttattgtagttctttggctatatgttccaagtcctcccttgagaaactttctactttgtaatttttaaaataattatacaccccaccttcatatcttctatttccaaaaggggtaaaccatctaccccaatggaataacttcactgtaaattgatcatccttattccctggaaatatgttaggaaccaacaataagatgacaattataagagccttgagttaggctaaacttcaacttatttgacatgttgggggtaaccctccaaaacatttaaacccccatgaaaaccgacaaaaaaatatcatgtgcaagtgtaccctacaaacagagataaataaatagcaaatattcttttaggataactcacttcttcaactctttactcaatattcaaagtatcattaacaactcatctgccattccacttaagccacaaatcctcgaacctttaaccaaatactcaaccaataatcccactataaaaccaacattttctcactcacaaaccctaccaaccatctccaaactagaaaccctagaaatgtcattacccgtaacgaaaaacctaaaaatgtgactacccataatgaaaaatcctacaaatatgaataaccagtgtaacttattgtaattaggtgggagatctccaaacaatcgcatgagataacgcaattccaccatcgacaatcgaactcctcctctaaatccaaaacacctcctcgtttccaatttttgataatggatgaccgtttggtttttcgtttttgattttttagtttttatgtttatcgtcttttcttttttctataatgagtatgttttagtttttttttttattattattttaatcattcttttttaatataattttgattggttttgtttaagtttcttataatatgcttaattgcatctcacgtagaggcaagtaagtgcataattttttttacttattatcacttaggacccgcctggcaaatagcagagctagatcaatggaacaatacatagcaaaaagaaatagtaattttgggagttttactcctaaaatttcaatataaagattaatcatgctaaacttaaaattttaagtagtttagtcgcaaatcaccctatttttaatatagcggtgttatgtactcaaaattttgatgtctataactggtagtgatatcttttaacaaaaaagtactcaaacatagtaagatagttattctattaggttcaatcccttaagctccattaaatactaaatatatttcactttgaacttagtccaactaacaaataaaaattaatttaaaaaaataataataattgaaggttagaaattgcagtggcgatcaatcttagtcaacatgagaaagcacaaattcatttttaatcttagattactaacaagtaaactaagtaaaattattttgcaaaatatgatgttttgctactaaaaagtgaagtaatatgaaagagtaactaaaaactttagtagattactttcaacattggtaactcattgagttgctcgaattcccctagtttgattatttgattaacatttttgtaagaatgacactaaagaaccaacttatatttccctctttcaaaaatgctatattttcaaaaacattattcgaaatttactaatccaatttctttgtttgtataatattatctttttctgtccacatcatattccaccctttttctcttcccaaactaatcacctggtaagagtttcacaaagaacaaaagaggaagtgttccttttaggttgtgaagcttcctagtcaatataagtagtttcaaataacgaagcttcacatgctatttaggttgttcaaacaagaaataccctatttaaaagggataattacatatatctttttaaaaaaaaaaattatattgttacgtttaaatatattttttttcagatttttacaataatactgaattttaggtaaaattttacaattttactatcatacgacattttttataaaacaactgtaaacaataaaacagaacaattaaaacaacagtggaacaactgtgaaaacttaatacagtacacagtataaaacttacattgtattttagaaaaaaattccgccccataataaatctcaaaataaaggaaaacttacaaaaatactggaatttgggataagttttacaaaaatactgtcacgcgaattttcaaaaatactgtatttttataaaacaccagtagaacacaaaataaaacaactaaaaacaacagcggaacaactacaaaacaacagtaaaacaccagtgaaaacttaacacagtataccggagtatgaaacttataaaaaaaatacagtaaaaaataccgcctgacagtatttttgtaaaaaaatagcaaaagctagtataccatgtaaatttcc

SEQ ID NO: 162581 - DNA, 1171 bp, Cannabis sativa
  modified_base (816)..(816): a, c, t, g, unknown or other
ccaaccccattaaaccctccaaatgaacctctctctcactcttctcgcgattgttcaaatattggagaagatcccgtcgaatggtggtccaaacagaccacgaaatcgcaatctcccttgctctctctcgttttccctctctgttgggttgtattccctccgtcacagttagatgtcaatgcagatagtggagaagaattcggcactagtggtggagaagattaccgccctcttcagaggttcttattttcacttagtttttttttctttgaaacatatgggttccattaattctgagtttgatttttttttttttttttttgattgttcaatggaaatatatttggtgtgtttttgcttatcgccgaagtgccacaatataaccattcgttgtcaacggcttcgtcttcattggggttcgtgtttgacaaacttctgggttcgtggtggacagcatgttaacacaggttggatggggttcatcttcaacaatggcttggtgttaattttttttaggtttattttttctgttctaaaaaatttctgggtttgtatttgactgtatattgattttaagaatattttcaattcaaaatattttatatttgttttttttttcctgtaaatcattttatgtttgtttagttattgatgtgtatacagttcattctcttactcaccataagaatttcatttttattttttatttttgttaaaaataaaaataaatgaattaatatttataattcataaagttcattgtaaaaaaaaaacaaaaatatttacaatgcatattgttttatttatttatttatntatttatttttttgaaaaaaagcaatgatatagtgacgttcggttggtgtggctgttattgaaaaaattattataaaaattaaaaaatagatacagtgacacacttttagtgtgattgtaatttgtacagtctgataatgcaagtttctgaaagtatatagtgacgtgctgtgagagagtttaaaatgttttagtgacacgcgctgatgggtcactaaaaactacttttcctgacacctgcattagtgacacgcagtgatgtgtcactaaatatttttagagtcactcaaatggggtcactgaaacccatttttgtagtagtgggggcattgaaattttggagaacccctccacg

SEQ ID NO: 162582 - DNA, 1660 bp, Cannabis sativa
gtggtggtggtggtgaagggggaggtcttgtgatgagagatggttatgatacgccatcagatatgtattttatatatatttgttatatgtatacaaagaatccgataccagaaccgaccagtactatagttatgtataaaaaaaacaagattatgactttctcatcaacttgttgaaacagagttgagtagagagatttcggtgttggagctagctgtataagatagagatatggcgaaacaagatgaatggtttgcctatgttttgttttttgtttttaagagagagagagagagttgaaagggaagtcgatatggatttcttactacaaaaatatataagggggagaatttttagagagagaaataatggtattcttaattattaaagagctgttttcaggcgacaaaagtggccggaaaactgcttttacatgaatattgttgaaacttgaaagtgagaaacagagggagaaatagagagttgtgagttgtgagttaaggccttcttatttctatctaccttctctttccccaatgcaaattactgttttatttatttatttatatatatatatatatttggaaaaacaaaaataaaggccaaaagaaatatgaaacttttgtgtaactaattttatttttattaacattttttgtgtactattattgtgaaatcatagagcacttattacttttatcagtttatatgcccaggcaactactgcaaccgtctagaagaataattacaatttttatttaataaaactgctttttaccgaattacatttgtcagacaaaaactataattaactataattttattattatatactgttatctcgtacgtatttttaataatttttaattattataataaaaaagagtgggggaagttgagttgaaaagcttggtttggttaagttgaattgaattgtgttgtgtggatccaagtgattggtgggatattgcaaggtgtaaatgaaagtaatcgaacggctacgatattctcaacgtggcgacacaaacgcgcagctatcttgccgagtgggacaaaacagcgcgtgtcttacaatcgaggcttgggagagggaccaaggcgtagtagtacgtagatctaggtgagtttgctgggattagtgtacaaagatctgaactttaaaaacagatgaatcacacgtatattatttttttatttttttttaaatttttttgaagagagaaagagagtggcagaaaaaaaaaaataactagtagtttttttgaaaggaaaaagaaaagtaatagttgatcttggaaagtctgtgccaacggcctttcggtacaaatggtacttattatgatgaaactcacagttattcttaacgttcagcaaacctgatccattttctggataataattctttgtactatactcaactcacactatatcaaacagggaatgctaagtttttttttttttattattatcaatttagaaattactcaaactacttgtcattctaattactactaattttatctcactactagtactattacatgacatatttctagcttattgcattaaccaacaatattgcgtgtgtattattattatattgagaaaattattctatatattatttttttaacttttttttttttattaaatttacggt

SEQ ID NO: 162583 - DNA, 2915 bp, Cannabis sativa
tagttagggtgttacatgtgttacctgatgcagatttatctggaaagaggaaagatttggcagagtttgaaatcaagcttaaagaatttgaaccaagtgagaagaatgatagcacagacacatctctagatgagactgaggaacaaccagatctgtctgactaccagcttgctagagatagatccaaaagagaaatccatataccagcaaggtttgtagaagctgatctgattgtctatgctttgtcaatagatcattcatgtgacataccagttttattgagtatagagggggctttaaatgaaaattacaagaaggagtggtctcaggttgtggatgatgaattaagctcgcttagaaagaacaatacatgggtattggttccaagacctgagaacaagtaggtggtctcatggaaatagattctaaagattaaagaaggtataacagaggatgagccagtacgacttaaggcaatattagttgtcaaaggtttcactcagaggggaagggatagattacaccgaagtgttttcacctgtagtgaagtacaagaccattagacttatgttgtcaatagaaacccaacaaggtttagaagtagagtagtttgatgtcaaaagtgcgtttctaaatggttatctagaagaagagatatatctggggtaaccacctagattttaggtggaacaagatggaaaagagaaggctatacttctatggtaagtttaatcacaaagatagcagtatgtatagcaactaggaaaattatacaaacaacctaggtactttcatcctaaattgatttgcatccataacaatcagagcatattcaaatctcccctttcagaattttgattccaattcatagattacaattaaagttgatcagtcaataattgtaaaattaaaacagattgtatggaattaaataaagagaagaagaagaaattgaacaatcacattaatctataaaataaactcaagtggttcacataataatcattaaaagaacttagctactatcagacattctaaaacaaaagaaatttaactaaagacataaaagatagagttagaggagaaataacagtgtttggagtcctccatcggtgccttctgctccttgctctccttctacacttagaatttctctcatctttcgaatagtgtcaaagctttgcctcaaccctctttaaatagagccaaaaatccaagttttccaaaaaaaaaacaccaaggtcacgaccttacaagggatttcctattttcttcgttgattttcgaagtttcccattttcagtttccagctgcgatgatgaccaatagtattttggtcatctctctcaatataactcgcaattaaacaatttaagatattttggaaagataaaagagagatatagaacttttattcaaaaagtttttcctagaagtgaatgaattatagtcaaaaattagcttgaagtttgttaaatcactttcacagagctcgaaagaggttctagtgtgaaagttttaattctatgtttttcatattttgtagtttgagaactgtttaaaaagcgaaacttctaagttttaatcaatttatcaacaattttgtaaggaaaaagcaacccatttgtaggctttgaaaggtattctctcttattttaattttaaataactttttaaatttagtgtttcaaatcacaacattatattgtaaaataattgtactaattgtagtggtgtagtagtgtaagttatgttataatacattaatttataatcttattctatattttcttacttaatatcaacatgatgtttgaaataagattatagacaacaatgtaatgagatttatttttttggtgttagatactatttccaagtttgaagaagaaaaggcactactcttttttattcccttgtagtgaaatggaatttcattagtcttttttataaacaaatgaatgaatgatatagaatgcctttgaggaaatctttgggttctctgttttagaatgttttagaatgtctcagatgaagatttcccacctgaatttctagtatagaaatgaagcatttagtaaattcctactctttgccaatttataaatttctgaactaagttatgttccaaccttgccggttaatagctttattgagaggaagctctatactctgtatttagtagtagcagattcacaattgaagatactgcaacaaaagggactttttatctcagtttttacacatgaaaaaaataaaaagtgggataaaaacttttgatctcacttttacatttggagccttaaaaaaaaaattgaacaagggccttgtttggcaaacggataaaaaacagtgtttgaaagagctaattttattcatttgccaaacgcaacttcaatttttaagtgggactttttatctcgattttttatgtaaaaatcgggataacaaaacccacaatatctgggcctttaatgttgttgggcctttacacatataaaaagaacattaggttttagggtttcatttacacatctcattccctcccagccgtctctctctcgtatcactccctaagtggtggtgaaatctttctctcagatatttttttcttcttcgtgctcaagcatctcaatctctgaaacgatctgctatttttttttctacaacctccaaagctcgagcaacgactggaccaaaaaattgacgacaaatgacgaaggctctgctatttttttcttcatttgatatcttgatccagccactccaactgtagatccgatatcccaacctcgaaaacccaaggttgacatcactttaactctttttttgtaaagatcgcttagctttaatttggaaattagcagataaatatggctttattatgaaaattatttattaatattgaattaatt

SEQ ID NO: 162584 - DNA, 4268 bp, Cannabis sativa
ttgggtaaagattatttaatatttcttcattaacgtctttaattccggtattttgatataatagtccccaagcggtttctttatttgcatctaagcccaacttctgtgagctgtcatctcctccattcttgtctgttaagttaagacttaagcggcaatttccttgaatagccaaaaagaactactctatttccttccttccttctcgatctttcttttctgtttttcgtccactaaaataggcagatctggaaacttccatatttatcctcctttcttttctccactttccctttaatacttttctcagtttttagggtttcaacactctcgatcttctttgctgtgttaaagatttctgagaaattcctttctacacatgcatctcagttgctgatttccgagtttttccttcaccgttctttgatccctcgcatcaggtcaacatcatttcagaccagaaggtaaggctttttgtttgccccctacttatttatttattttttctgtgctagtttattaggtcttgacgattgtgattcaataatggtggtgattgggtttttagtagttgcgtttggttgtcacaaagtggatgcccgttaaatgttcgtgtatctgacttagaaacgtcgttttattttttaattaatgagaaaaaataggaagtgaaacagatccatgtgcgaatgtaccttacatttgatcgttattctatcaacatttacattcatccattattagatcacattattgcactcttcggaggtggaagaagcagtgctaagagggtatgattgtctgaacatctgtctgggttagctcattagtggacaggactaaaatgagtggtaaaataaatgattttttttttcttttctgaaaatactagtgggatgaaagaaagagcatttttcattttaaggtatactctgcacttatattgatctgataaagtcctcacactagatattttctatctgggtattatttggctctatgttgtataaatatcctatatcggtggaagttcaaatatcatgatggttattttcttttacttattattaaactgtatttgtgcttactttgagttatatggcaatgggtgtggaaaagcatatgtttcttagaatagaagaaaaccttttgtcccttgtgaaggctcaaaagcatgaggataaaagaacataaaataaaataaaataaaaatctcatggacccttatgtttcggagtaagtgtatagggttaaagtgggtaaatttgaagacaacttttactgtgactcgtgttatgaattctaaattgctaatgttattacttgtggtagacactttgtagtaataaattcatatcacttcttatgacgggtattgcatttacgaaggattatattgtcctttgttgggataccaatttctattacatcttgtgttttaggagttagtttactttgattgcatctgaagttgcttgcaattacaggataggttgaagaagtaccgtgtattgtttcccatctgagattcgatagggacattgctaggacatctatatcttgtgttttcgtcatggtcgtgaatacccgtcctcttaaacgaatgaagagccgagtcacggcagatctctatgacttccttacctttccatcaccagtatatggctctaccaatggatcctttaggacaaacatcagggcattcctctcaaagcatgcaatgttgccaattccatcgtcgctcttcccccacctaatgacatggcaaatcttatttagggttgggaatgtgatgagtggccttgattcgctctcagcactgatttgcctagacattgttgaggaggatgttgccatatccagatccacctattgtgaccagtgccgagttgttggtgagttgactcgcttagttgaaatctcttgtctttctttctatctataagtttgaataatctcaattctataaatttgattattgtcatgattcttagttcgtcatcaaatgattaatgctagttcagaacttgtcaagcaaaatttcgtagttatttagactttttcccttcatcttttatttatttagaattagttaaatatcttgagataaaactattagtgctgattggtatagtattgagatttaactttattattttaaaaactaaaagtttgttgtttcacaagaatttcatcttttttatatttagagaaattatattaaatggtctgtaatagtggaattctcgagcaacatgatgtttttatgagttattctagcaaaatgactcacttttgctctaattaacttatggtttatcatatttgcttactagtatttgcattttcacttgagttatgtgcatatgattcatctaatttaatatctatatatttatgctatttgtattccatcttttatctttagcaagttattttgctactcttgactcattttgatatcattcttatccaagccccttgtataaaaaacaaatttagatttagttcataatatggaatatactagtatcaattattaaagaatcccaaccatttgttgccttttgaagtgcaggcctttttctacttataaaattctggaaatctggtcccaaatcaaaattcaagattcaatatttaatagatgaactcatgtaaaccctgagaaaaacttgttaggtcagcttcacaaggaacacatttaattattggttaaccttgtttttttttgaaaaagagacagaggccattgtcttagactggcccctattgaaatctgtcacttgtgacggaggaaaaccttggttacaagagtcttagcataaaaaatactaaaacctacacgaaaacaaaaccggactcaataaaaacagtacttgttattcctaaaaggaaattacatcaaatttctccattctctagttaaccttgttctcaataaaaacagtacttgttatccctaaaaggaaattattggtaaccttgttctttttctcgcgtttgtattgctgcgtgtaagaggtttggggcaaacaacagttggcgtaatttacaaatcgtaactacactgtttcttataataatattaatttccaaatgatcacttctgtgttgattcttattaaacagcacatgtaaaagatagaccacattgcatagaaaaatcctttctataggaaaaaataaggtctcatttgctcattgtacctgtgaaatttcttgcttccttcccggaaaagttaaaaacttgtgtgtagcttcatcaaccaattttttccaaatcattttgccacaatggtaatatgaaatttttaaatatcttccttctctgaaaccatttaattaaaaacttagatcggagataaaaacttttaattttataaatttgatgggtcttttgtttgaagagtttgaagctttatgatttgtaaggatctaaatgaagcttataagattgtttggaggcctcatgaattttatctagagctgccgcataaataccttagtaataaataagtgtctcaaggatcctagacagaggtttagtgtttgttttataaagggttaagttgtaccttgtgattcacttttcttgggcctaaaaactgccttaactaaccttagcggttactggcaggaaaggtcttgagggagtatgactatggcagatatttcatggtcaaataagtcttattgtctccaaagacttggcgttggggtgtaaggaattttagtttgggtgggccaggtatccatgtgttttgttaaaaataaataataaaaaacaaataagactgaattgataaacaggggatgcttcaacaaaaaaaaattggggaatgtttcagatctcattctcaccctctacatcagaaaattcatactataacgactaccataggctaatgttgttagggccattacccatagataataaatagtaaaatcttagttgcttccgcatcttttcttttttttaaaaccgactcgatggattgatatttactgaacatgctctccatcgtgttagtcttctaagtgcttattacgtgatagtattacagctattataactctcaaggctactgaaaaaccttctatttataagtagctattattactccactggagtctaaatactctgaatctgcatttcattttgacttcattttgtggagcaaccagtacttgtatactcctatacatagtctcatttagaattagcttttctttgtacctgctacttacaatttatgtcattttgt

SEQ ID NO: 162585 - DNA, 2413 bp, Cannabis sativa
aagcttatgatcgcattgaatgggatttcttacttaaggtgctttaggcaaatggcttctcgaaccaggcgtgtaagctcattatgcaatgtgtgagttcggtcaaattctctgttttgctgaatggagcccctcttaaatctatatatccggaacatggtttgaggcaaggagaccctctatctccttacctgtttattctctgtagtgaagtcctatcgaagttggtgtgtaaagcggagcttaagaaagagttatctgggattaggattggtagaataaaatgcctaatacccatttgttctatgccgatcatgcaattttctactgcaaagctaatactagggaggtgacaactctactttagtgttttgagaaatacgagagatggtcgggccaatgtattagcaagaacaagagtggcgtagttttttctccaaaaactaaggctgaagacaaggggaagattatcagtattctgggaatgtcctaccttagtaaaaaagagaaatatttgggcaatcctttcttcatatcggctaggaagaggcaggattttagtttcattaaagaaaaaattctgagtcagcttgaaggttggaaagcaaaacaattgtcacaagctggaagactaaccctcattaattcggttcttagtagcatcccttgctatacaatgactacttttatgattcccaaatctatttgcttggacattgacagtatgcttgccaggttctggtggaaaggttctcaggggagtcactcaaataattgatatttagcatacaagagctgggctgatatttgtcaacccaagaggaatggaggcttgggcattcgaaggcttcatgacaccaatctggccttgctttcaaagttagcttggcatttgatgtgcaatagtgacagaccgtgggtacagattcttactgctaaatattgcagaaatactaatttctggcaagtggaaaaatgtaatggagattcgtttgtttggaaaggaattcttgaagctcgaaacatttgcagtgctggtgtcggatgcttggttgggaagggggatattgacatttggacggttccttgggttccaggatttagtccccaagagatccaacagagcttttcctataatgttactcactcattcacattcgtatctgacttgtttcaacctggctctagaacctgggatgaagacctcattaaacaatgttttgctcctgacattgcagctgcaattttgtcaataaggcccctggaagatgatgttgatatgctgttctggaagcatggagctgatggaaagtattcggtcaagaaaacatactggctctctcaacactttcggtttcatgaggaaaagcccgcttggaagagactgtggacactaaaacttcatcctagacagctggttttcttatggagaatcctgagcgagtgcttacctcttaagagtcgcttgggtttcaccagaatggacgataaacaatgtgtgttttgcggagatgctattgaaacagagttgcacttattctgtcactgcccttttgctcgaatgatctggttcctaagcccgtggggtttgaaaactgatgtactggttttgaacagctttgaatattttttcttatggctgtgtaactcggatagtgaatggtcgatccaactgagtgcttgcattcttgaagcaatttagaaatgcaggaatgacttgattttcaatggaataagccctgccattcccttaactttgaagaacataagctcaagagccttggaattcagccaatttcttaccccgaatgatgaagctccgacaactgatgtcaacggacttctaacttctgaattgcatacagcgaactgtgctgatgctagttactttgtggatgcatctgtcctttgttcgaatgcaggtataggcgttgtaatgtatcggtcaggaggtggggaggcacacaaaatccaatcattttattgtgtcacaagtgttcttgaagccgaattactggccattcttacagctctggaacaggcgacaaaggagaaatttcactcaatcacaattcactctgattcaaaaattgcagttgatgctatgcgggtgggagaattgcctttggcttggggctcttacccggtttttaaagaatgtcttaagttgtcagctatgttaattggcgagtttaagtttgttaaccgtgagtcaaactctttggcggatcatcttgcttatcaagcaagaatcgatcatttgagcctgtctaatgttgtttagtttgtttgttctgggagctagcccccatttatggctgctatgtttcttgttttttgtatcgtttcttgaaagttctttcaaatcaaaaaaaaaaaaaaaaaacacacacacatgcaacacaacttacca

SEQ ID NO: 162586 - DNA, 3357 bp, Cannabis sativa
tatatatatatatatatgaagtagctggttaccctaaattgtttttcccatattaacatttttttttttttttgaatgttttccacaaaataagttttcgggaaaaaaaaagtctcatatttatataaactctgacaaaaagaaaatcataaaaatgaaaacttttcatgatatatatgaacaatgaggtcagtttcatcaaaataataattaaaaaaaaaaatgaggtcacttccactaactacaaccaagatcgaccctaagcatagattggattaagtcaaggcctattcttaagacccttatttaaattgggcctaacttttacatcattttcttttcttctatacaagaaagttgtaaaggtgcaagtattataaagggattttcacagctgaaattttttactttttatcttttttattttggggtgaaatttttttttaaaaaaatactgtatactgtgttaagtttcactcttgttttactgttattttttagctgtttcactattatttcttattattttgtttgttgttttatagttattttataaaaatatcgtatttttgtaaaaaaaatcatatgacaataaaattgtaagcttttatttaaaatctaatatttttataaaaacccttataaatattaatttttgccttgagtgggtcctaagcataaaaatggaaatgaaattgctaaaataatccctttttctctttagcaaaaataaattttatttattttataataatccaaaaattttgaacttcttaattattgatgtgaatgatacacaactttctcacatatatatgcatagatagcttttatgttaataatatctgatcaatcttgtattatatattttgtgataaatacagatgcattccttaccgggtgaccaaagatgaagaagattattacaacatacaagttcttatggtttcttcaccaaatcgtaatgatctagtgtttccaaaagtaattaattatacataattgaattacataatgtattcttctttttatccttgatggcaataattaaagttaattaataactctataaatattaattttgtcaaatagggtggatgggaagatgatgagactcgcgaagaggctgcttgccgcgaagccctagaggaagcaggagtgattggaatactcagagtaagctattttttttttctatatcaaaagttatgacatattgagaaatgttaaaagatattaatagtgcctagcattatacataaaagtgtcatcattattggtgtaatttaatatgaaatctcatacattttagtttaataattattgattaataataatataaaaatctagtaactacttataaggtgtcattgagtgctctaatatattattgcaaaatgatagatatcaaatggccaatttacttgctttcattaagtatgatgttcaaattttattttgtagcaactatgttggagggagagtttagaaatgagtgagggacaattcaaattttataattttcacttaggcttaaataaaattttgtaattttatacatgagtattaaaataatattttgtctattattaacacaatagtgatcacattttcattcaagatggattgagcataacaaaacaatattcatggtggttgtgctttagttgtacactccttttcttacatttgttgttgattttgaacttcatttgtgaatgaattaggcttttactagccaactcttttttatgcatcgctttcctccttcaagcggttagcgagcttaattttttttagaaaaataaaagtacttaagtaaggagtaagatggatagttcaaagaattggtttacttccacaaagtccaagattcactaaagttccaataaaattaaaggattaggttgagagcttagtttgaaaaacaaaagtagtaataaagttaagataagatgagtcctaattttgaatatatgtgtttgtgtaggaaactccattaggagaatgggaatttagaagcaaaagtaaagagaacaattgtaacatggaaggaggctgcaaaggctacatgtttgcattggaagtcactgaaatactcgaagtctggccagagaaacaaaatcgtgatagaagatgggtcagtattttatattggtagtgaaattacccaaatttttataataagtactcattgcattttattttctcctatagctaaagatagacgaggcatttgagttgtgtcgttatgaatggatgcgcgaggcactaaaggcatttcttagagtgatggcggccgaggtagatgaggaagaggagaagaagaaaaatgaggaaagaaaagaagatcatgagatagtagacactcaaataatgtcttcctcttcttcttctacaactacttcttcagattgtaatgttgtaaagggttcaaattctaatacaagtcacaaacatgttattagccattcaattgggatatgccttgccactgacatgaccaaaaatcctagtggggcctcaaatgatatctttctatataattgtactgtcaaagttgattctcaattgtaaattagtctatatggacctatggtgaaatagtgtaaaataacttgttgcttaataataggtcaatagtgaatagtggtgtaaacatctccaactggggttaacttaagcttttcatgactttgggtatgtattgtatgaaatttgaatccttgagttaggcgtagagcctttgttaaagaaaaaaaaaagttgtattaacatgactttgtcttttattttcattaattaataataaaatgatcttgttatgctaatattttcttcactccttgggttccttggaactatatattattatataaccccatttttagtgtttttagttaaacaatatctcctatatatgaatatttttacaaaaatacccactttttaacttttttttataagtatccactttttaattcaacatgcaaccttaacttgattaataaattaactttttccgtaaaatttattttctttatattattaattttcaaactttacttattttactttgcttatatataattaataattatataagttgaattatgctaaatagattatactacataaaaaaattaccatttagtaacaagataaattttctattactgttattactttcagtcataaggaaaagttatttattactataattgacacatagttagtcgcaacacttttggattaatatttttaaccaaagatttataactatatagctttaatgatattttttatactataatttttatatttttaatcacaaattttgttataactatttttttt

SEQ ID NO: 162587 - DNA, 2822 bp, Cannabis sativa
ttaagtttttctttaatgatgtaatttttattacatgaattacatatatttaatattaagtcttacttgatttaataattaaataagaatttactacccacttacaacgcgccacatatatatagaaatgctcgtgtttattgggttagattggtttttttgatatagtatagttgttatattctgacaatggtccaattattttaaaggttgaaggtgggattttgtgtgagccttgcaatggtagaggatggttagtttgtgagttttgtaaagggcagaaaaccaacgtgaaggctgaaaacaatcgaatctaccgtcgatgcccaacttgtagagctgtaagtaatttgatttccttgaatatgttagtagtgaaaatagtgtttagaatttttaatgttatttggttgaattttgaaaatttagcttgcagtaggtgcaaaattgatctgtaagagctactcttaaaacacacacattatgctagatagtgtagctttgagtgtccatgctactccaaattgaaaggagaagaactggttagaattttttttttagcatttttcattacattatagtcttgagtaaaactagaacaataatattcaaatctgcttagtaggattttgaaaactagttaaatgaaggttgtttaataattgaccgaaaactcttgattttgatctacagttggtttagggtaaacctttgcaatgttttcattagtgcaggttggatatgtcctgtgtacaagttgcaaagtttacaaatgtgtaacattcccaaattacaccgatggtgatgaattatccttttgagtgagcctctcactgatacaagggttaaggcttattataagctttatcccatttgtattactttccatatctgatttatgtgattctttgtttcagccaacatcttgcaaattgcatttaaagtaatatattaatttgttctcatatcttatatatttgtttatctatgtgttaagtaaacggaaacttgccttccacattaaaggaatgaaagagattatttcatatgtgtgcatgtcaattgacaagctttgtaactctattgaataatttgggacttttcgtacaaaagatttgagtgatagcggttaaacttaactatcgtttcatttgcacttaaccctccaagtttaaattttaacggactactgaactgttagcaaatttaaggtgtcatccaattaactttcaccatagacttattacactattatgtgtatattcttgtgtacgtggtacgttatattagtacaactaataatattattctaaattcattttaaaattaaatgaaattataaaaataaaaaataaaacaaaaatcgaaatgttactgtatttatacaacaaagatggtgatttacgtgctctcagatcaatggctaaaatatccaagaaaacaccaaatacaaccaacaatctagaaagatgtcagtttgcatccaatgcattacttagaatcgaaatattcaaatgatgatatttttcttgggacactcgctgatatgatcaactgtcgttttgtaaatctatgttgtacgcgctctattaatgaacgcaatttgtatgaaccaaagaaataatgccacatgtcacttcatttcaaaaagagagaagttgtcacccacaaattttctacttggaattcaaaaagtattttcaccttttttaagtagccacctaccctcacgccatctagaaagaagaatgaaagcctctgaaatcctttgagttttgaaaatttagggggtaaatgttatgtgtgttttcggttaaagaacacatttaattttaatatgattaaatttagctacaacaggcccgaccgaaggtccaatcaagataatggactggatccattaacaaagtgtaactctactagattaggcacgctgtagtacttttttaattactgtgcaagcctttgctaactaaagggttcattgaaaaacatgattaacaaaaaattttataataaacacaactttacttatacatataactaaaatacaagatttacaaatttcgggatctcgtactaatttaaatacaacaaaataccctgtaacaaaaagtgtcacccatcgattaacaaaattgagcacatactgtcttgaagatctaaacacttagatctaaccatctagatagtataatattcactaagctccaatactcacaactgttcagtcctgacctttacctatgttgtgagatttatgagctacgcaagtatatgtaatcacttttgtagtttaattcggtaagaccgatattgttcacacaaagattgattatgaagtaccaatagcctattttattttctatttgacaatcaaaattggaattgttataaaaataataaataacaaaatttaatgaagattaagaacaataaacttaattcaaatatataaatgagaaattagagattataatctcctttactatccactttattattcattaatgcaattacaagataattcttctcactaagatgaaagacatgaaaaaaaatgttaaatattaggattaagaaatataaactcgacctaatgtagattctctatatttctatgaaaaatttaaacaataggaaacaatgaactcagctctaaatcacatagaccaatttgaactctgcaccgcgaacacccctaggtgagaaaatgtgagtctaagtctggggtttaggtctggggctgggattcagggtctggattatgacttatgaggttcatgttggaaattattttaacaggatcttagatctactca

SEQ ID NO: 162588 - DNA, 4313 bp, Cannabis sativa
ctcccttatcttttcttaacttaactagaatgaccactgtatatacgtgacagtaaaacttcaaagttaataaaaatatgtcacataatatttaacggtactatttaattggtgtcttaaatgtacaaacaaaagtaagttatgagggttttgcaacaaaagaatgaaaataaatatgaaagaatctttaacattatgtagttgtgaaggtaatacaacacaaatccatgtctagtacaagagatgccttaactccctttagtttggaaggccacaaagccataataaactcaaaccaatacataagtggagacaattacaactaaggagaagaatattacatagtacatacaataaggcctctatatatatttatatagcatatagctatggtgaaactgaaacatgactgaaaaattgaaattgcccaaagggtaagtgaacaaccaataatttttttagggggaaaacaaatggtgttttgctcaaaataacttgagtaacaagataacaatggctgctgttagcaagctcatcggtggagatgagtaagccatggcatgagatgaatttacatctttggatacagatggtggcagtgcaggacactccaaaccttgcttcccttctctgcactcgcttgagaaaagaccgggagggtatcttccgtagaggtttatgtagctgaacatggtcgaagcgcaatcgtttttcagttcatttatcatatctgcatatggacaagcaaattccttgaatgattcacaacactgcttagcagggtaatgaggtcctttgcattggctggtgatgatggtgtagttcataaactcaaagttcacagggcaacctacataataataccacatgacatattataatctctttagatgatgacactaatggaatataaagcaataatctgttattctaacaccaccacgaggttgcgtcttaatattagttagcgacattctataaaaattattatattaaagagtaattggtggcaaaaaccctttatgttttaatttttatacaattaactccattatatttacttttctttgcaaatttaaagtaactagatgactactgtatatatgtgaaagtaaaacttcaaaaccaatacagtaataattcaattggtatttaacgatgatatccagctgacacatcaaatttataaagaaaagtaaacatgaattttactacaaaaaaaaaataagggagttcagtgtaaaaaatgaaaacgagagtttcgctgcaactaaccctatattaaatcacgtgagaagagacaataattaattataccaatagcgatatatcacatcttaggtgggtgctaacaccaattgtgccaattagcatttctctcatttccttttaatgtataaaaagacttaggttcatttcaaaaacatatgtaggtttttcttgaatctcccaagtggaataagtcttagtatcatagaaattgttcttgttgcagcaaacaaaattgagcaaaaaaatttatgataatctatttctagcaaaagaattattataaacaaagactttaaccaccatccattccaataagacaaggtgattcttaaagctatagactttgctttcttacaatctattaagctaagatgatcctatttgaaaagtaagcatggtcaaagaaaagcttataatttttctcatcttatgatgaacttctagatctcttaatcttaaaaacaattcttttcaagagaaagattagattaaatgggaaaatcttaaatgtaaacaaaaattaaagtaagaaactttgaaatgaaacagaccttgcttagcttgaaggagattacgaccagaagaagcatgaaagtcaaagattgaatctgcaattaaagacacaaactttaattcaaaaattgcaaaaataagtaaagaaaaacatcaaagttaagaaaatgaacctgagatatgagaagaagatgaagatgaaactaaagcaagaaaacccatcaaaaagaaagataatataagtggagagcttcgatccaacttcattgtttctgggttcagcttctaagtcttagatttttatgaagaaaaaaaaaacaatttttaaaacaaaaaatggtaaagcttgaatctttatttgagtattaagatctatgaataagaaacataagaaataagcaaatgaaaatcaataaaagagaagagaagaggtgaagaggagtaggagcaataggggagttaggggcaaatagatgggttacagtaaaggacagcaaagcaaaggtgagaacttggatttttaactaaaaccaaaccgcgtttatttcttattataaatttatgtttttgtctcaaattgccttttctttgaactaattataatacttaacaatgacacaaactaactaatcaaaaaaaaaaaaaaaaacaatgacgcaaactaaaacattgaattttgtttagtgtaattcgttgtataaatagttcagtgtaattttttcatacttaaatttaatttttttatgataataatatttaaatattttgttgaattttttagagaatttaattttaaaaaaaatagggttttttgttcttaagttattggaggttatctctttttttttttttttcagactcgcgggctttttttgggcttaggtgcagcttggtcaggattatgttttgttattgcgattagtcttgtttctgtgacatgattttaaatattttagttttgtctttgtaacatggttttgagtgttttaatcttgactgcgtgagatagttttattttgtttcgttgttggttcttctttgttcttcgacggcttgccatcaaatcgttgttagtggttgggaataataaattctctgcgactaaatgagctgttagtagttcgattacgtaccttgaacaataattgagtgcttaagctacgaggttgaaagaacctggtgcaatagtttctgttgttgcgtcttctgagaaatggatgaaattgaatatagatgttcttaaggttaactgtgatgttacaatctttttcatatgatttttttttgttttttttttttttgtcaagcgatttgagaattaagcagatgattatttgagtcgttttttttttcaaattttaatcctagttgtgtcttctactggggagatgtcccgattgaattgcaaactattattttagttgattgttattaataaaattgcatgaattattcaaaaaaaagaaaaaagaaaaaaaaacgtttgtaaatatttaattgttaagtgtcaagtcaaaagtcacgtggtagtccttgattggtctaggtcattaaatttttattttttatttaaatatactaatagaaaataacacgaataaaaacttaacacttaatagtcaggtacttacaaaagttctataaatttaacttaggtattattactataaaaaattaaacttaaatatttatccgtaatcgataattaaaattaactatttacgccacaaattatcttttttaatcaaattctcaactttttttttttggctttttattgatatggatgttttaaaattataacctcatattgtgtcaagttaatgtcttttcttaatattaaataaataaacaatgacccaaccaaaaaaaaaaagaactttttcttaccaagtctagtgcattaaattaagtactacattgttataaatgagtgtgactaaaatatgtaatgtttttctcccaaattgtctttttttttattaataataataatattaacaatgacccaacaaaaaagtaatttttttcacaaagtttaaatttttggcttcaaagtgggtggtagtgcattaaattaaagtacatggcaatttctatatctcttgatcaaatgaatgtgacaaaacctcatatttcctactctttcaaattgttatttttaggttttaataacatctcacattattcaaaattattttcttttctcttctaaacactaataatctttacaatgacccaacaagaagagaaaagcttttttttattcaaaccaagacttgtgtcattatttgttgtagctagtgcattaaattaggtaattatatttatataaatgagtttgacaaaccctatttaattacaatatcttattacaatttttgaatcaatctctacgtaatcatatatcagaatatttttctcaatttttttctataactataggcggacccacattgtaccgagggggggcagtcgccccccctgaaaaaaaaaatcgagaaaaaaatgtatatgtattttaatta

SEQ ID NO: 162589 - DNA, 2517 bp, Cannabis sativa
  modified_base (2229)..(2231): a, c, t, g, unknown or other
cactataagaaaagcaaaatcattggatgctcaaagcaccagaatttgcaagttgaaccaaaattgcttaagctaagtaattttctgaatttgactgagtaccacaatttgtgaaattgcttaagctaagtaattttctgaatgatcaaaacagtttgagtaccacaatttgtgaacatatagattcttggagatgaggctctgataggaatttcgtaacattatgatataaacagtagcaaatatggaaaataatagatgatacattgataaagatgataaagagaacaaggttgctgggtattcgagagaccagcactctcccagaactattgctcacttaacaaaataattccctagcccaaccctttctaatactctcttatatatactacctcaataccccattacaatgacctatttaccctctttatttaataccctaagacctaacaggctccagttcagaaagaattcactttctggtgaccatatacttttattctttccaacagaggatatgaataggttttaagttctctggcttcatttatttatctttccaaaggtttttatctccattattcaatgcacacgtataagattcggaattcggaaacatacacaacattatgaaaacttcttcgttcaatttcattactcataaattagacaatcccaaataaaaatttgccactaaatttatgtaataacaggaagaaccttgcataagataaaattcgtaaattcgtagcattcatgtcccaatcaatcactcaaacatccaattaatccttaatgtaatctgctatagaattccccccctgaagtttaactatcaattcctagtgtatgctattaaactcctagctattcctagaatttgtggtatcaaataatccttctctcagtcagaagctcaaccttaatttttgtactatattcatatgcaggtacgtaaagaatagatttttataaataaaaccgtaaaaaaaaaaaaaaaaagcaaattccatggatgaattcgaagaggaaacagagaaaagagaatgaaggtgataggaatagaataccttccaacgcaatccctaaggagttgttcggtcttctcgcacttcctgacgaactttccaggctggacctcgtccgtcctgcagttggaggtgacgaccttcctggtggtgcagctatcggcgtgggcactaggattagggttttgaaatctgggaaagtccccgggtggcggtgattccaagtcatcatctctccaaatccaacccattctcgaattttgcaagagagaaagaaaccgctaagttgaagttgagaaggagaagagaagagggttgattattttatttacttacgctcgcaaattacaatcaccactccaactctcctatttatttatatctctcttttttcatattataaataattaaatttaaaattagaccaacattggctttttaaaaaaaaaaaatatatatatcatattttcataaaattattatgaataatataaaattaatatgaaaaaaaaaagataaaaagaaaaagagaaatttaatgaaatttctttaatatacgtgtacaatatttacacactaatcacttacaaacgtaaatacaaaattaaagaatttgtatattggaattgcaactttatacgtgtacaatatttacacactaatcacttacaaaaatataagtgtaacaaattaaaagaatattaggtgacgttcgacgtttggttggaggttatgaaatagaatgaaaaggaaaataaacattctttattcttttgtttggttgtatattaaagtgttgtaatatcattctaatggaatcacctttttactattttggtggaatgactattcaattttgaaatggaagaaaagaccattacaatatatgatgaaaacaaatttaataattatttatcaatttttttatccattttaaattttattccattccattcctactcctattattattctcattcctatgttttcattccttccaaccaaacgccacctaatgtatattatttaagtcaagtatctaatccaattcaatatgcacgatccaatcaaatccaatctgcaaaatgcagatatccacacttgcgcggattagattggattgaaaaatctaaaataaaatctgcacttgtgcagatgggatgttatttgaccttaaaaaataaccgatccaatccannncgcacttaattatatatattttaaaaaaaattataatatataatatatattaattttcaaatcatattaaaaaaaaaaagacacaaacttctaatttcttaattttttttagtaatatattgagttgatgtattttatttgttttataataaaaaaaatacgagaaaaattattgttattcacataaagatatacacataaatttaaatatatatactaacttatttattttaataatgaatacatatatattttagtgtaaatttaaagatgagtacatatatat

SEQ ID NO: 162590 - DNA, 3079 bp, Cannabis sativa
gaagtgtaaaaatgaaaaagcccgaataaaataatacttttgtaaaacgtaatttagtttaagaaaaacaataatatttaattttaggtcattaatttccaaaggttaaacaaaacgtgaacaatatatctaggacactggacaccaaccctaatcaagtaatcatcatataataagaaataattatattaatttattaccttatgagactgactataatcaaaagacgaaatggatggttctaagttggctgatcgtcgatcaataattgcattagaactattgaccacagcacattggatggggtagcaagtacttgataatcaataaaaaaaaggttaccttcccccaattcatcatcatcagggtgaggctgttttattagctgcatatcaactgttcgacgaattttccaaaccagattaggctcaatcttctgcttctgcttctgaaaacatatgtttatggcaggaagaactgcctaagaacgatgcccacgaagtactcactatgttcagcactgaatacttgttccaagactctcaaccagcgcttgggtctccaaattcatgcccttattattcaaatgggatatgaacataatgtctttctcaacactgctcttatcgatttgtatgcaaaatgtgatgccattttcgacgcaagaagggtcttttgcagtatgaagcaacatgatcaagtgtcatggacatcaataatttctgggttatcaaagaacggccatgaaagagaagccatgtggaggtttaaagagatgcttagttcacaaatcaaacccaatagttttacctatgttggtgttataagtgcatgttcaaagttaaaggaggggcttcaacaaggctctttgctccactcacatgttatcaaactttgttttagtgataataattgtgtggccagctcgttgattgattgttattcaaaatggggagaaatggatcaagcaaagtctgtatttgatgagataacagagaaagatggtgttctactcagttccatgatttcaagttatgcacaaaatttatatggtgaagaggctctaaaggtgttcatggaaatgaggagcatgagtttgagtccaaatgatcatactttaacgagtgttcttaatgcttgtgggagcctcgcagtactccaagaaggaaaacaagtgcactctttggtcactaaaatgggctcaaaaagcaatgtttttgtagccagtgctttgatagatatgtattcaaagtgtggcaacattgatgaagctcgttgcatatttgatcaaacacttgaaaaaaatacagtattatggacttcattgatcatgggatatgctcatagtggtcaggggtcagaagcacttgaactctttgatcatttggtgactgaagaagggatcaagccagaccatatatgttttacagctattttgactgcctgcaatcatgtaggttttcttgaaaggggagtagattacttcaacatgatgatcaaggattatgggctcgtccctgaacttgatcaatatgcttgcttggttgacctgtatgcaagaaatgggcatctgaggaaggcaaaggagttaatggaggaaatgccttatagtccaaattatgtaatgtggagttccttcttgggtttttgtaaggtatatgtcgaagtagaattagggagagaggctgccaaagtgctcattgagatggaaccatttaatgctgcacctattgtcacattggctcatttatatgcaagagctggtttatgggcagaagtagcagaggttagaaaattgatgcagaaaaacgacattaggaaaagttgtggatggagtcggtggttgaagtagacatgagtgagtgagccacaccatcttatcttaacaggttcatgtgcatttctcaacccataattagaaaaagaaaagatgttctaagaatatgctgttttgattgatgcccaagaagggtgaaaagatgttctatgggatgcaagaccgggaagtgcttgatggtcttgcctgcccactctgaccccgctaccgccgttgatttcagccgtgatgggtccctcattgtttacagcagctacgatgggctttgtaggatttgggatgcttcgactgggcattgcatgaagactctaatcgatgatgaaaaccccccttgtttcatctgtcatgttctcacccaatgggaggttcatccttgttgggactctggataatgctctggtaagcttttctattaggtttaggttgcaatattcagttcaagtttgagttatactttatttatttatacgtttctcaatataaaaaatctaaatgcttaattaatacgtgagaacccaagaatagagataggaaggaacaaaaaactatggttgggtttactctttagaaaactgaaagctatagtgggaagtattgttgttacctttgatattcttttaatccatattgaagtttatttaaatgttcctgctctagcttttcacattttcattgtttagtactcccaatctagttcgctttattctctttgttatatgcttgagctttctagcttaggacttactcttgaagcttggcaaagtgttgaattaggatttagaacttgtagactgtggtgtaattgttaatgcttgtgtttaatttggtcctgttgctagctttgtatctttatctttagctcttgttttatctttagctcttgttttatttgcaatgcttggtcttggttttggcatctcatgtagtggttataaagggatttcgtataatacactcaatttgcacactcaaattagtattacacactatgacttgtaaataatcttaaccatgaatgttttaagtagaaatctatcatatttaacaatatatgttgagattagttgcacgtgatagtgtatattgaaaatgtatctgtcattccatccatagtggcctcttttcattctattgtttcagagctcattttttaacttgattttgtgttaaaagaggctttgggacttctcaaagggcaaatttttgaagacctacactggtcatactaattcgaaatactgc

SEQ ID NO: 162591 - DNA, 1100 bp, Cannabis sativa
atatacaatgacacaattcacaaggcagacaatcacttacactaaagctggtcaaatctttttcttttttcctacaattgttttgaataaaattatgtgttaacacatcatggtagatctaaatcacatttgttgggttctcttctaagtataacattgtaattttaaataaaatattatacaggaattgaaatctcctcaccaaattctatgtccaatatttgtcaaaggttaaaaatagggcgcaaacgaattgagttagcaggattgaaaatattttagtggatgagcattgttattggacaacagtagtgtctagcacctctagacatgtggctttgtgattgactagcaatactccttcagagtcattatattaaactatgaacctgatacttagttggaccaataacaatattgacacataggaggttgttaggcaccactgatgctttttagcatttctctttagtggactaacctaatggttatagttagtttggagaaaatatgagccattcatcgaacctttctacaagaatataaaagttggaccaaattcattgaaatgtgtctaaatttttggacttttgttttttatatataaaaaaattataaaacttcaatatttttttaaaaattaatcattcataacataactatctaatattacattcatgagaccaatatatttaaaataattattatacactagaaactagtcgttaggatcctacattgactaagtgtgaaattggcttgggcaccctccttacaaatcttttggaattgagttcgaagtggttgtaacaaatggtatcccagccatgttgggtcgaagctacagaaagagcaacttatggtggtttataactatttgggaccctccctttcaggctagtcttaagttgattgggtttaccttatacaataaatgttaagagacactttgaggtctcgaacactataagaggtggcatatggctatttaaaagtgtttattggactatatccaataggtctatttagttctaatctaattatatgttggatgttagatttcatcatccgatcaaatataattaagaccggttcggatc

SEQ ID NO: 162592 - DNA, 768 bp, Cannabis sativa
tgtgtgtgtgtgtgtgtgtgtttgtgagtttgtgtgtgcacgagagcatgcacatgtgagtgcttgagggtggatgtgttgagttgtgtgcgatgggaataagtgagagaaaaatgtgaggagaagatatggaagcagtatgagaacaaaactcacctcaaagctgaagagaagctcgtcaagaaaggaatcaagggacaacgcatgcacacagagaggtacgaggtacggtatgaccatgtcttaaacatggcctagtagcaagacggtacgagcagtggagagatggcgtctgaaacccctgacatcccgaaaatgggtattctgcaaccatttgccctccaactcaggaccacttgactcccgataacaatacatggcgcatgaccacctcctacacctgcaacccgcaatcacatatggccaacttgttctttgatgaccacaaatgcatcttaggccaataaaacctataaataccctattctcaaatgtgagagggggttagataaatcagtcttgtaatcgccaacttgaaagtaatagaagaaagatttttctctctactcataaacctcattgacattttaatttgcattctactttaatcttcatcttgtatctaagttttaagtttttactttaattttctgactaaaatgttagttgacgagttcttgtcgtcaacatgtatatataaataaaaactaataaagattttatttaattaattatttaaatttaaattcatttattaaatcatataag

SEQ ID NO: 162593 - DNA, 1006 bp, Cannabis sativa
gctcccaaggggaatctttcccatagggattctatgtttgtcatttgataatatgcaattatatatatgacattattcacaatcaaataacaataggcttttaaataaaaataatgatattgtgattaaattatcttttattctcaacataaataatttttgtgataattaatcaagatgttatttttagtatttatatttacaacaacaaatgattgaaagactttatatgatataagtgatacttaattgtatataatttattgtgtaatataaacatatgtatttagttataactaaaatatttataatttttgtggctaattaatactttaagacatgaaattttagtatatatatatgttttcatatgtattcacattaatttgcttgggatgtcgatctaaaaattggattgtaatgactcaaatgatcaaaattgtagaaactaatttatttgaggggagctaaattaatttaaaattttaaagaaaatttatttgataagatactatttaatttaagtttatttatactaaatataaagaaaagagctcccaacacatgataatattattaagtctatttctaatgcaagatgtaagaatccgtattttctgtagtgataaattatgtatagttacatctgagattcgtagtattttgtctagatttcgtaatgttagtgttagtccatgtcaataaagatattttggattttaattgttcagatggtaacagctatctatttcggtattcttagtttagctgggtattaatataaattctgggtattatgttgagcaaccttttttatcagagatcagggattacgtttctttcttcttgtttcgtctttatgttccatggcaggtgatctttgagcttggtaatattaatccaacgttgcagatcagagcttgaagatgttgagttcagactgaagggatttcagtatcatcttcatcaccagatctgaagggagttcagattgaagaagtgttga

SEQ ID NO: 162594 - DNA, 866 bp, Cannabis sativa
aaattctattaatacatatcaaaagatgttatgcccctttttatttttttatctaccataattttttaaattgaagacaagacaaaaggaattgaagttagtctaattctctcttagaaaattataaattattaatttgaatatttaaatattaaagtattagatcatctctaataaaaggggtgaaaaaaaaaagaaataacatgagtaattcttaaattattagttgatatgtaatgttattaagtactatagtgctgcatatatgtatcttttacatattttcttaaattaaactttaataataatgtataatataattaagtttggtacgataaaaattatatcaaatttaacctaaaatatatcatgtataaaatttctaccatagataaattgaaaagttttttatttgctcttttatttcttgttaatgtaatttatgatttttatgtattttatttatatatttaattattttttttttatgtattttcaataaaatctaaagtttctgtaaactttttaagttaattctacatttaatatattagagcttaattataaaatttaagccaatataacattaacttatttttcaaaattcaatttaaaacaaattattgaaaatgatcttacattaaaaatttaaaaatgtaagtaaagtgtaaaagtaagaagtgtgagagcataataaaaaagaaaaattttatttgcacctcataaactaataagtacaccttaatatttaagaaattaagcttaaaataatttttaaaaattactcttaatattttttaatttttttcttatattattttatgttaatttcaatacttatcttaattttatttttataatttttt

SEQ ID NO: 162595 - DNA, 933 bp, Cannabis sativa
tggcacatgtgattcttcatggatacacgtgttaaatttcagtcgtcatcttatctcaatcctacgttgttaaatcatcccctcctcgtataaatagccttctattctttcataatttcatttcaccttcattcctttatatccacatcaaccttttagtatttccttcaagtttcacttatgtctttagaatcctgacacttgctcttcttgtgatttttgacgcaacaaacttacatttgcttacatttatcctgacaggtaccttctcaatacatacaccttgatttgtctcttatatttgtgtttctactacgcttgcgggtactcctttatcttataatagtctgcgttcgagtgtttctagtttttaattccacaatagagctttttcccttcttcacttacttatggaaaactacagatcatcttacgttcttgacggggttccctttattgaactttcgttcgaatcgtacgaggaagttcccgatccttgggcgcaatattaccaattgacgtatgagcgtcagaaatgtttggaaggaatttgtgagtgccaagaatgtctgacaagtctcatgaagagcgagattgggctcttggagggtgaagggcatgcccatacggacgcccatctttcccacctcaagcaactttatgttgatataacggggaaactccctcacttaagcgcattttcctgcttgagccatcttcccccaattgtgcacctatacctttgcctgtggagtcgcccactcgtcagcaagaggggggaggtagctcctctcacgatgcctctactgggttttgtgccttaaataaaatcttgttcaatataatcagatttacatattaataaagattagaaattgattttctgttgcatggttctcataatttatttcatgattatgtttaatgtataaa

SEQ ID NO: 162596 - DNA, 772 bp, Cannabis sativa
ttgtatgtctaccagatacctaatgtttataaaagaatgtgaaatgcaaataataaacataagctacttaaacacacctctccacctcaggactgtatccaatcacataataagtaagacaggtccaaacaaaagattccaaaagtgaaagaggaatcttcaatagagatgctggaattgcgtaagcccaagctgggtaaaaacgcaattccttctgtttgtagaaaatctcaagccttagaatagtcatggccatctcaggaattccattaacaagaagtatggttagagcaaagaacaaagaacccatatagtaattagcataaagaacatcaacttccatcctagtccgcaagaacacagtcatcgtgatgaaagcaacaaggataagctgcatgataaaagaaataaaaccatgttagagatttcactctaaatctagccttcaaacaagcaaaagtgattagagtatcataaatcctgacctggacagttttaaatatgtaaataaaagaatttctcttcatgagaagatattctcttgatgcgcaagctctaaaaagttcccatttagagagggaatacagactgaatgagagagcattctcatggccttgagctttatcatatggttgtgagagctcctcatttagttgtttcccaaaatgagatgccttaaacatattggagaaatcatccactgatacatagtggaaagctttctccgtggagtgccagtattgctcttgatctttcttggagattacctgta

SEQ ID NO: 162597 - DNA, 4197 bp, Cannabis sativa
atatatagctggagtatgatatagtgatttaatggtggtgttgcgcccaacattttccattataataattaatttctttggtgaatctatctattagaccttagtttatttgatgtttttttaaaaaataaataaataatatctcatcatttgtacaatgttataaatttattcccttataagcaggcatgtgttactgtgtataatacgatcagattgtactttgagtatttaaaattattatattaactgttaaacatatgtcaccctcttgtgtttggtaaatgcatggttatctaaattgtggtatgccaataattgtggtaatatttaaattatttaaaaataaatgttacgagtatttttaagatataaaattaaatttaaaaagaaagactcgtatttagtgatacgacgtacttgtattgatacgtaaattagattttagagggtttttgaaagtaaaataattattaaaaagaacactacagatatatatacgcatcaaatgaatttgtcatctagctatgtaaaataatatttgataatgtacgtcgtaacatataaatattaattatctattaacaagtttaacttatataggcacatatatatatatatagaaaagatttacaggcactaatattagtaaacaacattatatgtttcctattttaggcaattatatctctttggtttggtatttgtctcatcaaaattcagtaaattactaggttaaactttcttattatgatcttcgaacttttttttttaaaaaaaaaaaaaaatctatgttgaaaatctgaaattctcgactaaaacattgttccaagttttttattattattattattgttattgttataagaactagctgtaaaaaacattagtattcaatacaaatttggagcacatagcatgcagaggttttataaaacgacatatatatataatacatattaataaattttgtagatccatatatttgcaccaaataatattggaaaaaaaaatcatatatgggtttcaatgaaatgactcaacatgtatctacgtacgccagtacggtcagctcattaattcctggaatccatgataattaattacttcgtttaacaataataaacttattatttactctttatttttatgtacataaatagcaaaaattgttatgaataaacgaatcgccacttttgtaaactacaaatctgaatagacaatacaaaatagtactataaataaacaaaagaaaaaaatatataattttagaattagatatatatatataaaatgaaatctgctgttccttcctttcaaaactcactcaattaaaataattactgttttgaattttagattttttgactacgaaggaagtttctcatatagagatccttaatttcttcattatgaatgataggaccactctttcattgagcaaaagaattaaggcattatatgataatgtgtatatatagagatatatcttaaatgaaaaagatggaaagtatatgatgatgatgatggatgagtagccttttgtttttgctaacttttgaatttattttgggcagacatgcatgatatctataatgatccacagatacaaaaaccatagtgtattatatatatatatatatatataacactttagtatagtatggagacagaaactgcaagtacttgggaaagagtgaagaagcttcccaccatagggaaccaaacaaggtcttaaacatttacagtccttgtcacagtcgactctgaaagtactacacctttctttttctctttctttctttcttgccttttttcctctttcatgaattgtcaattacaattaagcttgctttttctcccaatgcattcctttgattgctagctaggatatatagccatgacgctaataatttacaagtaagtcaaatcaacccacagagaagaacaaaataaaatcgtgatttattcaagtgtatgaaatgacaaataataataccacacattccttcaacacattttgagggcactaagtaattaagaaattaaataattatttgttaccttactcttattaatttggtaggtgtgaccaaaaaaaaaaacacatcttgtgggtttatgggttcctcccacgagattgaagttccaacaatgtgtggactagttatacaatatcttaccggatagttcttcaaaaaaaaaattaaataattaaaggtcttctccaaatattatattgtatatgtgtataaaagaatatatgaaagctgtttttcacatttaaaataaaaaaataaaaataaataacaattaaaaatctagtaaactatatatacccttcctctaaaagtgccttctattgcaataacatgagtgataatgatattcaaagagtacttcatgcttggggcttccaataacatgatctacctttcaagtacttaggaataacaattagtccaaagagaattttagcagctgattgtagtatcttagttgaaaaaatggtggctatgataagaacttggagtacccgaaaattatcttttgctgggagaatagttctcatcaactcagtgttgatggctattcattcatattggtgtcaagtcatgatattgcccaaaaaaattgtgcatgaaattgaatccatctgtcgtagttttttgtagaatggaagtcatacatttacaagtttagcagctgtgacctgcagttctatatgtcttttcgaatcggcaagaggattgggatttaagagcatcttggattggaatttagcgactatgtttaaatatgtttgtgccattgcaaaaaaaaaaaacaatttgtggatgaattgggtgcataatgtgtacatcaaggaggaaaattggtggtcctataagaccactccaacagccagctggtattggcgtaagatggtcgccattaaagacaaagcgacgggaatttttgatgtatctcaggtgctgaatgacaagtacaaagtggcggatggttttcaagctattcggcctttctcttgcaaagttgaatggaatttaattgcttggagccgattaaacatacccaagcatagtttcattttttggctctctatgatcaatagaatcaagacaaaagacaggttgcagcagtacagagaagttgagaattctaaatgttttctctgtaatattgaggaagaagtcgagccacatctcttctttgattgtcctttctccttggactgtttgaagaagatcaaatcatggctgaattggagaatgtatagctgtcacttttctcaacagaattgtaaggtggataaggaaggtgaaaataaacaagcttaagaaatcgattttttttgttgtcatagtagcccttgtatacgaaatatagcgtacaagaaatgcaattttgtggtaaaattcctatacaaatatagagaatgtagctgccaaagtcaaaaatatagtgaaaaaaagaattacatgtacatggccaaaaaaaaaagcaactaattgtaagaaagaatggtttgataccttgtaaagttttctagatatttagattcttctcattcgaagaatgctgttaatttatacaaaaagtttttgagtaatgaaacatacttgattcaataataaaaaaaaaaactatataaacccaactaaaaaaaataatcaaaattaaagttataattatttaattagtcaaaacacaaagtgtggtataatgattggcaatttccctaccttaaataatttacattttcatgtattcatgtaaaggtgtaaatggtatgtattggcagtatactagtgactcgatctaataattatagttagggtcgaccaaagtgtaataatcgtttaatttttaaatgagaattagtagataattagggcttaattttaaaattacgcttttaattattatttatgcaattgtggagatatatttgaattctaagtgtgttaattatgttacatgaaaaattttatgtttttcttattttatgtccggtaacaatggaatgcgacatatggcttatacagtcactttttggtatgatttagtactttagaaatagtgaggcaatataagtagacaattggaatgtcgggtgtattcgaggttaagattttggaccataatacccttaaattttaaggttacttcttgttagaaatttattttaccagg

SEQ ID NO: 162598 - DNA, 1207 bp, Cannabis sativa
agatgcaagtaacctcagtcaaaagagtgaatacaatggtaaggaaagcttagtggttggtgatggtaataaactcttaatctcacgtgttggtttgagttctctaaatacatacagaaacactcctttgttgctcaaaaatgttctacatgctcctaacattacaaagaacttgattagtatttctaaactcacaatggacaataatgtttatgttgaatttttctctgattgttgtgttgtgaaggacatggcaacaaggagggtggttctggaagggaagcttaaagatggtctttatcaacttgagaaagcaactacaaaatcagctgctcctgtcaccttcaatggttctttaaatcattcctgctttgtttctaatctgtcttcgatttcatcgagtcatgtaagccagcctatggttgtgcaatcttctatttcaatcaaagatagatggcatcaaaggttgggccatccatccagtcgagtcttaagtcatgtattaagtcaaatcaatgtaaggaattggaagaatgaagaaaatgctttctgtgattcctgccaacttgggaaatcccatgctttgcccttcaaaacaaatccatatcatgttaaaaatcctttagaacttgttcacacagatgtttggggtccagcacctattatttcaaataaaaactataagttctatatcctttttgtagatgactatagtagatacacatggatatatcccctcaaagcaaagtcagatgccctcgcagctttctcccattttaagtcattggctgaaaacaaatttgacaaaaagattaagtcactccaaacggattcgggtggtgagtttcaatccttctatgactttgtccaaactcatggaattaatttccaacacccttgcccacacacttcagctcaaaatggcagaactgaacgcaaacataggcatatagttgagatgggcttgacactcctggctcaagctcatatgcctcaaaaatactgatgggacgcgttccaaacctcggtctatcttattaatcggttgcctactcctgtgttaggtaacaaatgtccttatgaggttgtcaatggtagaaaacctgattatcattttttgaaggtttttggtacaagttgtttcccatgtattaggccttaccaacaacataagttccaattgttggaagttattttaccaggaact

SEQ ID NO: 162599 - DNA, 6372 bp, Cannabis sativa
  modified_base (6304)..(6316): a, c, t, g, unknown or other
taataataataatgaaacagaggccgagtcttcatcaacggtgggaagggtacttaggggagagatcggagggtcagaaaccgatcttcagtgtacggagatcatcaataatcggacggtcgagcgtggtggttgaggttatgggaaacccagaagaggagtatcagatcgaagggtcatttggtcaacgaaattgcacgatctttaacgcagcgaaggaatcagtggctgagattaaacgcaaagttgatacttcaaccaatgtggtgcttgctaaagacgttttctctctttgccttaagcccggtttcgatggagcctttgccatgggattagtcctcattcttgatcagatcaacggtgacgatttcttcaacgttggaggaggaggagaagagcttgattaaaagaaaaaacaattaataacttaaattaaactaaaaaaaaaaattgaactaagtacactaattatgtatcgtatctttgtaatatttgtggtttgggttttgtgttttttggagtaaaaaaacaaaattaataaaaaaaattgagggaagtgatgaaaaataagttatgcgattctttttgtgttctctctttctttcttttgcaataatttcattatcttattaatttatatatatggttagcaaaattattatgttaattaatataagaaatagttgagaaattattttaataggataaaaatgtatgaataatattttattaaagaagaaaaattggagtgttcgtaagtggtccttattgacaatttgtggtggaatttgtgctaagatagttgcatgggtaagagttaagtggtcacacatttatgtatgtacactagtttccaatacaaaactggttgtttctgcatcccagaattgaaagtttctataaatttattacgttttttttttttttgcaactctattagactaatactttatttaatttttatataactcataaaattaaaattaattaagatttttctccccgaatctttaaaaattaaaataagtaagacttgatattaaattgcaccagtaacaatattagatctcataagagtgttatgcactatggtgctttttagcattttactatactaaattatgcctctctaactttttgaattgttaaaaattctttcgatctattgagattgttgaattcaaggagttctgttcaattttattaatttggcgatagtccatatatcaaatcgtatttccgaactttgatatatactaaatcatgctccaaattttgacatgtatcgaattttatcctatgaactttcgatttaagtttctattaataaaataagaaagaagtcttgaattcaattaactatctcaaaaattctagttcaagaggaatttttaattaaaatatttaactagttcaagaggaatttttaattaaaatatttaagtgcacagtaaaaatcaattcaagagtagccaaaattttaatttgcctaacattaatattcttagtgagttgtgcatttaaattagttggagacatgcttacatataacaatgtataaccaatatttgattgggaaattttgatgtgagatttaaagtgactacttaattataaacattgctaccaaaaatattgttgacaattaaatgacaacagctagtttaggatattcaattatttcattaattatagtgtgacaattatattacttgagcaagatcaatgttgcatttttgctgatttcaaaaactaaatatatattatctatatttgatattattattattttttataaatatataaggaagatcgtaaggaattgcatcatcctttataccattttttgaatatatatttcaagtggtaaatactatatagtttatatcatgttgttattattttaatattgtaaacaaaaaccagcatcatagatcggctctaaaataagtatatattttatgtattttatttgttttattagtgagagagttgatgatcaattatccaaaattgaaatttgaaagcacacaagaagttaaaaatcagggacatattaattaatctattataatattatatttttatatataaataatattgcgattgtgttgtcccaccatatataatttcttttttctttggttagtgaaaactgaaaaggtgtgttaaattaattaataatgcatgagccatattctaacatatatggagtaaatcaatcatatcacatggttaaaaatcataataataataattaagtagtcaatgagtggggagtggttacatcttcatgtaatattctcactcgacccttatctatacatgtccaaccatggaaggttattaatttaattctttttctgatcaccctcataggaaatatcttttagatatcatcacaatattcccccacctcttttttagtgtacacattaatatattatacactttaaagttttccatacatacatagtattttaaattgaaaaaatcctcaaagattattaaaaaaaaattagagaagaaataagaaaatattattagaggtgtcaattaaattcatttagcataattcaattaaatacaaattaaatattgattgatatgtaaaagtaaccgatctaatctaatctacatatatttatataatttttttaaaaattatatatataattactatgactataaaaaaattagtttttaaaaatataatcaaataatataaatatattttaaaacttaataaatcaaataaatattctattcttatatatatttatctacatacaaaatattaaacaaaattaaatatattttttacatataatttttttcttcttttaaatttttaattttaatttattattaaaaacataaataataatattttattttattttattgttaattacgtaaaaaaatattttttaataaaaattaaataatataatattaaaaaataattaatccaaaataatattaataatactccattttttttagcctacactcgataacaatttatagttttactaaagctatagctataattacaatgtcaagctgtgaaaaaagactggcttaatccattgtattgattgttgtttgaatgaatcttgtttcaaaaaaaaaaaaaaaattacaatgtatatcaataaaatatgacttataaattaaacacatgcttataattatatcattactaaaacaaattaataaattagcaatactaatatttaattaagtgacacatacgaactgtggtcttctacttcacacattcaaattgcatatgttctttgttgctttattcccgaacactatatgaacttgtggtttaaactgtgagttatatctaataaattaaataaaaccttataatacataattaaaatcatggttcatatccatttcttttgcttaattattataaaatataattgaagcattgctatacattgactaattaaaaaactttattatctgtcaaactcttcccagccgttctttgaataagtatcttttaatatatcaaagtatatatatatatatatatatcaaaagttcatatatcttccaaacaaactttccaataactttttaaagttgttaaacagtctatctatttagttatataacctcaacttttgttttttcaaataaattagctgtactatatcatataatattgtcggtgtaaacgcctcataaaatatattcaattaattcgaaagttacaaaaagacatttatttattattttattaattagaatatatataccttcccatatcccatgtatagtataaattaaagaaagataagtaaagatttgatgatctgtaattctatgtataaaatgttcattttataccacccttaaaatgtattaagttttattattatcatcttgttcttttgttaattaatgtagtatatttgattgttagtatccttttcatagctagatttcttttaaactcgagcactctttatttgaaaaataaataaataaatagtatgtaggattaaataatattgttctacatgataataataaatataaaaaaaattaaactatacataaaacataatttattttatttattatactaattaattttgagataaaaccttttaaaatagtaacattattggcctttcactgtaaacccatgttattgttattagcgtactttaaacccatgaactttaattataccaaaagagaatttatagtcaaaaaattcatgatgaatgtttagattcataaaggagtggccactgtgagaagaacattcttatgaaaaaaactcatcataatcttcagaaaatacaaaccactttagcctctcacttctcacttttgccaaaaaaaaaaaaaaactttctttttgattaaagttgctaatcaaaatatctacgtgtgatatgctctttcatcccacgtaacttaattgactaattattgtattatataattttaaagctaaaaagcacaatgatgattcacgttggctaatgcatataagagatcatatatcatatataatatatattatattgataaaatattatatttctatatcttttttaattgacaagttcgacttaattactttttaattatagtatttaattatatgaataagatggacactagtagtactactggacactacgtataaatatagttatctctgtttaattaattatattttatcattgactccaacgtacactctctttgacctatatctaacatttactatatatatttatgcatgtcgatctaccatttatgggttttttttatttttaattatatgataaatgggtgcatgtataatgtaataaataatgataaaatcatttttgatgatgagaatgaataattaaaaatcaaatcaaatcaataattaattttttaattaatttaaattattgagtttatgatttccttacatttacattaattaaggaattaatattattgaaacattttaaatatttcttattaaaagaagttttttattctaactgagtattaaattaaaatatgaggaatacgacaagtcgttatagtattaactcataatcacttcacgttcttattcattaatgtgttgtaatttaattttttttttctttacattgggggtgaaaaaatttgaatttgatatttctatttgtaaaatgaagtgtaatattcctatgattgacgacaatattttcttataatattgacaatatatatcttccatttatataagtttgccaatattttatgtaaagccataaaatttggcaaacttatataaatggaaaacaagttaattttttttatcttccattgaatagtttattttacaattacggaaaacaagttaattttttttatggaccaacatttttattatttatttatatgcatgaccggtttaccaacgatgatcatatcttcatttttcatactctttgtaatttagttagaaaaaactaacaacaagtttacttttttaggccttttttcatatattataaatatattttgatccataccagttattttcgacctccaaaactaggacaatggactcggctggagccccttggaaactagatgaaaatcttggttataaaagcttctctctttcttattttgaaagctttggttattataatattcatactaaaaataatttattttaaatagtaataaaaaaatgaaatttaatttttaaaaatgttgggaagcttggttgtatatattccaaactcttcattttttgttaagggcattttgagtccattgggcctcagtcctgctccaaggggcccactcagcttaggtaccaatcaattttcgaatatacacacaaaatattttgataaattttaaaaatactacatatctcatgtccaataactaatttctcctcagggctggccgagtctaacataaaagtgcattggaaattaaaaaattatgttataataacaaggggaatttttatttttataatttttaaagtataagtttgtaaaaatgtagttttttctcaaaaaaaaaatatatataatttgtattgttttaactctcaacaataaaactagttattatatttaaaaaaaaaagttattttaagacaactttttttaaaaagtgaaaagatctagaaaaagcctccttatattaactggttactcttaccagattttctcattttttttttcagctttatctttaattttcccacaatataacctttttgaaaaataaaagggaaatttacaaaaannnnnnnnnnnnngttaacttttacaaaaatactgtgacacggaaatcttttcaaaaatactgtatttt

SEQ ID NO: 162600 - DNA, 709 bp, Cannabis sativa
aaaaatcaatttcatctccaatttaatctaagatctaaaactcaaactcaaacctatcaaaccctaactcaaatccaattctaaacatgaaatttcaacaatataagatttcaaatgcattaataaatttaaatttgtgtatgaacaaatatgaagaatacaaagattgatctctatttgcacgaaataaagagacttcagatctacaactagaggaaaaaacttgagactttaaacaaaaggcccctactctcccttgttcttgttcgtcggctttaatggtagatcgggaacctttgcctcgtcgtcgatttggaaaaccaacatccatccatatcgaagctccgtccttgtcgctagaaggtagatctcacatggaggagttggagttgccgcctgtgtgttgtggggcttcggagttggtgaaggaggaggccggaggaggttgcctatcaacatgatggtcttttcaaagagtctttagatattacacacttggatgttgcacatttttttaatgaagattacactaataataacatgaatattgtaatgaagatgagaatgtctacaataaaagtcacttttctttgcaatatttcttattattatttattttttaattttatttaggatatttatgtaatataattttttatttaagtatttatattttaaacttatcatattttttttcatttttttttgt

SEQ ID NO: 162601 - DNA, 1775 bp, Cannabis sativa
atatggaaatgactttaactacaaactaaagttaaacgtcctctgcaaaaagaaaaacaagactagtagacacctcttcccacattttgagtttgcattacaattgtgctacaaactgctgaaagaatttaacatgtaatggaggattctagttcagatggaggaaatattgctgtgcagtattaccagttgttgggaaagacaaactctatggcgtcatgtcatatcggccttactatggggtatttggctggaaaggaatagaaggatttttggagaacaatctaaggaggtgtctttgggacaagattagagtgtgggtagcccatggcttcatcatgtaaaaggattttaaagtatccttttctgtgtcttacttagaaagtggaatatcttcttgtaatttatttttagtctatggttttattctcgatatcattcaagattgtagtgatatccgacctttgcaccacactcttcatcccccataagctacggctactcctttaacacatacatatgacagcataattcttctacaaaagtatatcaatgaatcgtcaagtctatgataccacaaaatcaccatcgaccactatcgggcaccagtagctctaaatggcagttagttaggaataccacttgatattcacaagaaagggcatcagttgcaccagctaaggctatcggtttcctggaagacttttcacaatttcactgcttgtaatttttatttgctgaattaatacaatcctgagttctagagctagtctttggctctagaaatctacgaaatattggggtaaactataagtagaaaactttttcttttggcttaaaataaattacaaattgaaaataatggaaagattaaaaattaattataagtacctgcccattgaaagaatacctctgacatgcttaacttggctaaattcaccaatgatggtcttctctgcaactattctttgctcttcattcataggagcggatcgcccattagccacatcggccacttgggcaacgaaacccttatccacctgttaccaaattcaattatatcacaaaccaaaatttcaagtaaaggaaagaaacaacccctttcttatttacttaccctaaagaagtggtttgtgttataacctccgagacgaacaagcttgaaaatgtgctccaccgttatgggagcaacactcgggtagaatccaaattctatatcaccgtattctgtctacaaaccccattaatataatttttgagaaaatagccaatgagttacatgcatacattgaattgaatcaagaataaaaacctgaaaaacaacacgagccgaccccagctcgggttcatcagaggaggcgccaacaaagatgagtatgacacacagactaaggaatacgattaagattggattgcggttccgcattttttgagcgaattccgactccctttgatctcactgttttgagtgacagaagttctgagttttgactttcacgactctcaattcttttcttttttcttgttagaaattgtttagctacatttaattataaattaggcagaagttacgtctctagtcacgtatagttagttttattttaggttatagttatagttttttttcaaatgtcataggtaattttaaaataaataatgttcaatatagaatgataattgtagaaagaataataataatttgaagaaaaagaatttataattatgtaatatattgaaaaaaaaataaaaatatatatattgtgtaaaattttgag

SEQ ID NO: 162602 - DNA, 2181 bp, Cannabis sativa
  modified_base (2106)..(2148): a, c, t, g, unknown or other
taatcgaaagtattgtatggggcaacaacataatgcccctctatcgccattactacattaagaagcataaccaagacccttggccctcccaaatttttaataataattaaattatagtacattttttataatttctatttgtttttgtttaaaattttataattgcctcttttatattttctagccccaaaaattaaagttacttctgtctctgattgcattcatggactcaaaccttttctcaatagccttcatcttcaattggttaggaagcactctctcttcaagatttttcaccacaagaactcctattgagaaagtaggtaaatattttgggtagtcttataaaatacaaacgacatacaaaattaagaaagtcaactccttatactaggataactaaaattgaagttgttgcaccaacacgtacaaaaaacatcaaaccatttatctctagcaacaatctcaaagataaacaaattagtatcctagagaaaagaaatttgattatattatgaagaccaagcccaaatatccatttcttcatcatacacatcgtggttagcttcactttgttctatgggcaagccaattggcaaagttgtaatagacaacacaatgattctcctaaattgccattattgagtcaaagaaccacaagcttgacttaattgtctctgacttaaaactcaaaagtactcatagcttgtggtaagatcaaagaaccacattctcaatgtctttctttgatgttgttttctttaaattctccctcttgcacaacgattgtgaaaatagcaactacgactcctatagaggaagtgggtaactgggtttcacttagagaattgaaccctttagagcagtctacacttttattcttcttacaattgtgtctcatactgtcgagaaataagtgtccttttgaagtggttgtatgcaaaatacactctgacttttttttattgacctttgttgtccaggtgataaattaagggttctacaaaatgtcacaaaggcagatttgtacaaagcacaattctcggttcaaatttatcgtccaccttttctcaataaatctagagctcttgctatgaaggagggagagttggatgggaagtatattgatgtcaatgagaactcccatcatgaaggatgcgagccttttattaaaactagggcttggattgatattacataatcaattatgagagggaaaattgtcaatctccctaaagtcagagataagcactagattgaatttcggtatgagaatttccttattttctactcattacagtttgtttgggcatccttttgaaaaatgtgttgcttatctcgagttgaatgataaaggaattgatctcgacctaccgtatagaccatatatgatgggatacaagctgccaaactctggttatgatagatacaacaatagtttgtccaaggcgaattcctacccacttctcacatgattggcttgcaagactattgtttcttctatccctggaaatagccttaatcgaagcctgaccactagttctataccacaccctctgcccccaactaatgttaaatcttctttacaagacaattctacttctaagcagaaggaagttattacctgattttccatctcctttcccttcatgtttttttcaaactttttcatcttttgcggatctttttacaagtgaaaatttcattggcggtctcaatgtctcttatagtaagactcacacaatccctcttgtttatcgtgattttcgaaaactgattataaacgataagaactaaagaaacacataatttaaaaaaagaaggaataaaaagagacaaacaaattttacttacgtacgtggtttggggggggcgtattagccttagtccatgagtcagtattattcagtagttcttagcttgaaaaagcctttaggagtacaaagaatatatgttctcaagttttcctgagcaagtgttgcaagaaaattcaacccttaatccagagcattcaatggatatttataatagtttgagatttatatttagttttctttttccgtctattagagagttgatagggaataactgttgggttttatgccnnnnnnnnnnnnnnnnnnnnnnnnnnnnnnnnnnnnnnnnnnnatagatcagaaataacatttaaagatcggaaga

SEQ ID NO: 162603 - DNA, 1745 bp, Cannabis sativa
aaaagatagcatgaattcagttttcacctgctttttttgatatggttatgtcaggtctaaattgcctgtacccactactaacaaagtcaacaagaagcccatttacatcaaggatcagtagcttcttctgagaacgggataccaattttctttccggtaaggatccaggtatctgaaaaagattgccttcttcagtggtagcatccaaaagaattccatcttttgcttcattcctttgtgatgaaggggcttcttccatcgtggtatctacgttgacagtgtctaaattcaggagatcactaggaccatcactaggatcaccattattcttgcagcaatcatttccatctagatttaatgcatcatttcccctcacaagatttttgccactcttctgatcataactttcctcagaaacatctatcataacattcagagtttcgtttccacaagcactatcccttttatcaatcgtttttttaaccttcttccttttctgcgatgcagatttaatatctgaacagttaacagagtctttgtcacaaaaaatgtcaacagcctgttgtgagacagcctctattacagaggatgtagttccaatattttccacaaatccagatgtattatatccaaccaaactctgagatgaagtgtcatcaatgttattgtccacagccagttccaatgttcttcctgattcagatgaatttcccttttttgggtgatgttttggtttcttcctctggtacgtttcaattttcttaccttcagggacatggctcacctcagtggagccatcctgttgcattattgaagcagtatttactccacttggaaaaccacttttctcatcagtatttggagaaatatcctttgtatctgaatggttaacagagtctttctcacataaaatgtcaacagcctgtttattatcctccacgagatccctagtatttcctgattcagatgacttccttttttctggatgacatttttgtttcttcctcttgttcgttttaatttcctgaatttcaggattgtgaccactaacctcaatgcagtcatcctgtttcattacagaagcagtctttactccactggaaaaaccaatttgctcatcattggttggagagatcctctttgtatcacttgagtttgaccctgcaacattcgtcatatcagtaccttcatgaagtttatcaatagattcacagtcattcagctcattgttctttttacgtctctttttcttcttctttcccttggagtcactgtctgcattacgtatgggactttccaaatttgcagttccgtcaacaataggatcatcctcaagctgttgttctctctctttggaagtagactctgaagtggcaccattcagattctcatgctcagtattatttctctctgggctgacggttttagtttgttcacccttattattccttcttgaacgtctcagttccctgttgtcctcaggctcattcttatctataggctctgggaagcacccccccaaacttgtctctccactaataccaactacagattctgaatgcaagtctcctccagattcaatgctcttcagtgagacgctttcacgatctgtgctatcaattttagtgctatcaccactctttaacttttttccccttcttttcttttttgttgaagttggcaccaactctgtattaacattggcctcagtcatctcctcttttgtatcgttaatgacctcagta

SEQ ID NO: 162604 - DNA, 3565 bp, Cannabis sativa
taatgcaataatatcaatttttatgtatacatatgtttatgtaaatgttctaaactcttcaattatatcccacatatgcattattttaatgcattttttcagggttctttttttaaatattacaaatggtagtattattattcaaaataaattatataaacttaataataaagccagaaatgcatgactaattgcataattagttggatacatatgctatgcatgtacattaataatattgatttatttatgcagaataataatcaacatgatcattaattaatttgtttaattccttttgataatgaatttataatgatatgccaaacccgtgcatagtcacatctaaatataatcacatttactttattttattctttcataatctaggcatagatttacagtaatttctcaacattttatataaatatcaccttgcaaaatggtaaatttttcataaactagtattttccaccttgaaaagctattgcaatagactagaccatattattttttaaaaaaattttaaagtataagtttataaaaatatgatttttttttctcaaaaaaattattttatgagaaaattttagttaaaagttaaaacatatgaaaaaaatagcatgaggtacttggttactgctttatggtagctgattactcttctcgttaccataagagtacctgattattcttatttgatttctcatatttttttctttttcttcaattttttcgtaaaataacttttttttcaaaaaaaaaaaaactatattttttttaaaaaaaatgaaaatataaaaattcataaaatttgtaattttttttttaatgtcattatccaaaataacttaaaaaaatagtccaaaaaataaatattattttttttttcataatttttgaggaaattgattgatgggtgatgatttttttggtcccattatatcacatggtggcatagatgagaagaatggggggtgagtgaccttggtgtggttatggtgacacaaatacatggttcaatttcatcaccattcaatgcaatcacatgttatagatttgccttatatattaatttaataaacataatgtataatgcttcttctctattcaacaatgtgccttaatttgttcttactaggactttttcaattagtttttcaactaattaacttacttgattcactgttgttaaaccaaacacattaattcttaatcttaaaaagtacttttatgtaaaaaccaataggggacaagaagaatcatatatgtgggtcacagataataatacattgaacattgaagaaatggccatattgggtatgagtttcttctcccaaatgctagccactttcttaatgatatttttgaaagaaagaaaaaataagggttaaaaccaacttccaatgtatatataaaaatgcaagaatatctactgaattatgttcccttgtctcctataggactcttactaggataacatttatagggtttgcataattcaatgccacttgagattaaattaattcaaatttagaacaaaaacattattcatgtgaccccattaaacttgcttttttgtaaaccctagattcatggtctatgtagtgaattataacctcaaaaaatggccttaattagtggtgagtacagagagtgagaccccatgaattgttgttagacctttaagaaaaagaaaaagaataaaagaccatgaatgagtaatgcccttagtattagtattaaaggtttgatttttaagggggcaaggaggcataaatgagtaatggactgtaccctttgtttaattttttcaaatatgaaactattaataaaaaagattaaataaataatcaaaggtggtagtttgttggccaaaatggatacataaggcattggaagaggttgaatcacatgccactatactttgtcatattaccatattgatcattaattacttcttcttcttttctccactatataaagattgaaacaaagcttatatttttcataaccaaatttcaaagcactcttcaaaacaacaaagaaaaaaagaagtaaaagatggcaaatcaacctttaaggtccataagtttaccatcaagggaacacccttgttgtgtaagaatagaagccttattaaaccacctcaaatcataccaatcttcaccatttaatggatttgaaaccattcaagctagcttggttggtttagcagagttgtatagttgtgtagaggaactaatcgcctcgccgagcacccaacaagctctcttggccccaacaaaacatggcaaagtggttgaacaagccttggaaagttcaatcacattgcttgacacaaccaacatagcaagagacttaatggtaacaatggaggaacaagttcagagtcttcaatcagcttttcgccgaaaagggagagattcaagcattgaaacaagtattcaaacttatctttgttttagaaagaaggcaaagaaagacattgccaaatgtcttggagggttaaagagaatggaaactaaatccattgcttcacaactacaaggcttagaagatctatctatagttgaaaaaacactaagagaaacaacctcaatcaccatctccattttgaagactcttctcaagtttattatggctattccaacaacaacaaatggatggtcattgctttcaaaagtggtaaagatgaaatctttgtcatataatgatcaaaaagaagagaagaagaacaagaagattgtgaatttggtggaaagtgttgacctttttcttcattctctaatgaagaacatacaaagtaatgaagtggaaatgagtcaaaggatgttgttggatcttgattctagtagtgaagccattgtggttggattgaatactatgtttagatgtttggtccaaaatagagtgtctttacttaacatcattactaagtaaaaaaatgtatataactttatattagttgtatatatatatatatatatatatctagattagatgttggtcatggcaaaccacattttataggatttgctatgtacttttatcaaagttgaaaattgattcaatccttttttggctacaaatttattagttgagtatatttcattttcaagtttaaatttttcatcaacaaaattttaatccaatgtttagattgaatgtatttaaacaatgaattatactaatagaatcactaagtgaaagagaacataaaaccaatagaaaaaatcttggctacaaaggataagagcatgcaaggcccaaaaaattataagaaacttaaacacaaactcagaaaataaatatatatcaaatgaattttgttttttaattaaattaatgaaaactataattgctatattatatgcataatcatttttagtttattaccacggccgtctcaactattttgggactttgtcaaaaattataaattgataaaaagaagatatacttagaaatataaaatttgatatttttttctttctgtgaaaatagacattattttaaataaataaataaataaaatcccaaaaaaaaagggaaacttacaaaa

SEQ ID NO: 162605 - DNA, 6940 bp, Cannabis sativa
  modified_base (6887)..(6915): a, c, t, g, unknown or other
agagagagagagagagagaggccacttgtcttagacttaccttctctcaaatttattaggaagccttaattatggcggaggaaaaccatgggaacaaaagataattcacaaaacgaaaacatttaacaactgaccctaacgcaattcaaagccgaacaattttcagtaatgagccctgaacaggaataggaagcagataatgtgtcctaactagattcttgatgcaaaatgcatccccacttcctgttgagatcttggaaagacaggcacacaaattccttagtcttataaacccaagttgctagtctacactagttggtcacttgctcccactaattgactttttgtgtttctccattaattaaaatggtctgtgttggacgggtcctttgtttgggttaggccaacacgtaagttatgttctgtaggaagaaggaacttgggaagaaaagagaagtattttacccctagagggaggatactacactcttttgtgttggttaccccaaatccatccaacaagcccctactcttttcacttgtctctcctaagagttcataatcctagagagtgtaataatataataatataacaacttccaacatagaacctattgttcatttgcatgttcccttacccaaatccatccagtaagcccctactactcttattgaatcctctcacttaacagttcattctcctaaagagtgtcagaataaactacttccaatatggagcatattgttcattacttcatttgcatatttccattgtttgaatcagtacatccatccaataattcctattactctagtttcacttttctcccctaaatgttcactctaaagagagtatcagaacaaaataatgaaacaaattccaatatagagactattgcttctttacatctttcctttgtttaaatcggttcaaacacaaccactttatcacactatcatttgccaactatttctctttcaaccaatgtataagcatcatgtgattctgtactaacacaatctgttgattatttttgaacaacatatataaagtaacaaagtttcttaactaaaaccaaaagtaaccaatatgatgctttttcattttgttctgaacaaaaaatcaataccagccaaataatcttctatttccacaacttggcctcaatactatgagataaaaatttctacagcacgggttcatttttattccaacttttaactcatggacacaactagctacaatgtttaaagagcatgagaaaccatcatacctataagtacacaaaatagatttaagtccaaaaaagaaaagctgccgatatagaaaagtattgtagaattaagatcgatataccttgtcaacatcaactaaagggacatcaaactgcaaagatgggtccaaccactcctggttcgataaagatgcctgggattttgaagcgagataaattttaaatataacatatttctttaattgagtaagaaaggaaaatttaattatctgagcaaataaacaaatgaaataattaagttgttcttgaaaggaggagcaaataaaagagagcaactgtgccatttttgttggtcagcagtcaacacgtagaaagatagacacaggctttcctatttttgactactactatgaaaaaaattatgtaggcaaaagttctttaagtttctaagatgttgatcaaaaataagtttatacttctcccaaaacaagaggggaatgaatacacatgaattctaacatataagccttagtacactttttggatgactcaaaatattatgcaaaatggaggatatgtaaaacatatactctcgtaactaaaataattttcataattatctaaagatacatggaacataatgaatagctatgagattacatttccatttgaatccatggcatcatttccacagcaattttttaactctttgtcacattccaagcctggagtccttacagtacaggatccactgcaaccttcattttgaacctcctgttgttatctacagaggtcaaatttctaaatgaaaaggacataaatgaaaaaagtactagccatagattaagttattatctataaatataactatttattctatatatacagatatatgaatataaatatatatcctttatagctcgtatggtaaaaactaataaatgaaccttaatgccaatgtctccttcttgtgagttgcataaattgttcccttcctcacaacaggctttacttgattgagagaaacaagttctgccacttgtagaagtagaatgactacagcaaacatccctcttttcacagaagccctgattatttgggtcatcttcatgaggagggttttcacaatcatctatgtcctggctcatatcaagtgggggttcaaatgcctgccaagtaattaatttgttaaaacaaaaagtaaatattcaaggtatctttgacgataataatttaagaatgtgttcatataacctaagaaggctgagagaagagacaaagtacttcaataacaaaatatcatcacgctataccgatactttagattgaaactaaagcaaaaaatacacaaacaaatgatgaataaggtgactagaaccaacctgaagcatagtaaatatgaaatatgaatttgcagaaatacacctgcaaagataggcagatcaattagaacttgtaacttacttttagcttatgtcaaatttgcatggagactcccctatacatgataaaggtctaaaggttacatcctagtattttgtggcctccaaattaatcagcacaagtaccattacaaacaacgaaagcatagtatgcatcaaaaccaagctcctttccctctagcaaaattccagtggacatttaaattaatcgctgaaatttcctatgccctttagaactgtctttacctgcactgatcaacccaggtagttgtgaccaaaatggggcttgcaaattatgataatctcccaatgaatgctgaccgaaatgtaattggaaactgggttggtagcaatattggtctggtcaatggtaaaattaaaattcttagacatacttcttggtggtgggtatagaaacatgaatctacttttggcaccatggcatcattcaaggctgaacaagctaccctaataccagaatcctaagttgaaataagaggcttcgacagcattatataatttgtacaatatttatagaaatctgatctcctaaaaatcctaacttaacctataatcagccctaatcatctaaagaatactattatctattaagttgaaagacaaatctcacaaatttaggatactaaaacaataaaatacctaatgaactagagagaaaatcacggaaactatgcttcattttctagtagcccaattagttgacgattagtaaattacaaaatattaaaatagaaagaaacacatgatgtagatgtagttaccgtctcaattcttgaaacttcaaaggataatgggataacaaagcctgcaaggtcatgcaacaaaacacatacatgtgcttctttaattagtttcataatagttggtttgttaaaaactaatgaagaggtgaattttttaatcatcagctcgtctgttatcaaagcaacaaacataatatttcactaagaaaacttcatctactaacatatttcttcacaaacttatagattatcggactctagaagcaagatatggtatggattgcagccactaacaaccaaaaaggcaatacttttccaatctactaaaatgtatactaatgtcattatccgtactagaggtggtagtaggccaatgtcaacatgtatgtctaaaagttgtcacattcttacaagtttaattttttttgtttaatgaaattgttcttcctcgctaaacaggatgatttatttttatttaaatggtccaatatcaaattatcaaccctgaaaattccaagtgaaactgagaactaaagagagcaaaaaacatggatagttaaaatacctgttgtggaggtggaagcttcttaaatgatctttcgtatcgtctgacatcctcatctgcagcctctggatagctgtacacggaagaaacactcactatgagataaatacagtggcagctctactctatttgaaagtacatagcttcacctttatcttgagcattttatagtctttattggggaccaaaagagtttctaaagcaaagaaatcaaagaacccaaatgacgtaaaggcgagaaaaaacaaaatctgataaaaagaattcgaggaacaaaatcaatgacataatactatcttttttcttcttttttgaatttttttttgctctggcagttcgactgggaccttccagtggcccaagattttttctttttttagtctgtgggaattcgaacttggaacaatgcctaccagcactttccaacactcctcactaccactagaccaccccttggggttagtggacatagtactatcttaagaccactgctatctccattacagtggctgcagattaccactttgacaatcaatttcccattgaattttccaaagcgtatatctttacaatcaggtcaatcaaatctcatccgcgcacattaagtatttcgatcagaattactcaagaaatcaaaaaatataaatatatcaattaagtttcaggataatcctttagagaaggattttgaagttgcagagctaggcaacaatttaaacaaattctaatctaaaacagagggactgagaatgataaagaacggttagttacttgaggtaagcgctaacgatacgccttagggatttgatttcaagggcttcctcgagctttctctgacgaatttgttcctcgtcttccgtgtgtccttctagagacgacatcagtgtgggttccttctccttgaagcttcaagaagaaggagtgttgtaggagtctgtgtttgttgttgtgtactttgaatggaatcttggcagagaacagtggacgaggatagtgtgtgcgctttttcatacgagacctatttatggagccgccgtgcctgggcttcccacctcttattgggcctttttctgaacacgaacattgttaccggctcatatttccacttacccaaaactgaaaactttataattactattttttttttttcttttttaatttaagtaaatgtgctaaactctcaacacttcacaacatactagagcaacaaaccctcatttatttattttttttagaaaaaaaattctacaatatacctccttaaaatggatgcactaatacactattatttgttttggtatttaaaaaaaaaaaattgttcaatttttttatagttgtatctgttgtagttatttaagatgtttgacaaaattttaagaaattcggaaaaatttaacatgtcaaaaacaaggttcaaagagtttgttacacgcgcaacttttttatcttatacacgtgtggaatagacggtttgaatattgatttctatattataaattattctaaatttcttaaaattttacaggatgtcttaaataactataacatacaggactatgaaaaaatttagactaaaatatttttatagatgtcgaaacagttagggattgcatcagtgtacccattttagtggggtacattaccccattttttcattacggttaaatttcaaattacttttttttttattactttagaattttgtttacagcttccacttgtctatttacttatggtctggtcacaactgaaaaactctttacaattccatgcttgacacaaaaatcagtgaactaatcactatcaaaaaaaatttccattatctaatacaatcttgtgcgaaagtccataacaacatactatattttttgaataccaaaatccaatgcctttttggaagtaactgtatttattggttttgcgtcgacccccttagtgaagtaatcgatagcaacaatagcgtatataactcctcttttctcagttggaagaaagcctactaaattaatttcccaaatgacaaaatgcgacagaataacgttggaaccttagaataacgttggcattactcgcatttttgaatgtactccatacaatttttcttcattgttggccaaaaatatccttggcggatgatcttcttggacaggttgggtccagacgtatgatcttcacaaaaacctctgtgtatctcgtaaattacagcactaattttggttccaactatacacttcagattaggtatcgataaccctcttccatctagaatcatatatctgggggcttggtattgaatctttctgacagttgccctgtcgtctagaagtaccccaaaacttagaaatttgtatatagggcctacccaggaggttgaatgattaataacactaacctcagtgattttgtgcttggaacaacaaggtgagctatgggaactaatccgtacaactcgttttgtggatccgttgctaacttcgtcaatatatctgccatggaattttctcacattttgttttatattctctggatatctaatttactaccaaataagaatcactgtagagctcaatgttttgggctccaacttccttggctaattgcaagcctgcaatcattgctttatgttctacttcatttgttggaggcagtgaattcaagctagagggaactttggagttgaagtccttgcggagaaactaaaatgattctagctctggaacatttttcgtttgatggtccgtcaacataaacttccaaattttaagttctagacttggttcttctagattattgttaattcttgtacactctacaatgaagtctactaaggccaggcctttaattgaaacccttagttggtaatgttggaaattattttacnnnnnnnnnnnnnnnnnnnnnnnnnnnnnttattaacatcctaaataagaactt

SEQ ID NO: 162606 - DNA, 3669 bp, Cannabis sativa
aggcaaatgccaaaataaggtcatattatctatttggagctgcaagaatattgctctgaattacctagttccactttaaacaaatcaaattttcaaagtgctcatacctgaaataatttattttctctctaaatagcaactttgtattttatatttaagaaaaaccataaaaaaagagctacaataacaagcttcaaaagaaattgcaaccgagaaattcaaaataattgagtacaatttgaaaggatgtattaccagtggagtcatgctatcaaattccttgaccacatcagtaaacttagcaacatcttcctcatcaattgaagcagcaatatcctgccagaaatatatagaaatgaatagtgtgaacaaccaaacaaaaacagttttattgacctttcttaaatcttccatcatccaatttatttgatcagatgcctcactggtaaactggagacaaatactacagatagagcacatatgcaaaagataagaaaggaaagtacaaatcaaaaggtcttttaaatcaattgaactcacagctaggaatttgtactcccttgttcctgaaaaagttggatcaagatcctgcaaaagaacaacaatatttgcacttcagacaacagacaaagacgaaccagaaattttgatctccaagaaggaaagcttaagatgtgagacctgataacgttctaatgcattggtaattgcgacaacatctcctctacaaagttggcaaagtccagcatttagaagatgtcctttaactccatacttaagcaagttattgttgagtgactgtcgtgctatctcttcataaatctcaattgattttggatatctgcaggaatagatcaaaatacatcataacaagtaataattaaattaagcaagtaatactattaatgtcctcacataaatagataaagaatgtctgttgaggataactttgcaatacttttttatgtgttctgttatgctgcagctcttgttcgggtaaaccagaatgtaataagtgaaaaaagggtataaatacagaattcttgttagttgtcacatgaaatcaaagtttataaccataactgtcaatgttttaaattacggatttgagcttcgaggtgcattgaggcgtaagcctaatatataattgaaaaaatatttatactcacctaaaaatatcaaggaggaataaaatgtctcataaaactcaaaaatagcttaaaatgtctcataaaactcaaacatagcataaaatctcataaacttgaatacagaacaagcaaagcgttaaccaaatactcctgttttttttttcttgttgatcaaacactttcagaggaatcctaagtttcagtcaaaacttgaccagtaacaaaggagtgcaaaaaaattatataaggcagaaatggactttcatataatataaatgctcttttagttctgagatatggccatcatccagcttcaagcttgtattaaatgtgccattcagaagatctagttgcaatcatcaatcaatgcttgcaacatcaaagaagtggttctctaataaagtttataatgaagaaaaactaagtgtatgcagtatatacatccaaactcttatattgattaagtgtacttactgttccagttgagcagcaaattgtgcaaccttttgcttgcactgatttgcagaagtagttacttcttcattttggaagaagtcagcagctttttcaaagaactcaatagccttctcaatattctgttctgactcatacagttcagcaatttcctgcaagagcaaaatgtaggccagtgtcaataaaggttgtaaaaggggtctcataacacaatcacttacaaatctaatccataataatccaaacaatagttgaatttcattgtgagacacacaatgtgaagtgaaaaatgaaaacactgaggtcacacactagtttcatgcaagagaagtttataaacagaataccttaaaatatctggctgccatattgagccttccaatatcacaaaacatatgtactgcttgctctaagcaggttatggactctgcattagaaaaagtatttgaactattatggtattttatttaagtatcaaactaaatgaaaactaaggaacagctaagtatctgatttctacaagaataatttatgacagacatttcaacgccaaaaggaaaaactatgagaagccaaacaaaagctagaggatttataagcaattttttaagataacttagctaggagatatacacataccatttacagatgttttcttgtagcaatgggcagcatcaacataagcttgggctgcttcatgtttgctttccaactaaaaaaacgagaaattgaatatcatactcatgtatttgaaaacaaatggttaaattacaacaaaagaaacactaaatctattaaacaccaaaatcacaaaccttcacatgacagtttgccaacttgatgtatgttgatccagctctgtcccctaatacataatatctataggtattagaaaagtaataattctatgaaatcctgggtgaaaaaataagtattatataagcaataatttagcaaagagttcttgcaattactttcgtattttgaatgagctttggctaaactaatattgaagtttacagtgacagtagatcaccttaatactattcctcattcaccaaacataaaataaaaataaaaccttgatacaggtcaggtttaattagttgccgaacaaataaaatcagcaaatgtttctttattccacataataaatttttgtaatatttagaattttctcgcaagatcaaattccatagctgcaaggccgattctacagaaaagaagtcaatctggagtgcaattctaagatcgacactgactgaatctattgttcaaaaagttgcaaatttgacctatctctttactgaactctacacatacacgtcgaaattgagtcaatgcaatgtcaacgagatcaaagcaatgaagttccttccgatcaccagaagaaaactcattgtttcatataaattacttaactttcttgaccatcttcaatcggagtaagaaaatacgataaaaacaaatatataaatgaaattacatgatttggcgagtttgaatgagttggcggctttatcgaagagatcggcggcgtcttcatattttgagccgaaaattccccagctgttgagctttttctcagctttcttctcaaattcttcagccttagctatctgatcccccatttcttcaactccttgctttaattttccgatttcggaggtgcaaaaatggagggtattaagaagaagaaaatcaaaataatgaaagaggaaggggaaaactgaaatttcgaccaaaaagggagttgatatttgataatgtcaagggtcggtttcgatgaaagacaaccatattcaagttttttgatttttctctacaaaatgttttgggcttttttcttggtctggactatgtacaccttgtggattatttacaaaaatacgtcgaaataaagttatgttttatatatatggcataaaaaattaattatattaaatatggtattcatgtcaaaaaaaaatatggtattttttaaaaaaaaaaacaaacttataaatatggaaaaaaatcgtgaggaatgccataaaaaacttta

SEQ ID NO: 162607 - DNA, 2527 bp, Cannabis sativa
tgaagacggaggattttgaatatgtgaatgttgggttgcacggaaggggaaattcgagggtgaatacatggcagaatatattgataactatgcagaaaaagaccaaagctttggttgatgagagaaatagaaacctctctttcgaaactttatcttcttctatagatgaaatcgctactgaaaatcatggaggttcggctcaagctcatgttagtcattacttgctttgctttctctctcatgttctatgattttttataatatatatacatagattatataggcaaattatatctttttcttgaacaggacaaaaatgaacaatacatacagtacaaagaaaattgatgggtatagtataattttgaaagagtaaaacgttgggtgtaagaacagtaaagctactaaggtgaataggtgatgatgatttttgttaagagggccaaattaaaaagaacccctttttctctttcaccttctttattgtgttttcttgcttttcgaaagaagtcaattgagtaataatatagtctgcttataaaatatcttaaagagaagagaacattgtactgaagttttgataggtagaatgtatgctatgtaatgtattttttagaattcttggaaatggttctatattatttgttattatttgtatggaaagtggaaacaaaaaataattggttctagaaaatgaaaactattacttgttctgtcttggatttgggaatccaatatatagaataattactatgctatttacctattgtactggaacttgtgtctccctttctttatgccaaagattcttctcagcgcaataaactatgtgaatagaatagaagaatttaaatttgggaactcatcagctaaaaaagtataaatacaataattttatttttctgttcaaactgcaattaagattccttttgttatcttatgcttcatgaagagttatctaaggaagcttttaaaacttttcattcttcctttcattccagaattacagtgaactgtatacagtgttcgggctaagtgctaataggtgcttgacttgagatttgtgaaccagaagttgtaataatagaagggtgttttaagaaaaactacaaacgggggaacacttcaagtttgaggtaagtcaacaatagatctaagctattaccttagttctctgaaggactcttattctttcttttctccattatgagaaatccaaagaaggacaccacagaaaaagcagagaagcaaatcgaagcaatgtcaaatgacacctgatttccactgattccttggattttaaacaggttactgatcttactagcatctgtagtctggccaaaccccacctcctcaccgttggagttgtaagcgtagactctcacaaagtaggtagctgaaggaatatcgttttcaattggccaatcgaagctttgactagtctgagaagcatcatagtttccattagcaatggtgaattggcaggtcttgtctttgttcaagttgtccacggttttcctccatccccggtctatctggctcaccggagcataacacaaactcactttcacattcttgtactctataccgactccagatgccttgaagctctcattcaaaccccatttcccagtaattctgtcctcttcagccttcaatactgcaccataaagtgtagaaagtcacagtgagaaaggctttaaccacacacaccatggagccctaaagaatactataagaaaatattcagatgtaaactaattgagattagtaaaaatcccaagtcttagattactctgtaagtatggatgttccttttgccgattaaattaaagagcaaataaagctacaattcttcataccttgaccttgtagaggggaagcactgaccactagagttcttgggagagaagagaagagaacatcaccataacaagtttgagctaagcagaacagtagaaagctgatgactacaagagattccattgctgatattcgtttttcttttggagaaaaagaagaatggtaagactttatattggtagtaaacgtagaaaatcaaagtttgagactgatttttataaggaatctgtacttgtgtagtagaaaaacttgtacaagtgggtctaaatatgtagctgtggctcaaatcaattctcaagagtcaactaagtcctataacttgtctacttttttccaagtagcatggcaaaggggtgggctatgtttctttgttttttggtgctttaagatgtgatcataagtgtactattctcttagttgacacgtatgtaaaagtagaacgtgttgtggtgtactaaaagctcaattacagtactcaaaccaaaaatctaggctgggactcgcctcaagaagtatactaattgccaagtcttcaacctcttcttatatctatgttgtgatattttgcacacgcacttgtacgtgtcgttacaagtagtaaactcaccaggagtgaggtcgatctcacagggattgtaggtaagtacgttaaaattaaactttt

SEQ ID NO: 162608 - DNA, 868 bp, Cannabis sativa
  modified_base (818)..(819): a, c, t, g, unknown or other
ataaaaaagaatatgaaaacaagatatcttcttaaattttcatccacacaaagatgaactttctcaagtcataaccctaattaacaatgcatatatatccacatttattttcttaggtgatttttgcataagatggttccaagtcacattaataatgagaagaaaagaaagaaaacgttgaggttttaaatgcaagggagtacaaattaattatatacactaaatgtgaatgagacctattttttccaagaaacttgactttttttggttttgagattcagccaattattttttttcttatattaaagttagtgtaaggacaattattgaccatcatatattttgaaaagagactcgagagagagtgttctcctatctcgagagtttatttctcttttcgttgctatgaatttagcacgagcgtttctcgctgttttggtttaatgcattaatagctcgtgctaaattcatgacaaacatagaaaaatcctccaaaatatagtcatcacctttaagattctattcaatattatattttaaagttcctacctatttttaagctaaactttccaaattacccatcacaatttaccatatttctataacacagtgttttttttttaaaaaaatgatattgataaaataaagagagaaaccttactaaaaaaatgcaataaaaaatttaaaataatgaaataagttgagggtataataggttgaacaaaaaaaaagtgggtatttttgtgaaaaaaataatatggataggttgggctaattggactatatagaccagttaaataaagggaaatttacatggnntactaacttttgccattttttttacaaaaatactgccatgcggtatttt

SEQ ID NO: 162609 - DNA, 3864 bp, Cannabis sativa
aaaaaaaaaaaaaaaaaagtaacagttgaacaatttggaccacatgttagtgaatcttttgccgttttagcttttctggaaaggagaggacaccttttcttttcttttctttttccgtcttggtaaaatacggttttagcaaagagtgaaacaaaaatcaataaggtgaatcaaagtttaccataataatcgataacagacatgaaatctaaatttaaaatggaaagaaagttctgacaagggtattattgtaattaaaccaacaataagaagaatagttctgaaaaaggaataaggaaaaatgaaaaaacgggaaacgaaaaatcttatcttaaatattaaattcgtacttctttcaaaaaaaaaaatatattaaattcgtacataaaagtgacagtaactatatcctaaatttaatcaaaactttggtttgtgggtaagcctttcattggtccaaaactaaaaaaaatattaataataataaaaaaaaactctcgaagaacaacaacaaaaaaccaaaaatcttttcttccccactctctcggccatttatgaatgggaaatgaaaaacttcaatttcccaatactaaatgaccaaagcccaaattcaattttagcaagagaaagcataattacgcaccaaaacaacgatcaaactcaatcagaacaacccctcaacgaatgggattttaatctccgcactgtcgtttcatcactttcaggcacagtcgccgcttcggacgccctcggcgtcatcgaatttgatccctctgataacattttcgccacaggaggcatagctagaaagatacgaatatacagattgaattcattgttatccccaaacgacgatcaaaccgacgtcgttttactcgaccatgcggccgcgtacgactactatatttgcacgcctgcgaagctcagtagcctccggtggagacccggcaccggtggacgaatacttggctccggtgactacgacggcgtcgttacggagtacgacctggagagaaagacgcccgtgttcgagcgtgacgagcacggtggccggcgcgtttggagcgtggactactcgcattgggacgttcatccggtattaggcgcgtcagggtccgacgatggaaccatgcaaatgtgggacacgcgctgtgagagaggggaatgcgtggctacggtgcggcccagcggagctcggtgcgcggtttgttgcgtcgagtttaatccgtttggtgggccgttggtagccgttggatgcgctgatcggagggcttacgggtacgatattaggaaactttctgatcctgttttggttctagacgggcataagaaaacggtgtcgtatgttcggttccttgatagccgtacgatggtctcagctggtacagatgggtgtttgaagcaatgggacacggaccagtcacgtgtggttcgcacgtacgagggacacgtaaacagtcggagctttgttgggttatcggtttggaggaacggcgggttactagggtgcgggtcggagaataacaaagtatttgtttatgataagaggtgggagaagcctatttgggttcatgggttcggacccatgggaggatccgaacccgagttcgaacaaggctttgtgagcagtgtttgctggagacaagtgggggaggagcggtgcaccctagtggcagggggggcgggtgggggtttgcagatttttgttggtaataggaagaagccatgacatgatcctcatcttcttcttatttttcaagtaaattactcttttctccctgaagctcctcaaaattacttgtttctccaatttcttttctttctttcttctttcttttcttttggtagggcagaaagattgagtatgagaaatttaattacatgagaattgtactaagaaaatactatagctaaggaggataactaagttgaaaggaagatgaatatagagatgccattttatttgccttttattcttttttattataattaaagagaattttctaacgaaattgatactcttatacgtatactgcctttatttgtttccttaaaagattataacttaaaatttgtgttgtatatattgatcagcatttctatcatttcattccaaagaataaagtattcagctgatcaaataattattttcattttggatttttgttgcctgatttataacgtggcttaaattaataattgagatttagtaaatttgttacgtactgacttttgctgacagtttaagtaaatatgtaaatttcttttataaactatgatcagttgcttccataatttcctcattgtcatgcatgtcataaataaataaagaacacttgtttcaaacttaaattcataaattaattacatttattaaagttatttacaaattaatttggtctgaatttttaatttttttaaattaaattaatattacagttatttaaaaattcaagtcaaactaaattaattaaatgaacaaaccaaactaatcaatttaaaaataaattggtttgattcaaaactataatttgtatgttatagttgttctaatttttttttacgataattgtttatatggtaactttttttatttttaataagtttataaatacatatataacaataaaaaattactatcataataatattaaatcaatattaatattctacctaaaattgttctcaaatatcaacattttgtcaaaaaaaaaatatatatatattaagtatatataaaataattatatagattgatttagtttgaactattacaagatttctaaaaccagaattgatcgaattagagaattttaattagtctagattgaccaaatcattcacatgaaatttatttagttcggtctcaaataatttagtctgaattaattaattgagatttaaaatcatggactcctaatatttatgataaatgtaagctttttaaaaatcaaatcctatatgaagtagtatattgcatggttgtcatatttcattcaaagtttaaattgtatccttgaagactaaggtgaagcaacaagataagtaaaggatttggatctaattttgctctggagagatgattcatcctagtctcattaaactctctaatttcataaaatatgaatcacaagagagaaaaagaaagttaaaaaagaagagagaaaaagtctgagaagtaagctttggtatgaagtccaagcctctgtgatacctttcatcttccccagtgagcatgtcttccatccaatcgcttcatcttcctcttcaaacaatgaagataatcaagacttgctgtattttctcaccttcctaaacacattttccacccttctctgtgtcgtggtggcgcgacatttatggtgattgacacccaactgcctccacctaaggtgataaagtcagtacaatctcgagcacaaagcatcttacaataagcgtggatttgcattaatgaagatttctcaggtttgatttgtttttgagtaaatctaatcattatatttccttatatttaagtttgaaagtcctttcaattcttagatatgggttttgctttaattgttgggtctaccaaccaagattgtggatgaatttggataatctcccgcccgaaccagccatttatggctattacctctatcgtcttcagtacttgattgtacctagtatggctgaatatccaacaagttgaccgagtttcgggtttgtgggtttcaggtttacgagttttgggttcaaaaaattatgctcggacccaacccataaaatggtttgggttcgcggatttcgggcttgcgggttcacgggttcgtgggttcgggttggcgggttgacttggtcaactctttttttttttttaaaaaa

SEQ ID NO: 162610 - DNA, 1014 bp, Cannabis sativa
tcttctatagaattgaatgaatctatatctcagaataatctgagtctcagattattcttaaaacaaaattaacaaattaacagaacaaacaaaacaacaaaagactagctacgtgaaaaaaaaatatagttcggtgtacatgaccaacccaaaaaagttatgattatggttttatggttatgtttcatattagtatttattatatatataaaaatatattattaattacatatacatgaacataaatcggagcaaattaaatagaaaaaatatatatagtcaaacaccataaatagagttaacatttgatcatattttcatatcatcccttttaacgcatgtccacaatccttttggctctttccacttactcaatagcctcttctctcttgatctcacttttgcatggttaaggttgcattcataaatataactttcctaagaaagaaacaagagaaaaccatcgaatatcataggtgtgtttagtgttgtgttgtattgaattgggagatatggtaagggaattcccgttgtaccatccgcagtcggatgtggtaccttcaagcctgtatgggacgatgatgatgcatctggctaatgtttctgtgaaagctcaaaacgatgcaccggtgattccagccggtggcttattcatatgtcaaaagactcatcaatcaagtcaccctttcggcattttttatggtgacaataccagcatgacatactccttccctttaatgttgttagaaattagtttcgttgtcatcgccactcgcattgttcgttttcttctttcgcctcttaaacaacctaggattgtctctgagatccttgtaagtttttcttcttcatggttaaatttggattaagaaaataatggtaaaataaatatgtggatgatcatttgctaacaataaattagtgggtagtgtatttttttcaagagaattacatcatatactatatttttaactttttttttttcaaatttacagtttgggtttctaaagtagt

SEQ ID NO: 162611 - DNA, 3430 bp, Cannabis sativa
gggcataaaacccaacagttagaagtctggatcactatatattttattttaattaaagttttttttttctaaaacgaaataaataatccaaacacagaattactttcaggataatccaattttgttcatttcaatccaatctttttcagtctaattctgcacaccaaacgagccctagtactacactacacttctcacacatatccctcctaatgtaggatgatgtgtatggtgagagatggagatacaagcaaatagaatgaaatcattagttgatttgggtctttctttctatttttcgtttatttgttcctccctatctctctttatttattttcttctcttgtcttttcttgtttctttttcccttgtgttgtgtatgccttttttcttattttcgcgtgtgtggttggtgagattttgttgtgagtgagttgtttctttttttttttttttgttataaaggtagtatttatcgaaattttcaataaactaattatagataatcagaattgaagaaataaacaaccaaaagagaaaaagcaagaaagacacaaacagtttttatgtggttggggcattaattagctttagtccacgagtcgatgttattagataattctttagcttgaaaagcttttgggaatacaataaatttaagttctcaagtttgcctgagcaagtattgcaaggaaattcaacccttaatccataagattcacttagtatttatagtagtttgagaatgatatttagtttatcttttccctctattggggagtttacaatgaattacatagttgggctgcctcatgaagtccagtccacaaaggagattatatgctgactaggtagattggattcagttggatttagtcaaaattgagtactgtgattgtgggcagttaactgtgaattaattgcttgatatctattataagaagtttccccttttagcttgatgtaagatctggcaaacaaatatttccttatttatgcgtaggaataaaaaggaaaaaccaaaccagtctttcgggaacacgttgtcttacccttctagcctcacggtattgaacctacttctggacaagagctgtcaaaggcagaaggttctatgatcacaaagctgaagtacgttcttggaaggtcctgtccaaatggacttggcccactttatcttctttgggagacctattggtgggccttggatgttgacctggattacacgtgtccactgtcgaaaatgcggttaacatttatcccctaagcttctagaatgctacgtatggtggaagcttgcatcactccttcagtgtggacatgtggaggatgagagataatatcatgactttctaggtgttaatcgatcgtggaaggtgacttttgtctttgattgtagtatatccatgtgtcagtcgcatggtggtggaaggacacgaccatcgaggagttacttactagaaacgactttattttgacgattgttcactttttcttgcgcgaaaatataaaaatagcatcttcatcattaatctttacctcgatttttgggagcattaattgtgaagatgcgcgtggatcgttgaactccctaaccattggatgaagcttctgtttctataggttggatcgtagaccgttcatcctctttcaagtggattgctttctaggtatgaatatcatttacaactttcaaataccatttttctctaatttttaaattttaaatctttcagagcttaaaatttcctttgcaccctttgagttcctgtcgcgaaagagtattatggtcaggatgtagatgaccatgatgctatcgaatcagcggtggatggagagaaagatagagagctcgttggtgaaaatgaaaaatcagctcgttggctgacatgtcaagaggtgctaagcaccactaatacccagtagcaatagtcttttaacatacatattcacaaggaagtccttcagtaaagcattaatttgtgtgagtccacgtgtcatttctttcttctttatcttatttgtgttcttttctttatgttgattaatttgtgtgcagtaacattctctttatgttctctacctttttcttcttttaattgtattttgagtattagtattgttacatttatttactcatatataacataatatctctaacaattcaatatttgccttttaccaacaaaattcagctagctaaatcatacttaaatcatttaatataaaagagatcatggatcatggaaatttataattacatacaaaagaaattatatatagaaaaaatgtattcatattagaagtgaaaaattgtggtgtaatacatgtttaatggctacattacataaatatatatatcataataataaataaaattaaatgatgggagggggacgcctcattctatgtggccaagaataacatgttggttttctacaataagtttggcaattacataaacaaggagctttagactttatataccaacaattttgtctaaaactatctatttcttggttatacacttcaaataataatgaatttctagttttattattattattattattaccccattcaaagctgcaattgaatacagtatacccaaatggtcgaacccttgttcgaaatttgaactcatagctgaaatatggtctcaaatattgcttaccaagatcatcatccattgatttacagtgaactatcatgtatttgctttctgtaatcatattagtgattcgaacacgagttgttcttcctccaatatctattgcctccaataataataataattgagatacaactaataatagcaccaacctcattgttattattattttgtttaattctaagttgtatcaattgttattctctcacaatatatatatatatatttatattatttggttttatggttttgttatttttgttattttgttattacagagtttatcgcatgatctcttatttcttagaattgattacgttttctgaaaatttgaccaattctgttttatattattgatatgatgagacatgaactaacatatatatatggtcaattcaacatataaataagttgttactaataacaaaactgcaccaaactataaggattttgaccaatatcgagtactttcataataatatttttaaataattttatttatttatttatttatgttttttgaaaaatacccataataaaaaatacgcggtaattatttaaattaattttaagttgagatatggtgtcgaaaattaacataaaagtattattttaaggaaaatttacatgaaaaaaaaaattgataagaattttatttttataaggtaaaacaatttttatactattataaaataataaaataatataaagtagatgagaagaaagaagaagaagataaagagagaaagagaaagtgaa

SEQ ID NO: 162612 - DNA, 3043 bp, Cannabis sativa
ctctctctctctctctccatgtgtcaactatagcaagaagaaaggaattcatgggttttttcttgtttattcagatcaattgaggattatttgagcaagttttcttatctagttaaggtaagtctcttgctcttctttgtctttgtgttattgatagaaaaagttagagttcatgcttgaagttctaggattttgcttctgtatgagctgagtttgttttgatgagttttctgctgatgttttatgattaattaagttgattctggactattgtggttgttgttggtgggtttgaacaaagtgtgagtttttaagctcaaacttggttctctaatggtgaaatcaaatctagggtttttcttgcgaattctagttattttatgtttgttggggcttaattaggtggtctggagagtttggtaagatttggggtagttttgagcatgtcctcaaatttttagggtttcctacaaagaaccagttaactgttttcccaggcaggaccctagaaactggtttaccattttgggaatttagtttaccgtcgtaagcagttttagaaccctagttttttatgttttatcgatatttaggatatttgcaaatgatatatcgataggaaaacttctagttttaaattgaagtcctcgagaagtgatttagcgtatcactatcagttttacgaatgttgtgacttaggggactataaatcgtcaagaagtagattccacttaacttgaccagcccacctgaattcagaattaaggtatgattagtataataatgtcatatgagattacatatttagcgtgcatgtttatgaatacctattagataacatatcattaatggtagaattaatgtaaatagagttgcactgaataccgagaaatatatatttgggatattattgattgaagctatcacatcggtacgacaagagtactgagtataaactgatattatggtcaatagtattgtcatacaaatgttctagattcagtacaggtgggactcaagatagggttatagttgggtgtatgtgtgcctagttataatctggtttatggtatgttatgattatgcttttcttattgattttttttgtctcatagttatagtttacatgtgtaggaaagggcaaggcaaaggttgaaccacagtgagctcgagttattgaagattacacatatttgggcggttagacctgaagtgttcgatcttcatgacatcaggttttatttttatagttgctaggcaacaacatttgtagttaaatattttgtaatacagttgtaaattttaaagacgagatcccaaggtatgtaaagtttttacttatttaaatttaaaggttaatcaagaaaattttaaattatcaacccttcaattagcaaaggagtgctcaacattaagaaatcacgataacacgactaatctagtagggtgttacagaatatctcaaccaacttaaaatatatttaactacttttcaatttcaaatatttatctaactaatattttagattctcataccggaagagttctaacttttagttctctctaaggaccatcctttgttaaacgatttattctatctaggctaacatggcctaaatgtagataccatagataagtttcatcatcatttaaaacattttgcctcttattttgttaaggcaatggatagtcatttaaactttattaattaattatgtaaatatagttttatttatctattcttaagggatattagggatgtaagctctactatatataaggcattagtcaaaccctaactctctaagtctaagggtctcaattctaactctcaagctctaagtctggaactcatctcatctctttctctctcacacgcataggcctttctccattacttggccaactccattctcatattttaatcttgtagattcaacaatatctttgatcttagtagtattatctttggcattaatacaactaaaaggaaagtaggtcattacttgtgaactaagagggttgaacctctataaaatctcgtgtcttctttattttcctgttcttattgcgtaacacatggcaaacatcaataataaatacaactctgttgttggttgaccaaatctgaggtgaacaattactaacattttaattgataaataaatatttatcattgttactattataaaagtattggatattttaatgtgttatgcttttaagttaatctattcgtacttacatgccgtgctagttcgtgtctaagcccatatttttctatgtcgtacctaaacctagttttcttcaacatgtcgtgcctagctcattttttttcatgttgtgcttaagcacatattttttgggtcttgctcgtgctgatttcatattgtgtcaaaaaaaatctaacctatatttacaggactatatcaacccaacacataataattagaaattaatatatatgtgaataattaattttttatacatatagatttgtatcggttgctggtcccgactcccttccctattattagcggtagtcgtactaattctatttttccttactgtgacaagattcaataatttcaatttgtaattgtacatgtatgtccaatgttaaattgttattcattaatctgagctaaattgtattaattatattaaataatgtttcttttaaaaaaaagtaaaaaataaaaaaattatgttcaattttgtaatttttttaaaaaatatctaaataattttgtcctataatgtaattcaagggacatgagaaaagccggtttagaactactgctctaaagatttaagaatcaataaaatattattaatgtaaatggtcaaccatttctaaaaaaaatcattggctagtgaaagaaatgaagccacgaccataaccaatattagaaacccattttttttgttttcgaggaattctaaaacaagaaaagattaaagggccaagatgcaaaatgaccctaaatttaataattaagttaataaatgtctttttttaaaaaaaattaataaaatgtcc

SEQ ID NO: 162613 - DNA, 3877 bp, Cannabis sativa
ataccaaacttggcagcaacatccggagcccaagggaagaacatattggccactagacaatcgggtcgatgttgctctaagatttggtcgagttgggggccgagcttgccgcaagcttcgaagaacttttgctgggaatcagaggtacttgtcatgtgaacgctgctaacactttcgggcaatcccacctcctctgtaggaactctgatatggagaatgtcgatttgggcaccaaaatctttggctttttcgatggattttgacacgaaggatgtgaagtaaggtgtggtgatgatggtggcttttgagcctttggatgcgaacaacttggccaggttaatggttggtctcatgtggccttgagccataaatggaaagaagaaaacatgaagttggtgatcattagttttagtttccatggttggttttctgtgagatgggaatgatgaactcagagagggagtgaacttttggcctggggattattataatgaaaactatgtactatataataatataagtgaacaaacgtctttaaattgtcttcctaaataaaatgctattaaaatcactttccaacttcaatatttatattattatattgaactagtaattccgtcgcaacctgtttattaaacgggtaagacgagtcaacctaaacacgatctaaatttatttaaagcaaatttaaacccactaacttttatgcagattttgacacgtgttatcatatttgacctgtataaagttgtttataaaaattttaaattatgtatctcaatattaattgaacaataaaatcatatcaaataattttcaacatatcattttatataatttttttttaaaaaaaaaattgttaaaaaaatgataaatatctatatagagaatcctagaaaatttcatacaaaaaaaaaacgcaaagaatatcttcaaaataattgttatcaccgtagcttacttatactcactatcatatttaaaatttatgtaatcaccatatctcacttgtagtcattattaatattctttagagtagattagctaagtacataaaataaatcaaataataaaataaatcaaacaatgattgataaatattcacttttatacataaataaattattctattataaattaattaagtgaataattagttatcatatatgcagttatatagtttatttatttttaatttttaattaaagatctctaattaaataaagtaaaataaaagaaattaactaattaacgatctctaattaaataaattagaatagaaaaatagaaaaaatataaataaaaattaaggagaagatttaaaaaagaataaaaaaattagaaaaagaaaagaaaacattgaggagagaatatataaaaagaatttgaaacaattttacactactatgtcactcctttatacaataactttataccgactcctccaatcgtatgtaaacaatgtattattttatttatctaggaatattttattttccatgcttagacaaaaaaataaatacttaaactaaagtttgtcatcttgtaccttccttctccgccttatatttttctttcaaagcatcctaaatcttcttcgctgatttggtattggtgtagagatcatatagcctatcgaacaaggccttgagaatatgacctctacataagaaattgttctcttctctcttccttatgttctccacaatctcagagtgcctttctcagttggagcgggcaagggctctaaagtagactcaagaatattgacaatcttaagtgtggtcaagagaaaccttaccttgtcttaccacctagtaaagttggattcatcaaatgtatccaactttactaggtcttgattcattatcttgatggtctcaccttcaattgaagctaggtacaaagaataagtttttgattgttagaaaaatgtgctccaatagaaatataaaccaacataattactacttaagacaaaatataatgaccaaaataaggaattaaattatggtataattcttgacaaaatatacacataaaatatagaatatggagataaaaagaggaagtaaaactcaaaacttttttaaaaaataatacttagtagtgtatatatatatatatatatatatagatatgagaataatctgaataccacaaatgccaagtgactagtagggaaatcattaaacttgaacaagggttttttacttttgtccaaaagcttatttctcctaccacaagcacttagggaagaaaaaagatggaaataactttctaaatttatcaagtctatataatttctagcaagatgctccctttgatagtaaatcactatctttacaaaataaatcttttaagtccctatatagtgtttgagaaccaagattaaatctctgtaatggaggcgaaaaatgttaaaattaagtcttgaaacatcctattaaagaggtaaatggtttacaatgtttatacaaaaataggctccatgcgacgtatcgcctggtaccaagcaacatgtcgcttggagcaaaatatttgatcttgcataaaaacgtcgaaaaacctcaaatccctctcatttaagtttcaaaagacatgtcaccccataccaagtgagatgtcacatgtagtgtttttttagaaaaatcttaaataagttttgtaactcctctccaagccaaatctctcccaaacattccaatacatatttgaatgaaataaatgagttacaaatcagtttctaacaactagaaacttatctcattgattttataatctccacgtgcagttacactcttaattatatattaccaaacattatttatgttaaaatttatttcaaatttgtaacttctcttatgttataaaaatgtacgttttttttttctttcgacagaacaaaaatgtgtgtttaattatagtatatctcatttaatataacctatatataatatgtaacatgtcacacattatatctcatataatataattttatatcaatatgtaacatgtcacattttattttaattagtctatattatattatatgttaaacaaataatataacaatcaagtcaatacaaaataattcgaacttacagattgctgaatttaggtgtttcttttacaagtttcaatattatctttattgtaactataaaaaatcaggaaaataactaaaataactaatcaagaatcaagttgttgtatcagttagttaaagtgtctagttttacaatatctgttgtaactttcagttgtaaggtctctcaccattatcacacatataaatttcaaggtctattctcagctgaatcacttgagcatttcattttcacttcactttcctttctttcttgctctctctgttttctgctcaagtactctgttcttcaatgtttttatagtcttctaatatatattatcattaattattgtttactgtttcttatggtaaaatataattgtttttttgtatatatacaattaaatcttgtgctaaatattaaatttatccattattttatactaaattcagtccaatatttaaatcatggatggtaacatatctcatttgaccttgtattttaaaaagtttcaatagtattaaccatatctgtatacatattatatagtcattatcataataaagaataatatagtcgcatccaacccagccacataattttcaaacaccttacgttaaaaataaataaggaacctgatcatttttttttttttttttgacaaagtgattggaattactcgtgaatttacgacgcccatgtccacgtccgccaccggcgctgaagcctcctcgaaccaagatagctcatcgtctaaccgtaaagcatgctttgccaagccatgg

SEQ ID NO: 162614 - DNA, 2861 bp, Cannabis sativa
  modified_base (2424)..(2424): a, c, t, g, unknown or other
ggggaaagttgtttaacaaaacggaggagattaggcaatgctgctggttggtttgaggcagaccaaatgggaaagttcacagcaacaacctcgccctggtctcgaaaaaatggcattgagtaagaggtttgttctagtgaatcaaagttaacaacttcgagctcgaaagcaacaccaatctcgttggcgaattgagctagattgtcgcgcattagcgctagctcgaccgggtggtgcgttgagggcgaagcaaatgcagtgattttcaatgaaggaggtcctctgttcctaacaggaagctcctgcataaaagaagcccattgagcaccaaaacctatatcgaaatcgacaatgtgaatccgatcagcactgtctaaggcctcaaggagagcttggttggaagtgaagttgacaaactgtattaaaggtgaaatttcagagaaaactttgtaagctcccatcttgaaaatgacatcaaaaggtgatggacacttaggaggaatagtgttattgttgttgttgttgttgttcaagatgagcaaattcagtgcctccttgaagtagaaagcagccctatgaaggggctttccaacaggagagagctggtgattgagccgcgccaatatcccttgcgcgtgtgtgaaattcccagtccctattaactcggcagccttatagagctggtccagcaaagcatgttgatgttgttgaagctgctgctgttgctgttgctgttgctggttgttgttttcgagcaccactttctgcatcaatggcttctgctgaggaagaaactgaggataacccagttgttgttgttgttgttgttgcttccttagtagaaactcgttacctgggatctgagatgttgggtctgcactgccagagttgtggcgcttgggttggggatgatgatgatgttgatgaagctgttgttctaatggttgaaaaaagtttggattttgagtatagaactgagtagtactggcctgttgttgctgctgctgctgatgatgttgttggtttattaacgtttgtggattcaaaatctgtggcttctcatctgaataaatcattccatgaggcaaagaaacaggaagaggaagactattattatgaatcccagaatttgagtaaatggggttttgtataccaattgaaccaatcttctcactaccaacattgttgcagtcattgtttacaaacacagaaccagaaaaacccaaacttggattaatcccagccataagatggtcaaagcccggaccttgatcaacgattcccaagccaacaccggcattgccatcaaactcaagaagttgtttgagtccaaaagaagaagggtcttccatatccccagcgatccacctgagaagtgagtggtcttgtcctcctcccgatggtggagaatctccggccaccactcctcccgctgtttctgacaacatgttctcccaatcctctaacccaacaacaagcccacatctttcgcccaaaactgaccccccaacctcaaccccaaccccagcttgaatccactcgtctttgccggaagtagcagactcaggcggaagaacgtgcgccacacctcccgtgttgttgttgttgttgttgttgtctgtatcgccacctcccccaccaccgaaagacgaagagagagtcgatgccgccgatgtgggagggctcgggcttcttctcatgtgaaaatcataagtggggtttcttcttcttcttcgattctttctttccaaatcgaaacaaaaccctccaatttctgataccccttttcctctctttccgaccaaacccaccaaagattcaaactttcttagctaactgaagtgggttttgaggatttttcctaaagcaataaactttttagttaaaaatttaaaaatcaataattaatactcataaccatcaagaatgaagaagagaagcttcatcaaaatcaccatcgttcctcgcatgccatacttgcctgaatcaactcatttcaactccatttctttctttctctctctcactctctgtctttctttcttggctctggtttttcttgtaatatgtatttttcttttctaccctttgtgtgtattagcagtagtagtaagtagtcaggagggtctctgccatggatgcgtgcatcatgaaaaaggtaaataaagtagtctcctttatgaaactctctttgcatagagtttgaggaggagaaagaggggagtgcccatatcacaaaaaaaaaatatatacaaaattataccctttttcatataataataaattaattaattattattattactattatttagagtaatttatacctaaataaatatttaatttataaaattattaagtaagtaatttgacagctgataatttttaattggtttaaataattaaatttttattttttatttnaaaattaatttaaatataataataagaaaaccacgaaagttttaaaaatataatttaaatattattacaaccttttagtgaatctctacccctaaaatcatatattcagatttttttttcatagtattatttgttatagttacaaattttttaaaaaatttgaaatattttatcgtactaataaaataggatttctgatattttagtttactacgtattcaaaaatttgaaatttatttttggtattataaactattctaaaattttcaaaaatgtaaagagatgatgttaaaactataacgaatatcgcgataaaaagaatttaaaaaaatctaacatgaattttttaatcacaaagtacaataaaaagttagactgtactatttttttttttttataaatataaacataaatatttaaaattttaagtttgtaag

SEQ ID NO: 162615 - DNA, 2107 bp, Cannabis sativa
acagattttaactattattttttttcgttgttattacataagcaacatgattgttttatgaaaataaacaaataaaaaacttttaattaaattgtaacaaaaaaaaaaattaggtacttgatataaaaatttgtccatcaccaatttataattactaaagtgaaaattcttgcatctagcctaccctttctttgctcccagctgtatagcagtcctaatttttataaatatcactttatatatattttagaaaaatatcatttttgacataaaaatcacactttttctatttattattttgccacttatttgaaaaaaaaatggaattcatatttatatttttattattattattatttctatgttttttatttttattttattttctttgtcaaatatacaaaatttatatataattttatgtgaaaatcttaaatgttaagttgcatctgttagaaatatgtttgtcattacttaaacaaaacataaaataaaatttaattttatttaaaccattaaaaacacataaaggcccagtccagcccggaaacctgccgcaatttggcccacatagccggccgacaagcatggaataattgcattaagctgataggcatgacaatgcaaatacaattaattaatttttaaaacaactattaagtataatcaaattacaataatacactaacatatgataatgcaaaacaaatttaattttatttattgaagcttcaataaactaatcactccatacaaaaatattatatttgacaatgacaaaatcaaaaaatatattaaaaaaaaataataatataacatgttctctagaccccgtattaaattaataaatttgattggcaattgtaaagctttgtttcattaatataattgtgtacatatataatatggtattcttatgcataatgcattgttaaattaatcaaataataagctttaactattttgttcaacattttgtgtatgtagaatctgttagtacagcactttgacaaattcaataaattcaatatatagaatgctcaacatgtatatttgaaattacatactcaaatattttttaaaaattttgttagcggtatttgttatatttgttatagttaaattttaaaaaatttcaaataatttagagtaccgaaaaacaaaatttataatatacaaatttatcatacaaaacactgtcataaaaaaaatatatatttcaattatgtgtttttgagcacaaagattaacaatatcactcctatatatatagatttagaattataacattatatacatgaattatcacatacttggtcttgataaaatggaaaaaatcataaaagttgagattatatcaagagatattgtaaagccatcatctccaactcccactcatcttaaaaattacaacctttgtcttttggatcaattctatcccgaattccattgtggcataatccttttctactcctcaccacaaactaattaccaccaaaacgacaaccaaaactattgtcgtacactcaagaattcattggctgataccttaaccgacttttaccccatagctggtagattcaaagacacgtcatcaatcgattgcaacgaccaaggcgcttgtgtcgttcaagccaaaatcaactccagcctatctaactttctcggcggcttgagccagccgagctgtagtaataatgtccagaaaaatttgaagatgtttataccgagtttggattctataacaatggaatcggcttcgagttccattcttatcgctcaactcactgagttcgaatgtggtggaatcgcgatctgcttctccctcatgcaccggttctgcgatcttgcatcggtcgtcgtttttctcagatctccagagaaaagaagatgaaaatctcagacctagacagagagagtttctctcatgtgaaaacagaaagaaaagagtgaattagagaggaagagagaagtgagaggatctgttcgatcctgagtgaagaaaaagaaagagaaggtttgagagagagattgtacatacctggttttgaagaactgagagctaccagacgattcatgtgtcttggagctcagaaacttgatgtaa

SEQ ID NO: 162616 - DNA, 1400 bp, Cannabis sativa
ctaataatgaggataagtataaggcttttacaagattgaggttgtccaaagcagtgggagctacccatattgagatattcagtgattcccaattggttttcaaccagaagttgggagagtatcagcctcgcagagaacggatggtttcatatgtctcaacaatgcaacaattaatctaggaattcaaaaactacaaaattagacatatcttgagaggaaaaattcccaggctaattgcctagcaaagttatcccggttgactatctcctagagcctagcatcctagccaaggttgaggtcaaagttacccaccagggacccatatggatgatccccataatcaagtatctgacagctggagaactatctgtagagagagctacttctaaaaatatcagtaccaagctccacgatatatcatgatggataataagtcgtatcaaataggattgtctatgacatatcttaattgcgtatcagggtctgtgattggggcaactatatgtgaagttcatgaggggttcagcggagaccacactggggtgctagtttgtccaagaaaatcttgaggcaaggatacttttggcctaccatgaaaaaatattgtgtagaatatgtaatgaagtgtgatccatgccaaagacttacaaacatcacaaggctccaccaaatgagatcaccttaatgactagcccgtggccatttgtagtatgggaaattgatcttattggatcccttcagaccgggaaaggaggggttaaacacgtggtgttcgcagtagattacttcacttagtgggtggatgatgaacctatgaatacaatctctgccaagaaggcattgtactttgttgttaagaatattgtttactgatatggactgccacataagatagtatcagataacattaaatagttcaacattgatcatttcacaaaattttgtgagaagcgtgggattataaaaagcttctctactgtgacgagaccctaggaaaatggccaagcagaagctgtaaacaaaattgtaaagaccacactaaaaaagaagctgcaagcttgtaagaacaactggtcagaggaattatcatgagtattatgggcttaaccaccactcggtcgttcatatgaaattccccattttcaatggtgtatgggtatgcggcaatgatcctggccaaaagtatcataccgtcccacaaaaggaccaccgataacccaaccaccaacaaatccctactccaagagtccctagactttgttaaagagctccaagaagaatcccaagtgcacttggtgtcgtatcaaaggaaggtggaaaaatatatttcaactcaaaagtaagggataagaaattcatggtgggagacttaggccccgtttgggggagctttttaaaaa

SEQ ID NO: 162617 - DNA, 3949 bp, Cannabis sativa
ttattattatcaatggtcatttgcgtttattcaacaatggtggaatcgtgttaatatatattaagagttagtttcacattgctaatgtgtggaaataaattgagatatataagatgaatgagctactcttctcattgccaattggttttgagatgaaactccattcattttatctcaaattctaacatctagtagatgatgaagaagaaaactgcaattgaggaacactttcctagtcagccgcaatttcaaggaaggatcttgtgctataaacatttcgtcttcaacagccaaaagagaaccagtaaaatcaacatagtcacaaagacaagattgtatttgtagtagagaaacaagaacgataagtagtttttgaacaagagaagagaaggaaaggtgacaaaaattaacattaaacaaatattattacagcaaacacgtggaatattaaaaaaaaatatcacaaaaagatatcatttatctactaatataattttcaaaacaagcaatcaaagattattaattatttgttaaaaagaaataaatattgctatgttgtctccagtaatttacaaataagaaatggaacttcaatcaatttatttttggtattctgaactttcaagaggtggtgcccgctgtgatcaccaatttatttgctcccttttagttttcttttgataaagacaaaaaacgaagtggagcttctttcaaacaggacactacacaagcttgtctgtactctcattaccaaggaatttcttgaccatcccaagcaaaaaacttcccgttgtcgccgctctttacatttttaattatatgcaggagtttctgtgctgagaattctttagtgaatagcttgtctttggcaacattcctctgaaatggcctagagagatctgtgtcgactgtgcccggatgtagtaaaatgcatgcaataggatccttctttcgggctagctcaacagatatggtttttgtcactgcaagaatcaatggaattatgaagctgaaacacaacttctaaatctaaggctaatttttgttggtttcttttgatatcaagacccttatcgatttattgcaagatcttatagttaattcacaaggcatagaaaagttgtgggtaaacttgcactgatttaatgcggtcttcgaagcacgatacgagtgccaacccccaaggtgattatccccaatggatcccacccttgcacttaaattggcaataactgcaacatctctttctgtcccagagccacctccaatctttagaagcggccacatatgctgtttccacaaatgacaaacaatattcatttctcaacaaaaatgcaatcatgctactacaagcaatcaaataagaaaaaagtagactatataaccttattcctatttgaaacaaaagcacaagaactagtgtcaaaacttttgtttcttagagacagataataaagggaattgtttcttggaggattataacaaactgctgtcaaatatgaaaagatatgccacttttttttatgcttgtcttgactctaaaattgcagtttctataaatatgaatatgtggtgttgcatgtagattacttgccatattttgttcaagaaacatgttaaaccaccaaatacaatggaaacattcacatttatttagttttagcactcaaaaagaaaccctatataagtcgggtcaatgggaaataaaatatacatgcataggatgaaacagtactagtttatgaggaaaatcaaatattcaaggataaaattagagtacagaataccttaatcactaaaataggaccgatagcattaacctcataagcaaacatcaaagacgacttttgtaccttgctcagtgttgtttctgtattggaatttaaagacaagaaaaatggcattcttagaaactagaaatgcgaaaaagttttgccaatcataatttaagctcctagttgtaatgttgtcaaatttgtacctggttgtagaacatcgggtattgacaaaatcccagatgcgtttatcagaagatttaagcagccatatttttcactaatagattttgcggattcctgaatgtttgaagagtagtgcaacataagaagataatccttcttgttaatctttcagaagcatgaaaccaaaacagagaattaatcatgtctacaccagggaggattgaggacatgagaaccactaatatatgatatccgttcatataaacatcactagaaacaagcaaggacttctttgaaacaactcctagataagccaatacaagagtaaaagattacaactcaagtattgataccagtgcaaccaaaggcgtgtcactttcagtaataagtaagataatgcagaattataggaagagtgaaatagcctcaataatgcttttttaggcaattccaacaagaagaggcaaaacaaaactaaagaacttggaaacattgatatctcaagagccactaagttttgaaattttgaagttataagcaagatcatatacacttaaaggaaaatgagtgaaataacctcaatggtgctttcatcagtcacatccagcggcaaaatactaaggcgttctgcaaacttgttttgtagatcataaagcccttttgccccactaggattacgacaagtggcaacaacatggcctttatcatccttctcaagcagctgtttaacctaaacatgagatgggacataaagcataaacaatctgttgaacaacctaaaacgacaattaaggtagaacattcaaaattgagcacaagtataaaggtcatcatcaaatataaaccaaaagccagataaattactgcaaaatatgtaactagagacaaagcccagaggctataatgtcaatgagttgcacaaaacataaatacaaatcagtttaaccaaaacccatttgagaaaggattattctgcacgaatgttggttattagtgaaacgatataaaattcttgagatatgaataaaaatcaaagagaaatgttaaatcattatacaaaataaaagaaagaaagtgattatacaaattcaaggccgattcctctggaagcaccctgtaccatagaaaccccaccttcccgcttagcaagagaagaagaaaatgaagctgtacgggtaactgatcgcatcacccgcgtcagaggatgatgggtcgccatgaatctttcctggtgcaccaaaaacttcatcacatcctattcgagcaataatatatgcagaaagagaaaaaagaagtgtgcacaaattttaatttgaagtgcgattaaatatttcctagtaaatgtgtaattttttttgcgattacagctatttgaaatagtgtcaaaataatttttttttttaagatttactaaaaaaaaaatattgaaggtttccatttgatagttgtcaaaatttaatgtaaattttttaatttacaaagacatattagcattttaaataataataagacaaaatttaataaaaagactaaatttctttaattaagaattcttaacaaactatatattttagagacaaattagtattgtcgaaagttcaaagaccaaaattactaattatttttattacaaacttagttattaggcaggccaatttggtattatgggacctacatattatttatttctccattagcaatgaatgaaacttcatcagcaatttaattaagcacccaataatgtataacaaattatgtataaggaatttaaaatttcatatacaatttttatattaattattttgtttaattggtgggaaagaagttagaagttagaggatcatttatttatttattttgatattaatattttattatctatttttttttttgcctatctagttttcttttagaaattattacatagaaaatatacattgatattttatttataaaaatactttcataaggtgtggacaacatttata

SEQ ID NO: 162618 - DNA, 1392 bp, Cannabis sativa
ccctcccccccaagtgagttaggaattttagacatctccaaattcatggtcacttgtttaaaatatgtttaaagttggaaataaaaatgtattctcactacaacaaaaactgtcatcaggttcgacttttttcgttccagaaaatctcttaattcgttccagaagattttttcgcgcgactagtcattttgtgcctgaaagcatacatttgagaagaagagaaattacaagaaataaaattcaacagaaggaaaacttttagacccagatacccctagtttactgataatattggtgcaggtgattcgcgttctaggctcatggaatttctgattctttcattctcttcagttgataggttccattatccactttatgttgaatttcatagggacgtcctttctagtttggtcctaagacccccactcctggttcctgagaagctaggaatacccttcttaagatgagatctccaactttgaacgtttgcatcttcactttagaattaaagtacctaatgatatttccttggtacatctttagttggacttatgacttcccaaagctcctcgatgaaatctagagatccttaaagtagggcatggtttcatgttgggccataagtctctcttctgtgtgaatgtgaagggaagatatttgtaactatgatgatagcctcgcatccataagccattgattatggcatgtgcctcgttgaagttctttctgttgttctatatgcccaaaggactcgtggaagctcctttgggcaatgagctttataagcttgaagttttttcttcaaagtagttttcaaaatcttgttcacagcttccacttgtctgttagcctatagtctagccacaactgagaagctcttgataatttcatattggatacaaaagtttgtgaaatgtacattatcgaatttcttctcattatcagatacaattttatgtgaaagtctgaaatgacaaacgatatttttgatgacaaagtctaagacttttttagaggtgaacatgttgatgagttctacctctacccatttgctaaaatattcaatagccattaagactcttaaagatatagaaggactatggtagattgactcaatatgaaaacttgggtggaatttattgaaagaagacctcacattaagtcaagtaacaatgccagctcatcaatattagttacagttgcaactaattctcagacagttacaatttagactctaactaattacttccatttacttccgaacttaactaatgtaatagtaaaaggcaaactataaataccttgcattgtaattagaaaaagtcagaacatatatatatatattagaatatttctaattaagaaaataaaataatattattgattctgata

SEQ ID NO: 162619 - DNA, 1649 bp, Cannabis sativa
cctcgtgcattccgtaatctctccatgtgtctcaggaaaaacaagcccaatcttctctttgttatggagtccaagcttactgctggccgtggggaacatcttagactaaggctttcttttgattctgtttttgaagcccctagaaatggtttaagaggtggccttttgttattttggaattctgaacttgatgtaaatattttgaatttctcctctaaccatattgactgtattatacactttaatgataatataattatgcacctttcttgtttttatggttctccctattctgttgacaaaattcatacttggactttgcttaataggttgtatgataatgctccttctcttccctggtttgtctttggtgattttaatgactacctatctcttagtgatcgatcgagtagtacccccccacccccctctgctatgatacactttcagcattttctccaaaaaatttctttcactcctctgcatccggttgggaatgcctacacttggaagcatggctctttatttgaacgtttagattggagtattgctaataatgcttggcactgccttttccctaaagcaaccctttaccatcttggtttttatggatctgatcatagagtgcttaaagttgttcttcaagatgaaagcatgcagggttcgaaagttaaaaactttatgtttgagaaccattggctcatggaagactccttttttgatactgttaagtctgcttggactaactctaacctcacttcctattccaacaaccttgaccacttcctttcgaagcaaggttcttgtatccaagccatccaaaattggaattcatcttctaagagtctgtccaaaagaatcaatgctcttgaaaagtccattaatactcttacttcaaatctgcctctctctcaggatcagctcaataatatttcttctcttcagtcccaattggatagtcttcttttcaagtaagaagtcttctggaagcaaaggtccaagatccattggcttcaagccggtgacaaaaacaccaaatattttcacaaaaaggcttccatccgtaagagaggaaattttatccgtagcctcaaacgtgaagatggtcagaaagtttccacacttcctgagatttctcaagaagttctcacctatttctccacccttttcacttcccaatcctctaatcagcatgccacctctaccattctttctgccattaacacctctttgaaacctgaccaaatcagcttccttaatgacccctttactgagagtgaagttcatcaggccttatttcagctatcgggggataagcccctgggctggatggtctaaatccatatttttaccaaaagaattggcatgtcattggtcgagatctctctcttgccattcttgacatcctcaatggtaatgctacgttatcatccatcaacaacacactcactgttcttatccctaaaaaatctaaggccactactctcaaagattatagaccgattagcctatgttctacactgtataaaattgttgctaaaactattgctaatcgtcttaaatctgtccttggcagtatcatctctcctaaccaaggggcttttctttctaagcgtgtcatctttgataacatccttattgctcaagaa

SEQ ID NO: 162620 - DNA, 1500 bp, Cannabis sativa
tttttttttttttttttgcatttgcctaataaccattagatcatacgaagaaatgatccaacgattgatggcccacgagggatttagtcccgcaaaattaagcgagggacagtatagctctgcccttagctcaccgaaatggccatggggaggagagcccatgtgagggagttggtgaaagcagctcgagttctcatgacccaacctctactctttcctttgcctaaacttgccgccaattctctttctatcaacaaccctttactccccactccccagcgaccactcccatttccttccttagcttcacgctcaactgtaaccatgagcaccgacaaaaacgacaatgttcaagaccagttggacgccatatttaagcagaaaaaggtcgtcagatcccaagttcgcaagtcccttaaagctatggatcccagcctcagatcccatgaaggtaaacccattgtttttcaattcaattggctgaaatttgaactgtgttttcgtattgtgttttattcttctgtcatcatcagatattgctgttcaggatttagttctgggagctccctggtttaaatcttgtcaaagactatgtgcatatataagctgtaaggctttgcgtgaagttgatacctccaaattgttgtctgagattctggaaaatccagccaaaggtgtgttttttttttttttgacactatattattttaaagctaaagattagtgagagttcagttttggatttctttgcattgtcttttgggggtgaagatatgttgattttggggaagtctgacgttttgttttgtttttgttttcttttctaacaatttgttgaagagggtcatatggagctgaggaagaagctttatgttcctagagttgaagacaagaacagtcacatgcgaatgctaaacatctcacgcattgatgatcttattgcaaactccatggatattttggaaccagcttctgtagatagtgatggaaatgaacgtgaagatggtatttttttttttctttttcttcacattggtagcctatggtctgtgataacggatgatttgagtcatcttttctaaattctgttaaatttcagagcttttattagcaggagaagtatctcattcatactagtgtttgtcaagcttgactacacatagtgaatgagctttggcttgaaaaattaaattcacactttctgcgcgatgtgaatttgatcattttctcttttacctagagattctatatgtttacttaattcatgttcacaagttaagctgattattttgctatatactatatagttaatttggagcattttctttaatgcagtcatgcaggcaaatgacccagttgatttgttcatcttacctggtagtgtttctgttctagttttagtacttgttcatatactcactggtaggggtgggcatccgatccaatccaacctttttttcctcatccgatccaatccaattagtaattgaatttggaaaa

SEQ ID NO: 162621 - DNA, 2597 bp, Cannabis sativa
gataatatttatgatcttgtcgcgcttttaggaaaggcaaattttctaatttatagtaagtggaaatatagaagtctagttatctatatatcatcaaggaaaactatacctctgattatatgatttttgtacatcacagccatcattattataacttaacctcggttcgggaaacaacttcaagtcagtggtacttcaacattgtcactcttgtttgccatcatcataagactttgtgctctctgtcaaatctcatgaaattaagaactcagaaaatttttctaattcaatttatgatgcaccttggatgattacagctgtaaaactgggctataattatccaagtgtactgtgatattgaactatttctacagtaatggatttcaacttaataaataaactaaaaagttctcgaattttattatgatgaaaatagtaaagagagtagcagtctatttactttttctacgcgatcccttttttttttttatagtactagacatttggtttcttggtgagtcttacttttatcttctgtttaggcacaactttatcgcttgacagagcatcttttgaggaaagcaaatctgccagtcattcgtagaaccgcagaagcagaattagcagtggcagatgcaattaatatagaaaaggcagttgctgaccgatcgagcagcaagccagtgtatctgaatctatgttcccaggagatattgcatcgatcagaaaccagcaagtccagcggagctccagacgttgataactcaattccatcttcaaactctaccgaaaaatcaggacaatctgaaaaagaaaattcagataatcttgtaattgaggatgcattgaaaaatgctggtctctttgattctcctcctaatagtccagatcaaagcacggaaaatctgcctgaagaaggatccttaaaaagtatcagagaagaaggtcccgaagatgtaattgaaatgggtgagggtcctgatctggatatttatggtgaattcgagtatgatttggatgacgaggactacatcggtgtcggtgctgcaaaagtctctaaggtcgttcaaccagaagaaggtgcttcaaaattgaaagtagtcttttctacatttaactctgaaaaatcaggcactactttggattcagaaaagacacagaattcagagatgcttgggaatcaaactggcgcagaatcaacgaaagaagacggggttgaaaatccttgcattcctcaagaaaaaatattcggtgaagaaggtgaagagccttctgttgcagagtgcgaagaactctacggcccagataaagaaccattgataaataaatttccagaatcgataaagccttatgttgtaaacaatgcagaagcttcagctggaaatgaaccttctaagagtcacgaaactagtgtaggccgcaactcctcagctggagaaacttcaccaaaccgttcagaagtaggcgatactgttcgacagaaggataagaaatctaaggaagacactacaaagcggccagacaattccatatctaagaaggtctgtcctgcttatttcgatccatgttttctttgcatttgttttatttcaatccatgtttcttacaattttttgtacaggtggaagtgtacatcaaagaacacttgaggccattgtgcaaaagtggggtaatcacagttgaacaatacaggtgggctgtggcgaaaacaaccgaaaaggttatgaaataccattctaacgccaagaacgctaactttctcatcaaggaaggggagaaagtgaagaaactttctgagcagtacgtcgagacagccaagcagaagtcgaaaggcgatctttcgtaaagaatggacatgttgtcaattctcatattgttcatggcttccttctttttcacattgttccattatttggagcttttggttctcccttgctaatttttgtaaagatgacactactaaacacacaaggaagcattttgtacaagatttgataattctaatagctatgttttcatattggcatctcctaatttagtttaaaagacaaagtagttatagtttgtgatactattgcttttgaaaaattaacatgttttttagttttgtttttgtttgaactaaattccttttatataatatattatttattttgttaattaatgccctaagaaaatatgtaacttgtattatatgccccaaaagaaataaaataagagttcctaataaatagatgaagtattttaaagggataatttaaaacacacacaaaaattacaaaaaaaaaaaacaatttgtatactattttttttatgtatttttatattatattcttgttattttattgttgattttttgtataataatatttggtatactaatataaaataagagtatacacaagtagtcttggtgatcgttaatcagatgacaccttaaatttactactggtataaaatttgaacttaaaaatcaactaaaagatagttgatagaatttagtccctaaaaactcaataaaataataatagttgagacacttaaaccggaaaaaaaaaaaaaaaaactcatacataaacattagcttgggttttgga

SEQ ID NO: 162622 - DNA, 1714 bp, Cannabis sativa
tagaaaatctcgagtctccaactgtcctggtgaaatttcatttggtgaaaatttcttgaataacatagttgtatattcagatcatcaacatgcctgggaatccaaacgcagttggggagtgcatggaagctttgttacctgcccttaagcatgcattaaagcagataaagggtgacaagagagagaaacatcctcgccacgttcctcacgcagaagccgcttctacagatgaatgggagcgtagtcataaattggcctctgctgacactggaaagaactcgtgctcttgtggctaagggtcctctgggattaaatggtacatgaattaattcaagatgttagcacaaaattacttgcattaataataataataataattttccgctggagtacatatattccataaacttatgccttattttgatttaactaaatttattttggaaaaaagtttttctaaaaattaattaagcatttaaaatttaatacctagtgcaatagaatacatatgtggggattacctagtgatatagaatattgatgtgtatcttcgctgcccttagcaaaaagggttcaaataacaataagaaaatagggaggtggtttggaagaatgaaaatataaaaatatgaatggcaataagaatagaataaaattaaatttaaaatgtataaaaaaaatagataacaaattattaaaaaatttatcatcttgtgctgaaaaatttaaaataatattttactactttaaaatacaactaaataaataaatggattaaaaattttattctacaaaaataaccgttagattttgacgtcaaaaagtcgtggcttacgacatgcattagagattctcgtgcgaatattctctaataacactagaagttggaggaatgatcagagggtttgtcgaaggagcatcttgaattgatgataaagtgtttggccggagagtttggcgagagttcctaaattcaatagcttgtgtttttaccatggtgaattaatggcagaaaacttttagagaagagaggagaaagagttttagaccttgataccatattagtgatcaaaagagtaaactgtattatcttaaaaaaaaagggtatatatacatgcaatccttgatctaactcaaacaagaaaaggatgagttggtttatggttacaaccgaatatagcaacctttctaatcaacttataactaattttacttaaccaaaatactaacagctctaattatcaaaactctaatatggatgaacaatgttctttcatgatgaagagaaacctctaaaaattcttacactctagcaagtattttctatattgactcaatttggattggtttagaatgtggaagctaccctttgagaataggtgatcatgttggtatatattaccatgaccaccaatataaaaacaatacttcataaactattgattcaatttatgtgtgttgatgagcaaaaaagttgtgtaataaaacaagataatagcagccaaaataaatgtgtataataagataaaataataaccgcgtaaagtccgttgtaaaaaaaaataataaccgcgtaaagttctttgtaaatatgcactaatcatttttgcaggtgtgaatacataaaataaaagtcattttacaattttgtatacattattttaattaattacaaaatatgtgtaaaaaaaaaacttattatcattttctcata

SEQ ID NO: 162623 - DNA, 4135 bp, Cannabis sativa
tttttttttttttctgaaaacttgaatctgtttttactaaagattattttgaagttcaaaatatttttcgaagtgataatcgagtttagaaggacaagcttttggatcaaaggttggctctttcacataaattttctctgtttaatgtgttttctttgaataatcgtgtgatttaggggtagaaattatatgaaagcaataggataggttctaggcaatgaaatttcaagaaaaaataaggcaaaagaaggagtttttctaaaagattcttgcctgcaacttgaatattcacgtctttcttgtcatgaattttgaaaattcacacttttagctagaacacattgagtatttgcatattaatatcaaactatgatttccgactaaaagagtttgaagtggttggctgtttcacagtgatttaatatttatatacctgtataagtcttaaggcactgtgaaacaccgaaccccacttcatttttctctagtgttagtttggttgtttttgttgaatttgaattttttatttgtgttaggacaatcctcttttaaattgtactcacaacatgctgaaaagatcttctatcttttagatgagcaatctctcaaatagccagatatttgaatctaagggtggagcatttgtagatgatcctcagaagagcgtcagatttatcccaacatcgatgtcaaaagatgaaggcccaacacatgtagatcgacaagactcattgtctactagccagataggtcgcatggtccaagagttagaggaaccgattgatattgagatacgggaaagcgagtccaccgtatctactcaagggagctttatccacccaagggccgctctagatgtagaagtcgaggaaatgggatagggtttccagttgcctgctctaggggacaaaagagatgatgatgaagacaatgcaaaatttgttgaggacgtgcctttcgacaaaccattttcttgtgaggacttggttttgcgagttgggaagactgatttgacgacatttcaaaaaataaagttgatcaatactggttgtacgtaggagtgtaaatgggtcaggtcggatctgatccgttcatgatttgacctgatccaaataatgtaaggattcgccctaccccgccccgctagatcagatactcagatcagattagatccaatctgacttattcggattggatctgatctgacccaatcttttatttctcatatataagcttataattttatatccattttaattttgtattagtattatttaatacaacactatgtttggtattgacttgtattaatatattgtgtaaagttatagtatattttcaataaactcgaccccaacaccaactacgagtcaagtctagatctggttctcatgtcttgatctgggtttgggtcccgagtttagcacccggtcctaggttcaggtctggtttgggtccgagtttgggtctgggtctcgggtctggttcgggtcccaggtccgggtcccaggtctaggtctggatctgggtctaggtcctaagttcgagtctcgggtctagttttgggtcttaggtctcaaatctcgggtctgagtcggggtcttggatccaatttgggttcgagtctgggtatggctccaggttgggttcaattttgggtcccaagtccaactctgggtctgagtcctgggtccaggtttgggtctgggtccaggtctgggtcctagggtcctaggtacgggtgctaggtctcagtcctaggtcccgggttcgggtttgggtctgggcctgggtccaagtttgagtttgggttcaggtttgggtctgggtccggtccgggtcctgggtctcgagtcgggtcgggtccatgtccaggtttcgggttcgagttcgggtttgggttcgggtctcgattccaaggccctgggtcttggtttaggtcttgagtcctagtctgggtctcgggtcctggttcgtggtcccagtctaggttctaggtctcagtcccgatctaggtccgagtctgggtccaagtcccgagttgggtttgggtcctatgtcttggtccggtcccgggtcacgagtacgggtttggatcccaggagagttcggttaggtcccaagtcctagggggtccgagtccgggttcagggtccgagtcttgaattaagttgttttttaatatattgaaaccagatcagatcaaatccaaataaaaaaaaattaggcaaagcagagcgaatctaatctgagatccaataagtatccaaatgttttggatcagaagtgatccgtcagattggagctccgacccgctccaaataaatgatttttttttactttcctagttgtacgaaacccatgtcgatacaacgccctcattgaccctgtactaaccaatcaattatcctaaccaacatcattatggttttagtccccatcgtttgttgcggtgtcgtggtcccttttcaaccctttgtcaaagcaattttgacatgttacaacattttccctttccaactcaccctcgacagttatagaatcatcctcagattctatgagatatatacggaatacatgcaaggagaacctactatcgaggatttttgcttcttctacaatatcatgaaagttgggcatgacaacaacttttattgttttagtaactgaacagagtagaaggcatggtttctaatatgagagactcaaaatcaaagtggtttttgcgttctcatttcttggagttaggatacactctaattttcatcctcgtacgttgcagatttttacacaatattttttcttccttttatcatatgaatactgacctttatttgtattggtaggctgaccagcttgattcgagttatattgggatcacatggaaattgtagaagtcttaagcaatctcccaatcagagatcgagattgccatcttctttgtactttttctaaattgtgagagcatggactgatttaagccgatgccagactttagcgagaaccagtttataaagaggcttctaagaaacaaaaagtaaagattaaaaagcatctttcagaaaaaaaaaaaatccaaggcaaatcacaagtaacatgtccattaacaaaaagtaaagattaaaaagcgtctttccaaaaaaaactccaaggcagatcacaagtaatgtgtccattgcgattgataattttctgtgagttcatatgattgcttatacttagtgtatcctttgcagacatgactcatctaaagagtgctttggttcttaactgcaagttgaagtctaacaaggagcttgcgactccttcttctgtgaatccccctcaaacgaggaaaagtgaagctgtcaatcctctgatccttgacttatccaagaagcagcagaaggtcagccaggaaaaggagaagaaacccatgatggagccaatgactaaggcttgcaacttaatggctttgtaggaaaaatatgtcagtgattactttgttgtccagatcgaggggacacctatcgaagacctctgggctcgttattctaactacatgactcaaggagtgattgtatatttgtgaactaaaactgcaaactaggctttcaagaaactcgagcttttgaagaaataaaactctgctcttcaggaaggtttgaagaaagttaagctcaaggcggccagtaaggataagaaaattaaagatcttggcagggccaaagacaaagcaggtgagaagataaaaaaactagaggagcagattgttagtcttacccgtgacttgaataacgagaaggaagaaaagaagaaagcttatgaccaagttgtcaatgattatatttacactactctgaccaagttgcttgattttcacttttctatctttgtccaaaggcaatcgagatggccaacgctttttgcaccatgtctccaactgagacccaaggcctagccaatgctctttttcctaaagacgccttagagctgaaatcgcggatgtcactgagaaagttgcagagaatctcaatgcccttgctccttagaaaaaatgtctcttcttttgtttgttttttttaatagaggtactgttggaaattattttaccatgatcttagatctctcataagtatgttgattaacaccctaa

SEQ ID NO: 162624 - DNA, 1760 bp, Cannabis sativa
  modified_base (1259)..(1263): a, c, t, g, unknown or other
tttaaaaactatgtaaaatcaataaaaataatcatacgtacttacacagtattacatgatttattaccatgtgatcgggttatactattattacctaacgattcataaatattttatcatttttttaataaattagtacttataaatatcgttaattaattaggtaaaatcaaatagataaaatattcttaccaaaaaaatgatcggagcttatgaattagtaattaatcactagtagtcaaatacaatatattaacataattactaattcataagctcagattatttgattaaataagttgactaatttatgttgtaatattttatataggttgtataatggtattttactttttatagtattgaccatatgtacacatataactttatatacacctataaagaagtaattttatattatcttttgttaaagatgagtcctaaaaatatgactttccatataagtatgcgttaaatattaattatgtgatttatgtgtacattttatttctctgaaatacacatgatattattacttttatttttaaatactaagtgatcagtgtatactgaaaagagaaaagttaaaaaaaaaaatgtatattaattatttgttggcccctcctcccatccttagtagatcatacctatatattaatatgataattttgaattaatctctaacataattttagtgaaatgtactatttgattcaaaaatctattaatttgtagtacactcatttaccatggccaagataaaagatgtcaaagatcgatagatatagagataattggttgttaaaattgtaaagttggtcttttaaattgttgtttaattaggttgcaattatttgttttgtgcactaatatatatatatatatacttctctaattcattaaaaaaatatattaattagctgaattggctatctttgtatcaaatttcaaattgtacaatatgtaatgtatgtatatatatatatagagtttcaatgtgtatatatatatattatatcacagatttcaacaaagatatatatgatgatgatgatggtgagtgtgaaaatgggatggatgtgtgtgatgcaattaagcacaaattaaacccacgtctgtgtgtttcacaaaagacacagtaatatatagtcatgcatgcatggaaatttcagcaaaagaaaacagttctcagaaatctatatatatttatatatatatatagaccgtacatatattgagtgagagagagagagagagannnnnagagagagagagagatggaatggagtagtgttgttgtgttgtatgtgagagtgacaaagatgtaacgtaggtttagtagcaggggagatcctataataaagacatacacaacagatatatatctatctctattaatatattatatatattggaatcaagaaacaagaaatgatcatgatgatcctatctatatatataaatataaatatgagattgagaccgtagctctccaaccgcgtgatctaccctaagaagccacattgattttcgtttaaatgaaccgtccttttctctcttgattttcgttttcaattacacccacattctctctctctctctcatttcacacatctttttaattatatatatatagggatatgattttgccctgttatattgtaatttcacggattgtaatccgtgatgtacgacaaccgtcagatgatgaaattatttgatctgacggctgagattgatctaggagtaattagggttaa

SEQ ID NO: 162625 - DNA, 3934 bp, Cannabis sativa
  modified_base (3712)..(3720): a, c, t, g, unknown or other
  modified_base (3892)..(3900): a, c, t, g, unknown or other
tataatttcataagatcgacataaaactagtgtatacagataaggtggataagaaaacaaaaggtcggcccaattaacaatcaagcaataccttcggagcaccaattccatcctgtctagtttctattacattgccatgagaatctatcctcttcttgattacatcatgtttctgcaaataatattagaactataactcaaaactggtcacaagtcaccaagttatgaagaaataaaaaaaacaccatttttttttgccgacaacaacattcaaaactaatgaaaaatataaaattatacatactacatccaggtgttgctctccactaatgtccatggcatcaaggcttagtatggaacaaggaagggccgggaaggtgacatcaaactgcactttcgaacaacaaaaaaagcagagatcaattagtttcaaaactttaatagataatcgaagggtatcacagcatggtattattaaagaatagtttccatgaccaacacaatatttcaagtactatctacacaatcatggactcatggttgaatttttaaataattttcattagaagaaagaaggtacatgtgacaagagaacaagtaatcaatacatgtaaaataacaaagatagattcgtaaattaattaaaataaatttcataactctcatataattagcattacattgatacgtagagtttctcctcttgaagtatccactacaagctttgtttcagtaactgcatgtagatataaccctgcatccaattaaaaatagaaaaaaaacaacaagatttatcagagaaactcatacagaataaaaacactagaaagaacaagacatcaacctataaccatatgactatgaatagaaatggatgtaccttatacctcctaccacacaaaaagtttccaaaggaaaataataaatgacagataaatacatagagggtaatacatggttgactaaaaccccttcacttgcgaaaaatagaaccatcagcttaagtcaaaacagtaaagaatagattaatgaaatgcaagagtattgctgcatcggattcggcacaattcacaaaaacaaaattctaccaacaacgaaaatatagcaagccagttaaacaaactagaaccgtaaaccgaagaatatcttaatccacgggtggtaaacagccagtctaaccggattccaattatttcgcaataattagcacaactcaaatgcctccaatttttttcaaagtagaactattcaacaattcatacgaaccatcacatatcaattgtcaacgattttctgtgcaattaaccaatctccaacaaaaaattaaccctaaacagtacaggatccccaaccacatagacacgcaaatttccctatatatatataaaaaaaaagagagtacatacgaagctcggagaggaagagcaagagcatgacaacggaggaggcgatagtgataacaccaccggagagggtacgactgtagaaatcttcattgattttgggataagcatccaaattccggagcttgctcattatattatccatttttggtggtggatctagattcgagactacagacctaattattggtatagcattagcctagagattgagattgaaattgggatcaaatcaaagaagaatagacagagagttcatttatttcattattgatctgggaattttaaaagttaagggggggcgttttagcaactacccacttctattatactctattttgtttctgaagtctgcttagtgcttactacgccctcctctaagcctaattaagatttttgtacctaaatatttttatcaaattttattaaattttaataatttagtgattgtatatgtattaaattatttacaaaattatgtctaaattatacttttaaattttcatatatattaaaatttttttaattaaaattgaataaaaaaatctaattaggcttttatttataaatttaattaattaaataatattataattttgataagtgagatcaatcttaaataaaaataaataaataattacttgaaactctatgtgtttatatatattttattattattatttaatctatgcttaaaaatctcatatttcactacgacctacctagttagatcaacctctctaatatatgcctcttccacgttaaagagagaggtttgcactcaactatgtcaatgtcatgttggggatgaacacaagagacaatagagaatgaagaaattgaggcatatagagaacaagaaagagatcagaagagttagagatggacgaaaaataggattatcatggcatgtttatttaaaaggaatgagaattaattatatggtattaattatatggtattaattctcgtacaactatttactaaattttagaaaaagaaaaaaataataagactcacacaaattagcaaaacaataaataactaaataaataaatgttctctctttatttttatagaaaacacctttccttttcttaacatattttattttaattttaatcttataaattaaagataataaagactaatatgtcttttaaaaatctataaacaaaaaataattatttattctaagagtggcaattttgtcaaattaaaatattacctttcctaattatttaaacaaaataatattgttctatttttttttggacagtttagtaaacagaataataaaatatattttctaattattttttattttaaaccgatttatttctctgattgattagtttgaatccaattacagtttagtaaacgcgcatttactttattgatattcgttgacaaaaattgcgtcaataactaattaacgcaaagtgcctatcctagacctaaacattaatcaatgtgattgcgtcactaattaattgacgcagaatgcctatcttagacctaaacatgtttgagtaacactaaggtggtgtttggttggaagtaatggaatggaatgggaggaaatgaaataatttttatttcattcctttgtttggttgtattttaaagtattggaatatcattttaattgaatgatttttccatcattctggtggaatgactatttcattttgaaatagaaagaaagatcattccattgtaagataagaaaaaaattaataattttttatcaattttttatgcgtgagaagcattaagcacttcccatcgtcactcacatgtgacacttacattaatttgttgtacttagacagatgggctctggggtctgtcatgccatcgtacagatcaatcttaggcatccagaatcactatggtaagggtgcttctaggattcttctcacacatggctctggctcttcatcttccgagtcttgacacaatgccactttgtttgcaaaccgactatgtatgtgattttggttagagcggctatttgatcctctagccgtctagtgttatcatctgggagctcacgtccgtagattctatctttaatgtagatgcgcaagtctcctccatgaggccttaatttttacatattactttttctctttttgcatttaggcagtccttgaggtttgtcatcgacatgctgtcctctgggtccagatgttccaataaacacttgattattgaactaagtttctttcaaaaaaaaaaaaaacacttgattattatcgatctcgtcaatagaataatttagtttattaattccattattactnnnnnnnnnatatggaattgcactctttgacaatataaaattatatttacaaaattctatttacagaattcttacttgtagtccattgatataatcaatataagcaattcgcccttcaattatgagttcataattagagttggtcaaaattaccattttacccttctaattatctctcgannnnnnnnntaccattaattcaatgtgaacagttaatttataa

SEQ ID NO: 162626 - DNA, 6490 bp, Cannabis sativa
agggcacaaaacccaacacattcaaggttctcgtattctaatcatttcagttttgaaagctaaagatttactgcacagtggatgtgtaggatttttagcaattgtgattgactctagcaaacccaaacatttgtgcctgagtatgtcatagttgtaaaagaatttttaaatgtatttctcgaggatctacctaaatgaccacaacaacgagaaatagatttcataattgacttggcacttggagcagagcctgtgtcaaacacaccttatcgaatggccccagtagaactcaaggagctgcaaatacaacttcacgggatgctggatctagggtttacctgacccagtgtgttgccctagggagcttcaatttttcttgtggaaaagaaggatggatacttttggatgtgtattgattactgagaactgaacaagatgatgaacaagaataagtatccactacctaggattggtgactcattctatcaactttagggtaagacttttttctccaagattgacttatgtttagggtatcatcagttgagaattccggaggaagacatttcaaagatatcatttcgaaccagatatggcgaatatgtgttcttaatgatgtcgttcgggttaacaaatgctccagtggcctttatggatcttttgaatagggtgttcaaggatttcttggataactgtgttatagtatttatgagtgacatccttatatactcttagacaaaagtggagcatgaacaacatctctgaatggttttacaatggcttagagatcataagctgtttacaaagttcaaaaagtgtgagttctagttatcacaagtgtccttcttagggcatattatcaaaaaggatggaattatggctgatttggaaaattgatttagttaagaattggccgaggccaaagacaattactgaagtccaaagttttctcaaattagtagggtattggcggcatttcatggaaggattttctaagatttcaatgccactgacaaagttgacaaaaaagaatcaacggttcgtatggtctgataagtgtgaaacaagctttcaagagttgaagcagcaattgataatggcaccagtgttagcaatgccttcagatcaggaaaggtttgtagtatattgtgatgcatccaaatagggtctagggtgcgttttgatgcaagctgacaaggtcattgcttatgcttctcgatagttgaaggagtatgagcaacattcctgaaacatgatttagaacttgttgctgttgtgtttgccctaaagatttggcaacattacttgtacagggagaagtgtgagatctatacataccagaagagtcttaagtacttcttcgatcaaattaacttaaatatgatacaaagactgtggtttgaactagtcaaggattatgactgtgagattttatatatgattcgtgtttttaagcagtagatacatggcataattagaggccaagatctattaacctcttggattaacaaagacgaccatcatgattcctcgcagagatgccccgttaatccaggaggggtttaatgaatgcttaatgcagagagctatctcaagcccagttagcgtctctaggacatggaaggaccatactcgtcccttaactccaagaagtcctagaacaacagtctgactacctaacgtctaggtaaggactttctaaacttgtcgcagatgatgattcctacgcgaatgtggatggccccatcagttttatatggaaatcaacctatagacggttattcctttttctgacatagaaatagatcttgtcccacatgcaaggccattgtagtgcacgtatgtacctctggacacaccttttcacctaactgcttgtccagagagtaatttatgaaggagaaacctttgggcaacacatgtccctgatccaggcggtactacttacatttcctatgcatcgctcgattaagaaggttcttcaagaccagatggtcagattcaaatttttattttcatgcccttgcaatgggctataatacaaaaccctagctgggtaaagggaatgcccttaccgtcatgtaagcctataaatacccccactttttatgtacaaagggttaacaaattttacactagctgaacctctacaaaaactcctaaaagttttattcttctttaagagaaacaaaaggagtgtagagttaaggtttatactgtacacacatattgtattattcaaacacttagccaaagggccaatacaactaactcatggactaaggattaacgcctaacccacataaaaatcacttgtctattatttactattttatttatttttgaagctctgtttatttagtttccaaaaatttcggtaaacattttgattctttcattgagagctgaagaaagcttgatagctgctgaaccacctcaaccatggtgttcactcaaaaagatgtaggtaagaaagctcctcaagatactgttatggaggagatggactcccttgcgcctggtctccatttaggtggtgcaagagaaggaggtattgtaattttgaaaactgaggagaagatgctaaaaacatgcatgatggtgttgacaatttccaaaatcctaaagatagcgaagaggaggatgacgacgatggttatgtgaaagataaatactacaaggatggttattattatgaccactacccaaacctgcttcgagtgactaaagagttagaaggtacttagatgaagttagctgagcaggaaaaacatactgaaaaaatgaagaaaatgatggctcatctccaggacaagtttgaggatctggcacaatctgacgatgatccctcaatggaggttgtgtctaaagagcgtgatttaagaaaaccaaaactaaaacctcatatccacgctaggataaaggtaaaggtaaggtaggagaacctgcacaaaagtctgttcctaaacctcctcgaaaggacacaaatttagccagccaaccctttaagatgcagaaggccaccgttgcttttgagcctggacgcccttctgctcctagaggcaaaactatgccaaaagggcaaagtacaaaactacctaaacccaaggggcaaaaaaattgccctagtaattctatcaatcaagacggaaggatgattgaggcgcacactaaagataggtggtccaccgtagaccttcgtcgatgattggacccaaagtatgagaggtacaaaattgaaaaagtgaagccacgtggagaaattatgtttctttgaccaatgaagctgccatattccctaaagtaagacaatgacatggtcataaaaggatccaccctaacagtgcttgaggataagctcaaaactatagtctttcatggggtatctgtgacggtctaagctcaaaactatttatcgaatcccccttgatccacccaggacctgcagtagaggttaggggtacgaaagacgcaaaagggtctattacatcttcccaaagtactagctcctgaagtccccacgttcgggtatgctgtggcaaacctctttgaaatctcttcttctttagttaagggttttggatgatgggctcgccaatcaggttctaggagcttgtcctctttagctaccccatttattacaacagctaagtcggtagctataacttccttcaactctcttagagcctggagctaccccagaggatagcagggtcgataccctagaattttacaatcaggccagacctacaaagtaactcagtcatgaccaactcctaaactcttaactgctcctcagtgaaggctctatacttgtcctctttcttggttatttcgatagtttcgacgctttaggataagagtcttggcaaaaagtcaaaagtatgcaaaaatgttatcactaaataaaccaaggcaaaggagatttgagaagtgaggaaactaaggttatgcgtcaacaatacctaacaattggaagttcatctggagtgaaggcaccttttttacggggaacacggagaaaagaactagtattcctggaggtcgtgagtacggtcagtatgtctaacgagacagtaagaattagcatgcttatctgatctatagaagctaaaattcttcttgtttgacctcattgggttggtcttcacactataaaagtacaagatctcctttaggaaaggcacttccaagttgttcatcttataaaaaaacgtaccacccagccaaaagcatgtaagagaaggggatcatttgaaaaggttctatcccaatcttggccattagatttgcaaagtaagacctcaatgaaatatgcactccattagaaatatgggaccaactccacgcattgaatccctccatgctcgtggatgcaaagactcaattgcaaattctggcaccatcggcacattctgtcaacattccgtaggaatagaagaaatttaccttttgatccatcttcctgatggagtcattgaaaacttgtgcagcaagaggggtcttggccctccttttccctttagccttcacggagggttcatccttcatgatatgtttgtcctctaagatagttccaagaaccatctctggatgggatacttcagtaagaaccttggcttgggctccttccacgagcatgtcttctacgaggtcaggaggtgcaccttcgatgatttccacggtgcccaggtgaaaatccttgttcagatccatctataccaacacaaacacaaagggaaaccaagctacttgaagtaacaaactaagaacccagaataaaaacttgtcagagtttcattccaatcaaccaaccccaaagatctatataaatgcatagacctatgaaactcaaatagctagaaaaaattatatagacagttctaacctccctttcatagcgaatcatttctcagacaggtccatcccaaaattagaaaaaaaaaattcacacaacctacttcactgttcaacatgcaaacaggtctaaccctagcttgaacaaaaaatttctatcctaaacaaaaaataataaaaagttcaactaggaattagagtacttatgtgttgagtgaagaggagacggggtgttgttgcagaatcttgcttgaagtcttcaaacccagtcgattaaacggtcacaactggtctggaagtcaaaacctccatccggcagggggtttagtaggttgatttgaaggggtttgatatccagaaatagcctcaaatgaagatttaacaactattggattaaatgtttgaagtcttcttccatccatcggcgaaggaaaagcgaggaaggagaagtttgcagagggaatttggagtttggtagatgtgtggaaaagtaaaaaaaaaaaaaaaaaaaagcgttgaggttaatttatacttcaagaggaaatcaagtctttttgaaattgatggtccagatgtccttcattaagtatcattagatccaacgtctagggagttgaaatggttgaaagcattttcaaattacccttcaatcagcttcactttctctgttagacgcaccccagcacgtgcgtagtgaactaacaagggcatttaatatgttgcatgaccgccatgctagcaggccctaacgatccatttgcccatgactgattacagctcacaaaaaagatgcatcctaggaaaaggttgtaagctcccaaactcgcggagtcccgaaagcttgggataaatgttatacgagtttttaaacaagagacacgtggcataattagaggaaaagatttatcaacctcctggattaacaaagatgaccatcatgattcctcccagagatgtcgcgttaatttgggaggggtttaatgaatgcttgaagcaaagagctatctttggcccagttagcatctgtgggacgcagaaggactctactcatccctaaactccaagaaatcctggaacaacagtctgactacatgaaggccaagtgaggactttctgaactggtcacgaacgataactcctacacgaatgtgaattgccacatcagatttatatagaaatcgacgtacaaacagttattcctttttctgatacaaaattagatcttatcccttgtgccaggccatggtagggtgcatacgtacctagggacacacctttttgcctgacgtcttgtctacagagtaatttataaaggagaaacttttaggcaacatgtgccctaatccagatggtactacttaccattcatgtgcactggacgatcaagaaggttcttcaaggccaggcgcttgaagttgtattttcctacccttgcaataggttgtggtacaaaacccttggtgggtaaagggaatgcccttacccacatgtaagcctataaataccaccactttttaagtacaaacggtgaacaaattttatactagccaaattgttgggtattgtgccctaaataaaaccctttacaatctgattagttatcaatatgagaaatttgaagtgatttatgttt

SEQ ID NO: 162627 - DNA, 2400 bp, Cannabis sativa
taagattaattctaatgaacttaagagagcattagggaacagatgcaaacatcggctaccatcttgcttttactaggtaatttgactttcttgttcaaattgatagaatccattctgctctgttgcctatgtttatgtaatgatccttttcggctaataggttccagcataccaccactgcaacatgatccattattcttgtagtcatggtcatcatctaaagtcttgcagccccatgtatacatcacgtatttcctcaactgttaaaacaaacatatcagtcacttccactgtattataagcaaaaaaaagtatcaccacactacccacatacacacaaataaaataaaataaaataaaaataaagtttaatccttaagaaagtagtactttatcccagcgttccagtgtttttcgccgatgtctaattgttcgtaatgtttgatcttcatggcgcagcttttttattctatattcacactacagaagaaaaaatgttggcaaaagctcgacacattgtgtatcataaaggtgacatttctaccatgaagtctaaaattttgcgcaataaatttgatgattcctaataaaaaaagaaaaaaagaatcaaactacgaagaaaaaacatacttgaactagtaaatagaaaaaaatggcaatactgaagcaatacaagccaccaagatctgcaaggaagctcactgcatagtatacaagaaaaacaaaccggctagttagtacaaatgaaactagattacaatacgtctcattttccaaactaagaaccagggttgaaaaaaagccagatgaaattcagtgtaagggagagcatataacttaccaggacccatagtgttttgatcatcgatctccacaatgtaggaagaaaggaaattgacatacaaagtggtgttaagtgttccatcactggggttagctagagatgtttggagctgacgtgtgtcggtaaactgagagccaggaacaaactcgtgaaaaagaggttggatgagcctaaggtcctttagattacgataaatccggggaaataaactgaacttcagtatatttgtatcctttcctctaaaggtaacaggtccattattagaagtactcccattctttagtattccactaacaaaactcacatgtctcttgttggtatgactccttgtagtaaggttgaactgaaatccaacggcagttgcaggattgtttggaagatcaacaaactgccaagagatgtattgattgtcatgaatgggttgacaaccatcacacttgagaataatagttggtccttcactagtatttttacaagagtagtttccaaagtttgacagtggaacacttttatagtcaatagagccaggattgccagtcactaaagtaccaagatctcgtaagtttgaacaactcatactcgatatagtggtaatattaaattccatgtcattaacaaataaggccaagtcaggtgcatttgttgctttaacgttatgcacctcaatggttctcctggatatgatttggtaaagcaacctgagaaaaactgaaaattctagtcagtacaaactcgctagtatagaaaaagagctatcgaaatcccataaaaacaacgaacaattagaaaaatgcatcattaattcgctgtgttatgtaagattccatcaaaaactcacgcggcaaataaaccaatgaagactatccaactagctattgagaaagtgccaccaagttctgttttccgctttttaaccaccttctgatcatcctacacaccaaaggaagctaatttaaaccattaaaaaaacccaactctggactcataacaaaacacacaacattatcactttgtgaaatagagattcagaggttaaaaaaatgttgaaagtggaatttttgtgaggttttaaacgcatccaacctttctaaaatccaggactaagaaatcagatgaggagcaaatacaataacaaagaaagaacacaaccagcttttacttggttcagactgcgatgtgcaatacaacatccaaggcagaaaaagcactttcttgttaattcaatacgcaagaagaattttttacaattgattttcaacagagaaggttgatgaattttctcttctttttcaagaaacaaacacatcccaatgatcccaattacaaccacacgacctttccccagaaagattctatcaccctctcaagatcgcttacaagaaccctctagttctcagttttcatttgtatatatagataaaggagtggaagtcttcacagcgcagtaaaacttctaaccgaaataacggtcttgaattagttgagtcacagctcatcaaatatttcacggtgaacccaaaatttttaaaaattggtctaaaggtttctaaaattac

SEQ ID NO: 162628 - DNA, 2866 bp, Cannabis sativa
  modified_base (2724)..(2731): a, c, t, g, unknown or other
tgttgattgatgttttatgtgtttaagtgttatttttgttctctttttttattattttttttggtttcatttaaaatttaaaaaaacaaaaacaaaaaagggggcacacattgaaaaaattaaataaaaaggggacatattttttcgtggatgatatgatttgagctaattttttcttttacttttttcaatttttgtgtgctttcttttatttttggaaacatgtgcttattgttaaatttgttgttgtttccttttatctctttttcaaatgatctttggttggtatgaattttttttatcattattttttttggagatgtgtctttaattctcgtgtggttttgggagacaataattttttaattaaaaaattgtaattgtttattttctttttggtgatatttttgtacaaggcaaaaggtataggtaagttcatttgtttaattttgtttttagattttatggggtcttggttttgaatttttttcttttatggaaacatttgaccaaatttgaaaagaatttaattgttttctttcctaggcacatgtggagctcaatggtaagaaagaaattagtttttttttttattctgattttgtgggtattaatttctatttgctatatatatctaactacccacatctctctttccttgataatatcttcacccacgttctacaatatctcactctctcattcttttagttttctactagtttcactttttctttttcaattgtgagaaaagtttctagggttctcaagcatcaataaccaaaatcaagaatgctcaaccctcaaagaggattgcatgtgaggtcctcctttgcctcgtcgtcgtcccatcttgcgtcgtctactccagcgactgaagctccacccctatcagctgctccagcgtctctgcgttctgctcctattatcgacaaaaaacgggagaagttgctttacatttgtctttgtcttctttgatagataaaaagggagagaagtgtttttgtgccttgttgtcaactaatgaggggagttgttgtgttgaactcaggggggttgtttgtttgtttgtggtttgtgaacttttctgttgaaaagttattttgttttatgtgttagtatgccttgatgcagggggagtattttctgtactctattgttttttgtttctaacacttaatgtaggtttttttcttataaaatattttgtcaattaaagtgcctgagggggagattgttaattctatttttaacatctttaatgtaacaaaaatattttataattcaattctttaattttggatgagttgttattcagtttccatatttttgtattgattaaattatataagttaggaaatatgactagctcttctatttatggaaagtaaggcataaagggtaagtttgatgacttaaccaatttctatctagccaactgtatatttgatcctttatgagtttcctaaaatgtttgatcagacttcttgtgaagaaaattgaagctagactttccttttctataaaagaaaagtcacaattaatactcatgattctgtaggtacagaacagaaaatttctaggctaattgaagaattttttaggaaagtgtctagtgagttgtggtcttgttcagaccatgtatgagttttcaataaggtgtatattgattataaatataccttatagtagctaggtcttctttcatctttttatctcactcatatctttagaaaagagagtctttgttttgtagagaagagtgtgttcatctctttctctgtgtttatgtattatgtgttgtcttgagtctataatcaagtctacaaaaaaagaagaacaacaatgctacctgcaggagaaagttctacaagcttttgggagataacttttcaagtcttgcctcgggaggaagcaagcactcttcaaggagattgaagggagttcgagcacttaaagtttcaacaatattcaattagaaggtggaatacatcaagcttgtggcacacaataagaggaagtctatttatgtataagtcaattactttatatttttgagatctatctaatgaatcttatctctgagtgtggccccgtaaactagtaacaatctgtaaggattgttgataccacgtacgaaaaccttgtgtgttttattttttgcactgtttattttctagttttattctgcaattacaaaattatgttctgtagctacagaataattattttagtaccatatttactattttgcatttaattatttgattaattaaataataaattaataatattaaaatacaaaattttagaactctttggcaatataaaattataattacagaattcttacttgtagtccattgatatatttaatataagtagttctccctccaattattagttcataattaaaattagagttggtcaaaattatcgttttatcattctaattatctcttaatttcttatgtaccattaattcaatgtgaacagttaatctataatctaattatagattttggatccaattgttagcactctcagaattaacaatataagggaactaatattcgatccttttgaaaatcttggattctattatatgacatgttcccaaccacttatgttattaagctcccaaaataagaattgtaagaatcatcttctctaagaaactttaacaagtgaatcaaagaactcaatgaacacaaatatgagttnnnnnnnnctcaggattcagactgatctactaatgatcatcgttgtgatataaatgactctttcatggtaaacggcgtgttaatgaaagatgataatacatatcgattcagtcatgtataatcaaattatacacagtaccttt

SEQ ID NO: 162629 - DNA, 3377 bp, Cannabis sativa
tacttttattaatcatgtaaaataaagaaatatataaaagaagtgctcctaatttttttagcaagagagaaaaagagtgttaaaagaaatgtgagaaaacttttcttatgtaagtgaaagaattttattttagtaaagttctaaaaaaaattaattgagattctcttataaaattataaaatgtgattaattaaataaaaatagtatgcaatagttaaagtgtacctagtaagaaaatataaaagaaaaaaaaaatatagaataagtgcatgtaagtttttttttaaaaaaaaataataaaaatattgtaagagtgaaaaagcaaaaaaaaaaaaaagtgatgtagagataatgagagcgtgagagggagagaaaaggagaggaaaaaaattgggattatttcagaaatacacaaaaataataaaaaatttcaaaaatacggtttcacggaattttatatatttttacaatttttttgattttatttacggaaaatacggtctttttatgttgtactcttaatttgttgttgatttttttgcgttttcgtgttatttttatgaaaactcgtaaaaaatgtaaaaaaaaaattatttaaacgtaaagatgttatttttttttacaaaaaatagtgccttatgtaattatccccaaaaaattacataatagaataaaaatttgaaaaaaaattacaaaaatacttcaatatggatttttttttttcaatttttactctttaaaaacttttatttacaaaaatacctcttcaataaaaataataaatcgttttttgattgtaataatttatttataattgtatcatagttgtcatgtgtttataattctggttattttgtgttgttttataatttatttatagttgttgtgagattaatttttcattatttttagttgtttctttcacttttactgagtaaaatgtatttcgtaattttaaaactttacaaacgtatttttaaaataaaaaaatttagaccgtaaaattataaataaaatataataaaagagcatatttaaaaatttccctaaaaaaaggaaagaagtgagcaattaactaacattgctcgtaaaatattaactcattttactacaaaccatgctaacatgcgtcaattgttcacaataatttcaagttcaacactaaaaaaagtcaaataataaaaaaatttgctcttaaaatattaactcattttcctacaaaaacaatgctaacatgcgccaactgttcacaagtcttcttctattaatagccaaaaaattcaaataagaagaaaacgtaattcacaagaagcaacgcttatagacttgtgaggatgacttgaccttataccattttttttccctacacttataaattttcctatatgataatgattggatgaaacatctttccaaatgtttgtataaatgttagatttattgaaccaaagttatagttatacacatgtggatgtggtttattatgaattaatccaaacatatgtgaattaattgcttctagattcatgaacaaaaagacttgaacagactgaccaaagacagagtcataaaattaagctaaatgttaatgtttaccaattcaaattacatctcatatttggtgtcttcatcaccttgatttcaatatatacttttaaactccatactattctctctagttcctgcttcctggaatatttataaacaaaagtacacatagtttgttcacttcaaaattatataaatatatagttaaaggaatgtttatgtcattaataagtccttgaatatttcatatatttcagtacttccttcaatttgtagacttttaggctcttgtgtctgtctatatctttttaattctcaatattatatataatttgtagtgaagaatcaaagttggaaagttaccaataaccaataatatataatttagtttgcataatggacaagaagttgataaaagcagctgaagaaggagatatcaatgtcttgtactcagtcattggagagtgttcacaagttttacaaagctttgatgaagagctcttattcattgataaccctttacacatagctgcatttgaaggccacatacattttgccatggaaatcatgagactaaaaccatccttagctagaaagctaaaccaagatcaatttagccctttgcacttggccttacaaaatggaaaatcccgaatggtgcttcggcttattgatatcaatcgagaccttgttcgtgtacaaggaagggaaagcataacccctttgcaccatgtagctatagaaggagatttggaactcttgattgctttcttatcagcttgtccgaaatccttccaagatgtcacgattcggaatgagactgttctgcatattgctttgaaaaatgacaaagttgaagcctttgagatccttcttagatggcttacagaagtatgctatgaggaagtgtataggtttgagaagaagattttgaactggagagatgaggatggtaacactctgcttcacattgcagcatcaaaaaaacaaagccaggttagctctcttcacatgataccaagaataatattgtttattttttttactgcaatgtgaatggttcattctactatacttagctatttggtttacctattatgaaggtgataaaatggctagtaaagtcaaaagtagatgttaactccaagaacatggttggtttaactgccttggatatcttagagaatgaaagcaagtttgagagcatagaaattagacatatgctacatgctgctggagctatgacaggagcctattttcaaactgaatatgcatctaaaatctacttaaggttagactacacaacttgtatagttatgctattcatttcaagattaaaaaacagaacgttctagttgagatgagaactataatctatctctagagatggttagtgttgcattccacttttggtgtcactactattttcatgaataagaccattatcattagtatgaagggatatttgtggtaaaagtaattgttgggattctaacttgaattcctacacaactcacaatgcaaatcaaagagattaatgcggaatgagaatgaaaaatataatgacagaaaacagggtagagcaaagtagagatcaaacacagaatcttttggcaaggttcaccccaatcttttggctacgtccttgtgagctatcctcgggaagtttagctctttcaactataatccaagcttgaatagttacaaagttgtaggagatttcatgtcacattctttgacagataatctctataatctctctcttttaaaatctgtttctcttcactttcttgcatagaacacgaaaagctaagaagttgtttggcttt

SEQ ID NO: 162630 - DNA, 3154 bp, Cannabis sativa
  modified_base (1324)..(1327): a, c, t, g, unknown or other
ataaaacccaacagtaacaaccctttattttggtctaaaatggaagagaaaagttgagtttctcttgggttcttgcttggccgaactaagggagaagagaagagaagaggagctttgcttctattttgacttttatgcaaaacttatctaattaaacatattaatccactaactactcagcaagcacaaggtttttctctacgcaaatcacaaaaagacaaaaactattaaacataggcaaaagttaattttgtcccttacttaaccatgaagtaatttagccacttagggtaaactggttcaaaattataatcccaaataatcccgatattacaaatgtttaactatcatgccctactaattctaagatactcaatcgcatctagtgaccctaatggccaaaatgttaactttctactgttgtcgggcataaaatttacaattcacgaaaattcacatataacacatatactgcacctagcatttaaatatatctccgtaattgagaaactatattcatatggcctatttctgacaataaaccctatttctactaagaagcacataatcataaattaataattaaatccttgattatctactgattctcatgatttaactacgcggtcttacagtcacgtatttaccccattagtgggtcaggtttacatgcaaagcctagtgggtcacaaatacactcgaacccgattactagcctatatatacaaccttataccctcatgcaaagcgttgaaaaattattgtataaatactatagcaagaagccatgattcttaagcttgcaataatcctattatgatatatcaaggctatttagccaaatacgattgactcgtggactagggttcattaatactcaaaccacgtaagaatctctaattctactatctattagtttatttagtctctcaactcttattttaatcagttttcgaaaatctcaataaatacacatatatataatacaaatatgttatagtataagagcaactccaatagtactgcttttaaagaatgcttaatgacatgaatatatttttgacatcttttaatagatgcttatcactcgagtaaaaagaagggaaattttcaaaaatactatttttgttactttttatttacacttttactgctttatttatttacaaaaatatgcctataaagttttaaaattaccaaaatacactttgttaagcaaaaagtaaaaaaaaaataactaacaataagaaatcaacctcacgacaactataatcaactataaaataaccaaaaataactcatgacaactataatacaactatannnnaactataaaacaacaaaaaaaatagtttattgtttttactgaagaggtatttttgtatgtaaaaaaacttaaaaatgtaaaaataaaaaattttccttgttgatatattttgtaatttttggtctattatgtaaatttttcttaaaaaatgttaagtaatgatgcctaaatatgattatcctttattataaaaaaaattaaccatttaatatatataaaataataatataatattattttaataattttagaaatatttattatcggaatattttaatataaaaatgtcaaaaatatatgcaagaggaataaaataaaatattatattctttattgatatattaagttttaacactcttatgactcgtttggtacgccgtataaggatcatattgtattaaataataaataacactatgtttggataaagtaatgtattgtattaattattacgaccaaaatttttaatacaatgtatgttgcattatttaatacataacaaatggtctgtattagcttgtattataatatttacaaaagattgggggtcaacaccaatctccgtcacggaccccgatccagatccaaactcgagacctggacctggacccgaacccagacttagacccaaattcagactcagaccgtaacccgggatccgaacccggacccggacctgaacccggacccggacccgaaccgtagttggtgttggggtcgagtgtattaaaaataataatttacacaaattattattacaagtaatatcaaacatagtattgtattaaataatattaatagaatataatataatctaacacaatccaatacaatacaatccaacacaatacaatatcccaataaacctttaatgagtgtcagagatgctctaataacccaaaataaaagggtggtaaaaggaaggttaatttattctctcatcaaactaaatgaaattaaaatatataaaatcgaaaataaccgaaaatatataaaatccaaaataaccgaaaacaaagctataattaacattctaaaaaagtttagctatcgaattaaattcaacatatctcgacatataatcaataatgtgtcaacttttgaacaaaaaacaatcaatgcaattaataaagcgcgcggtaccgtcgagaagattaggagagaataatgcaatattaaattaggtatacgcacaaattaagacacgtgatgctctcataatataaatattagaattactcaaagatattattggtccatattacttttttttggtattatattatcattgaaccaattaaatattaagtctcatataatttaaaaaaataacatagttaatcaatcgtgaggtgttatcgaccttaagggtaagcgagtcaggcgtgggcctcagctcccgaacgctcaaaacttcgaaattgtaaaaaaaaaaattattaatctacaaataaaatattaaataataagaaaatataacaaattttatttggtgtagtggtaaaaagtcttacgctaagaggtcaagaatcaattctcaaattctaattttcaatttttttttaaaaaaaaaatatttaatgtgtagctataaaaaattgaatcttaaaactcttaagaatattaaacaactgtatcattacactaaattactacaattattttgataataactaaacaatatatataagaactctagcgccacctatagagtactgggcaccactaattaatacttaataacaatcttctataaatatataatatatatatatatacatatatatatagggatatgattttgtcccgttattgtactttcacgga

SEQ ID NO: 162631 - DNA, 2359 bp, Cannabis sativa
aacacttattcaaaaaaaaaaaaagggtactcatttaattagattaccaagccttagaaacatttggctagggatgacatacattagacatacatgatatagctacttcaaacactaaaaggaaagtttttttttgccagtagttgttaataaatctcaattaaaggtggaataacctctgtcaaagtgtcaagatacataaaatgagaggaactgaagatttagttagagccaaatcatgatctaaaataccactatttgacaagtaaaataattttaatgttggaattgaataggttcatgagaagcacacatagttatgctgctcactttttcttcatcgacctgttaacaatgaaatcatcatcggaagtgtcatctgagcttccgtttccaatcttccgcttctttgtttgcttcggaggagctttaggttctgtttccttcttcttaatggaagagattggggtctttttagtcacattaccagcagcagatccagtattcttagtaggttttgtttgggagctagtcttttggtgctgagttttgttttgcttcttctcaaaagctttcttagcctcctcttttgaaagcaagccagactccatcatcctacaattaaattaaatatatacattgtttcaagaatgaaaaaataaaaaagaaaaagaattcgtgaataaagtgcaaattagaaaactgaccaaagatttctattgcttggcactaaaacaaaaagatagtaatctacattgcacaatacatgactgacactgaaaactgaccaaagatttcttagcatatacaatttgaaaaccccaaatgttaaatctgtataacatcagaaattattagctacaagaataaaaagaaaaactttacacatttttatctcaacacccggaagaaccgaattcaaggtataagtaaatttgcaggagttaaccaaataagctgaaaggttttcgaacaaaacaagctatctcatatcaactaaccagaacagtgccatttcgctattaggattttgtttgaacagagtttcataaaaaatcctcaacgggtccctctgaaagagaaaataaaaaggtccaaaattcaaagcagaattagtcaaactacaaaatttaattatgtatacaagcattggcagaagaaagaaagagaaatactatacctcctcaggagggtctcgcttctgaccaggcaaatcataaaccttcttcactttcttcttcaggtccgtattatccactgtcactttcttcttctggtccgtattagccatcgtcaccttcttcttcttcttcttcaaatccttcattacacaaagaaatgaccatataccgttactctcattgttcatacaaatgaaatctattcagcatttctatataaaaaaagggtgagagaaaccttatcaggcttattggtggagaccctcctgagaggcttctcttcatcgtcatagtcgtcgtcgtcgtcgtcgtcgtcctcgtccttctcctcgacattcttttccttagtcactttagctccctttataaccctattcaaacaaagctcgccatcgccatcgtcctcctccttctcctccacattctctttctttgtaaccctaattgatttatcagaaccataagagtggggaacatctttcttcactttatcttggggtttgacagcacaagttccattgttactgctaacgggttttctctttttgaagcccatcgagctcaagcatatttcgtcgtcatcgtcttctttgcattccatttcctctttcttcattacggtcttcgaatcctcagagggcatacttccgattaccaacaaaagaaaaaaagaaaaaaaaactcaatctttttcggacaagaaatgtgaaaatgtgaagataaataactgagaaacaagggttcaagtaagccttggttgtgaggttgggagtgccgttgtttgttttgatttgttctgttctgaggaaccctaaacgagagagtaggaaggagattgaaggccagggtagctagctagccatggtttctgcgtttgttcagataccaaagaaccagtaagcttgaagcttcgttcccattggtccttttgtaggctgagtcgaactacttgccagtttgcccaattgaacaataacatgtcaaatgggtccattttaagaaataattgggctgggcttctttttaattagcttcattcagttaaaactcgagaaatttacactttttttttttggattatttcaaaaaacataaaaaaaaaaaaaaattacaaaaatacggtttcaaagaattttaaatatttttacgattttttaaattttatttacagaaaatac

SEQ ID NO: 162632 - DNA, 2550 bp, Cannabis sativa
atatagcccaaaatgtctttattgattgtgtgaatcttcaatctttcacttacaccagggcctttaatgtccatggacttcttaaatttacgaattgtaacatgttgaagactttgctgattgatcgtaccgaaattaatacagccaatgcattagatgagtaccttcctcaaattccctttcttgagaatttgagactaataaattgtcatttaaatgagggtgttgagagtgttcaaatctctcattccaatcttaagagtttggtggtgaccggatgctatagaatgcgcaaggttgaattcaacacgcccaatcttcggtacttcaaatattctggtgggatttttacaatctctaaatttagatactgttctgggttactcaatgtcaagctcgagttgtacacaggttctcttgatggcacagagtggttttggtttgttaggctgagaaattttctcgaaattttcagtgactgtggagcattgaatctgtcttttcacttagaggtaatattgattttggtagcttttgtcttattgttagaatccaatgcaacttcatgtatctatttttttttttgtgtgtttcagggatttccagaagaattgagacactatgatatgcttcccgatccgttttatcagctgacgcatttaaaaatcacgaataggatgttcccaatttcacaacaggccaatttcttcaatgcgtttgtagagcttttccctcatgtagaaaccttttctttgaaggcaattgattgtgaactcaccattaaggtaccaatgatgtcttgtttttataccttaaacatatgttgatcatgttgatggatttaggaatcataagttttctatatgaacatgtttgtatacattggtttctagtgtttaatgtgcaaagttaacaaacaagttgaatcaaattttgacattgtgattaacttatgtttaatcttttactacagtttgacgaagatggaggttttaatttgagctggataccctttattcgtgcctcaactaccgatgagtatgataagaattttcaagaaatgaaggattgcattgaaacaattgtgaatgtgagccaattcaattatgtagtttccttcaaattataaaaatttagctcctgtttatatgttttccatatgaatttgctaaccatgttatttatgtttcagttgcttagttggacagaggaaaattattcagaggaggaaaactgtgcagatgaatactctgagatggatgtaagtagttttggactctgattttgattttaaattcgtttttatcaggcaaattaatctggatttgttttacttttcgtattcttttgcttgaaatgtaggtagaaatgtcgtgaaacgtttcgaatctgcactttggacttgaattcaacttaaaaaaaattcagtgaatgaaactctaatgagaatttttcctttaaaaatgaaataaaattgtcttcattaatatagcagatgatgttatttcaatacttttcaaaaacaaaaacataaatgttgtcattttaatatggaaatgaactgtgttgatatagtttttaagtttgatttggtcaaatctgtccattttccctttcccactgtacttcaattttaggcttgaataatttatttgtattttctccaaaaatactgggtagaagttagttcgaattccaaaaagaaaaaaaaaacattttagaatattgagaaatgctagaatgtttctcaatattccaacttttccctaagatgtgggtattttttgcttattgatcttggacgatctcgaatacaagcgatactttggctcattattattgaatcacaagtaatttttttttactaaagtgagtgtatgataaagtgtatggatttatttctcaaaatcaattggcaatcagaaaaatagcttataaatcttatatatggtattatatttttacgcattagcaattgagactttttaatatcaacaattaatagctattgatagccaataataattaattgatgatataattatcatattgtcaacacaattaatttgtgataattttaaaacaaattaaccaaaaggttagaattaaaaaaaaattatgcactaatttggtatagattcaaaatttaacactattaatggtgtaaaatttggtgcacgccaatttggtggtgtataatttagtgtttccttagagtgaaaagtgaaatggtgtgaagatttttatactaatttagtggaataatgcaatattgaaatgctctttcgacaatttaactaatataatgagctttagaatagaagcataactcaacaccactagtaataatatgtagagaagttgtacttttaattttttattacaattttttagtaaatttttttgcttgaaagcacatgttgaaatattttttttttaaaattttttatggcattattcgttatagttataacatcatctttgtaaatttttgaaaaattttaaaaaatttacagtgtcgaaaataagtttgaagttttttgaacatgc

SEQ ID NO: 162633 - DNA, 1261 bp, Cannabis sativa
agggtagtttttgggtttcctgtttttcccccccccccctctttatgtcttcttctgtgaatttccttctaagcctgcataacatcctccaataccaactcgagtcttgttttagagtgtgagaccagaaagaaacatcttttaggtatattaggttgacccatttaacccaaagaaggtaatttttctccatgatagcgtagatatacttggccagcatagcatgattccacttggtgccttctttgaaaccagtatagcatgattccacttggtgccttctttgaaactaaggcctccataagctttcgaaaaacaaactttctcccaagaggtcatatgtatcttgcttctctcatccttagttctgcacaagaaacccctacataatcttttaacctctttagtaacactttgaggaaggacaaaaatactcatccagtagtttctgaggccaagtagaatagtgtgaataagttgggttctacctgcgtgagagaggtctctactagcccatgtgtataagctttgcttgatttttgagatgattatcccacagtcttcaactttccattttgtaggccttaaaggtactccaaggtacttcaaaggaaaggtgccctcaacaagagacaaatcagcaataatgccttccttctcagtattactcactccaccaaaataaatgtgagacttttgaggattaatgagaagccctgtagtattactgaactcatctagaatagttttgacgactagaagagattgtcttgtccctttactcaaaattatcaagtcattagcaatgcacagattaataagatttaagcctttgcacaaagggtgatacctgaaattggagtctttagtagtaaactggaacaactgggtcacgtattccataatcaagacaaaaagtaaaggagaaatagggtctccctaacgaaggcctttagctccttcaaaattgccttgaatctgaccattcataagcaaagaataggaagtatttctcacacatatcatcaccctatccacaaactttcttggcaggttgaaggaaataagcacatcctcgagaaaatcccagtcaactgtattgtacgctttgctaatatcaatctttaaggcacaccttgaagaggagttctttcttctataatttataaggaggtcttgaaggatcatctgttggaattattttaccaggatctagatttactcacaagtatgtttcattaacatcctaatatgagatcgg

SEQ ID NO: 162634 - DNA, 1856 bp, Cannabis sativa
cccggttgcccatctctttttctaaccatttgatgtggcccacaaagagaagagttacctgtagcaagcgtcgggctcccataattgccctcaagtaaaagaggctccttaccaattaataactgaggcccaatagctgaattgttaaaagcaaaccgagcggacccatcaaaatctttactcaacatagcctgcccattcaaagatagagtcggcccaccaatacccggcccactaaccaattccttttcttgaacattaattatagccacgtcagcactattcttttccaaaagcccatcatttaaattcacattaggcccaaccgaactcggcccaggaaccaagttatttaccccaacgttacaataatttgaatcctttaaaccttcctttgaccggtcttcttcttcaatcctcaaagtagtatactgaacaggtaacttttctggactttgaagctttgtgtcacctccaatgcccgaaatagaacctcctcgcacagagccaacaggacgcttcttgggatgccacttcatgcgcatgggtttatcgagattgtcagcaacacgagtagtcaccatcgacgaccgcctcgatcgatgactatgatagacctgtttacccttcggatcaacggcaccctcagcagtggtcgccggtaacagagggagactccccgaattcttccccagggcctccgatatagcaccacggaatccgaacgagttaggcccagaaaacacgtccaggtacgttgaagagatggaaagccaaggaccatacatcggagactgaattcctttactgttgtcgaccataaccggagaagacaggttacatcccctccgttgatgtcccaaacaaccacagaagtaacaaaagatgcctattttttcaaactttacttgaacccatttctttacccctgttgccaaatcaaaaaaacaccctgcaaacagaggcttgttgaaatcaatatccacctgcactttcaagaagttttcccacaaagctggtttgtcttcctccagatcagaattcaccacctttccaactaaacctcccaacaggttgccattcgccactgaaaagtattcatgggggaggttatgaagttggatccatacacgcaagagcttgaacaccaccagcccattagttgccggagtccaatcttgaagcacaagcgtataccctcggatacaccaggggccattaaccaaagcccagttcctatcttcggccgagtcaaagccaaatctgaacacattggatgctttcgagacatccaccatcgccacaacagcaacatgttttttccaaactttggccacaaagtccaaaacagaagactcttccacaaccataggagcaatgacttttccataaagacaacaagaagatagagccttgagagatcaaacacacggagacaacttgaccgaagtttcaaggcaggaaaaacacttgcctttaaaaggagattcggtagcattaaaggactccataaatacctgacagaaagcagacaaaagaaacaaaggaactttaagaatcttcaccaacccacacgacacacagaataaacaaaaccaaaaggagccacccaaaaaggactaagcacaaaccgccaaccacacactttacctcataaccagaaaacatggaataaaaccaagagtcaactcaggcctagaaccaacgaataaacaaagagaaacaaagacaaaacttgagacaccaggagttcacaccgccatacaagcatcaaatcccagctctctcgctcacactctctctacttaccatttcatatacatatgatatggttggaagttattttaccaggaact

SEQ ID NO: 162635 - DNA, 1460 bp, Cannabis sativa
  modified_base (1433)..(1434): a, c, t, g, unknown or other
ttagttcccttatagtgttaattcattcttcattaatcgagtaatctccacttgagaatcgttccattgcctcgtaacaacttcatgttgttcaatggatttgcgaagctcggattctaattgctagattctttgaaggcctctttggtgagccaagtgagacagaagagatgcatgcagtaaaaataagtcaggaaaagggtgactaaaaggaaaagtacgaagttaaaatacaaaatgaagatatagactaaccgaaagaataaggtttagacttctctaagataaattctcgaagtcaccattattaaccaagtcccattcatcctgttgaaaggatttgtaatgatgccaacaggaagtagcaaactgcgagcaagcttgcgagcccgtaatgcctgcagaacttggcagggggcaggagggctccaaaagcaccatcttaggttatgaactcgggaacttaacctataagacttgttcattggtgctcgcagcagctggaactggggaggttatttgaggcgttgttggctcaataaccatctgagtcaaggcacgtttcttgttggttatggtttttcttgatctccttaacggttctgggttcatccccgaagaagtttctgaagcagcaactcgcttcttgcctttcttggaaccagaggtggaaagaagattttcaaagtccatatctgcgagacaaaagacaaattgtcaacacttatgcaaaataaacaaagaaaatgtggagagataatctcccacttaagaaaattaccttagtcatcaatgaggaagaagaactataataacagctgaactccctagaaccagtaatcatataaaggtcaaagacatttagtggagaaatatcccaatctggatggctctccctatcgaagttagtgccatattgtttggaaatttcgaagtacgaactattatagcttaattgaacatggtgcttggggtaccaactatcaaatctatgggctatgcgatctacacaattctaaatgaaaaaattgtactgactatccttaaatttaactaaggtagtggactcaaccctaattatggtaggagaccatctacaaataccaaagttattacctcaggaggcatcttcttcaatttcccgaggggttatgtttctcaaataatgggtgtgagccacgtaatccctatcttcctcatcagtaggcactagaacctgcttccagtttgaatactttgagactctgaagtctccagtgtattgcttgctaccaagaagattgcaagtcttaaagttatcctcgtgtaacaaaaagtcagcagctcgtaacctgaaagggagaccaagaagaatcctatgtctcctttctatctctagagtcacaacgggcctccttgttgggttttctaccctaaataaaactcatttcaanntaatcagatttgcttattaatataga

SEQ ID NO: 162636 - DNA, 2180 bp, Cannabis sativa
  modified_base (2149)..(2154): a, c, t, g, unknown or other
tataacaaacataacggtctaagatctcttcgtatcccccctttttgtgagatatatttcacttatcacttcaaaattacacacttatactatctcaatctctacacccaaatttcaatacaccatttatttcttcctcgctctcaccacataacaaactcccactcacttctctttttacaactcactatttctctccacacacacctcttctactcacacacacaacaacacacacatatatatatatagagagagagagagagagagaaaataaatttgggcaccaagacatttcaaagttttctcaagaaaatttttcaaaacttggtcatcaaaacttttcttttcacacaattaataattatttaaaaaaaattacaactttacaaatttaaataaacaaataatttgatttaaactcccacaagacaaagtttgttcttcatcaacccacaaaattagccatgcaattaacgtgtacatatagctaggtcttttcctttctagtaaagacaaatgtactaataatcttgtgtaaaagagactacttttatgtattgaaatttgaaagaactactctatgtaacaaatgataaccaaaggtaaaaaattcaagtgatcttgatatatacctaagcttcacttgattctaatttctaataactcttcttcggtgagataattcaaaaagttatttcaagcaaaagaacatttcaatgaccattttctaggaattaaaacatacaattccaaatacacaatacatatatttattctaacaaacactatgcactaaataaaaatgaatattgaattacatataagataggaaaattaccttattatcaatatacaagttagcacattgttaattaggaaatttacacaaagcatctaagaattatacttttttactttcttacagattattttttttttcgtaaaacaatgttgttttcacattgtcataaaaaaaaaggtaaaaaaaaaactataaatccgtaaaaaagtaaactttttgtcaatttttgagtatttatgaaataatcccttattaattggtatactcaactcttgggcttttattcatatggcccatattacttaatatgggtattatacagaaaattactaacaactaacagtttcatcaaatgtgttacacataataattatacataaatcaatgatatgtgcacaaaaattacacatgaatcaattgaaatatatatattgtaaattcactatgttaatatttaggtaaattcttagtgaatttttcattgcacttgtacaaaagtaagaataagacttttttcagacaaaaaaaaaaaaagaaaaaattgtaagaataaggtggttgactccatatattttaccaatgaagggttaaaactacatttgcacacagttgcactgaaaatagggcacgtcagaggttgaacggctagatgttgtccagctgtcaaatgggccccacatgataatgaccactgacttttaaataatgctgggcccagattttgggagaaaatcagggaagacaactccagccatgtactgggcctgaaaatgactcatcgctaaagagttacgttatggacccaatagtggtagtagtgactgtcaagtggttaaaactttcccatcaaaggtagggccaactcaaactcaccaatgccttatgggcccccactcaactcaactataccttatgggcccattttggatgatcttttcaagtgggccggccttcaattattggcatctttcggctgtacagaagggaaagccgactctgttctcaagctgcctagagtatgtctgctttgcaaagttttctgtcgggttgagaacgaccgttttccagataaagtgggcccattataatgttattaatgggcctaggctttgtaaagtgctgttgatgaagcccatttatgaaagcccaatgcttgcttctggtttgagcattacacgtttttattgccaacaccatcattatgcccattctgcattttctctccattattgggtaaaaagtaaaatgcttctttacttttttagcacacagatttaagtaaagtaaatattattttgtatcttgtgttttgcaaaagttattaattggactatttgttttgtnnnnnnacaaaatagaccctgtattttttaaa

SEQ ID NO: 162637 - DNA, 3271 bp, Cannabis sativa
tgtgggacaatgtccacaatagatcaaaagggcgtccaggctcgaaagcaccggtggccttctgcgtcctcgagggttggctgaccagatttgtgtcttttcaaggaggttttggagcagacttttgtggggctcatctacctttcctttaaccttatccttgcgaggattcgaggttttaatctcggtttccttgtgagcacgctcttcggcaattactcacaccaaagggtcatcgtcaaactccaccaagtcctcgaacttgttttggaggcgttccatcattctctttattttctcagtgatcttcttttgttctattaactctgtctgagtagcctctagttctttggtcgctcgcaacaagttcgggtcatggtcatagaagtaaccatctttataatacccatccttcacgtaaccattgtcgtcgtcctcctcttccctgtcttcagggttttggtcatcatcgatgccatcgaacacgttctcaacatcctctcttcggctcttagcgctggttgtaccttcttttcttacaccacttggctggagaccggaggcgagggagtctgcctcctccataacagtatctagaggagttttcttgcttacgttctttcgagtgttcaccataattgaggtggtgcagcaactagcaaacttttctctactctcaatgaaagcactaaaatgtttacccagatttttagaaaccaatataacagagcttaagaaagatataaaatagtaaataatagacaggtaatttttacttggttcggacgttaataatccctagtccacgagtccattgtattagccttacaggcaagtgtttgaatattacaagtgtttacaatataaactctagctctgtattcctgctatttttcttgaagaagaagaaacctagtatgaattttagcagaggttcggtaagtatgaaattgttcacctctttcacatagaaaatgagagtatttataagcttacatgtgggtaagggcatcccctttacccacctagggttttgtactactgcctgttgcaagggtaaaataatacaactggaaatctggttgtccgacattgaagaatcttcttgatcgtgcggtgcacagaggtagtggctaataccatttggataaaagtcacgtgttgctcaaaggtttcttctttccggaatatcctttagacaagtcgttgggcaaaaggcatgtctagaggtgcgtacgcacactactatgatctggcatgggagacaagatctgatcttgtgtcaaaaaaaatgtaaccgtatgtaggttgatttccatatggagctaacgtggccattcaccttgagataacgattacggtccgcaaccaatctgtagaagtcttcacctagaagtcacttacttaagttgtgttccaagacttcttggagctagggacgaatatggttcttctgcgtcccagagatgctgcttgagttggggatggctctccccatcgaatatccataaatctcctccgagattaccaagatacctctgcgaggaaatttggtagttaactctgctagtccgggaggttgacaaatcttcttttctaatcatgccacgtctctcttactggaaaatacggataacacctatagttgccaaaatacaaacatcatcctaaaatattttttttattttctctctcatccatataagttttgtcatcttctcttaaaaaaaatactccaatggttgacaactctaaaagttgtccactatggtcccacatcacattgaattaatgactttttaggttaaaaataacttttttaataaaaaaattaaaagaaaaaaaaagaaaaaaattatcatgtgaccattgtctatattgagcaacacttaacataaaattactcttaaaaattggaccacattgcatatgtagcaagaccactccaatggacaactcccattggagatgctctaaagagcttcttcttcctctcaggtacccagatctttctccacatttcccagaccgaaccctcaagatggctctcattgttcacgaccttggatagaccggtatagttattgtttcagtgaattttagcgtgacaaacaaatgggcaaattgggttatggttgacagacgtagtcgaagaaggaatttgcgcccaccactcaacaagacaaactaatttacaatcttattctcagattttcaatgttatcttattttggcataaatctattcatgtcattgtgattttgaaattgtagattttaaacattcatcttcttctatattattatttcgtttaagattggattttttttaatgttcatgtttttttatgaataaaccatgtatatagctcaatcaaagaatacaacagctgagatacacctcaagcttcaaaatcacccatttacatgttcaaaaacactaaaaccaactcaactcttgattctgacaacttttcaaacttatgcaaatcactctattataaatctcaaattgaatcttcttaacaaaaaaattttaatgttcatgtgattgatgtgttttggtatttatttagtacttttgcaatatatagtgcaattatataaaattacttttgactaaataatatttttaatttgtctaatattctttttttttcttattttttttttcttataaggaatttgtctaatgctcatgttgattggtgatttgtttttttcctcttcattttaagtttttattttattttaaattaaataagtaaataatgttttgttgtcatttgattaaaaaagattaaagagtttagtcttttattatttttaaaaaatatctattatattatagtaatattttaaaatatattggaaatttaattttaaaattaattaatattacatttttaaaaatatttataactggtataagtctaatttttgtgaaaaagttaaaatttttaccacaaattcagatattatagttaaaaaattcatgtaaaaaattttaaaattaaaaacttaaatttagaaatataaaataaaaatctatatagatatcaattgctaaaaaaatcttgattaaaaaataaatttatttaaattacataatttattataattactgcaattctaaaaataaaactttatcttttaaaaaaaataataataataaaaaacaggggcggacccacattgtagcgagggggggcagtcgcccccctgaaaaaaaaatcgagaaaaaaatgtatatgcattttaattagttacaa

SEQ ID NO: 162638 - DNA, 2146 bp, Cannabis sativa
  modified_base (2064)..(2092): a, c, t, g, unknown or other
gagagagagagagagaggtgaagtggggaagaagaataccccttcgggtcttatttaagaaaaaaatttaccagcgtttagttatgtcgatgaaagtgtataatgtgccaataaatctcaatcaaaaaacctaaaaattaaacgcactgttttatttagacttttaccagcgcatatttacaccgacaaaagttttttcacttaccaaaaaagtaggcaggatttttcccaccttttttggatttttcaagctcatatatgtactggtgaaagttactaggctctctagaaacaaaatagcactcatgaatttccccaccaaaatggggcaaaaatcctaaccaaaatttttccgccataaggcggttaattttgttagttttactagcgcagttcatgaattatgctgccataagtaacttttaccaatgcatatttgcgccgataaaagttatagcagaaaaatttgtctcttttatcctcctcctattgtcgataacttttttcggtgcatttgacaatatacgccggtaaaagttttatttcttgtagtgtttgttctaaattttttaatcttcttaccaatttggttctccatgagtgtcttccaatctaagaatattttgaaagcctcatccttcattttgaggaactgcacccatgtcttccctgagtaatcataaaaaaatgctcaaaaaatagttttctccaccaaaacttgataccttggaaggcccctataaactttgagcgtatgtaccttagtgcttcttttgtggtatgtacactaatattaaattttagcctgcaagtcttgccataagcacaatcgttacaaaattcaagttcgccacttaactttcctttgaaaattccttctctttcaagttcagttagccccctttgacttacatgaccaagtctaaggtgccatagcttagttttaataaggtctaaatttgatgagatagtgttagcactttcagttactattttaccattcaagaaatataaatcatttttgaattctccagtcatgaacactaaagaacctttaaccacctttaaggacttatcatcaatcttggaagtacaacctctctcaatcaaaactccaattgataataaatttctctttaaatcaaggatatatatatatatatatcatattttgtacttttcttttaacatcatcatgcaacttgagctatattgagctaattccctgaattttataggccttgttttaacctagaagcacaatgccacctttcttttctccaagatctcaagatagctccttctttgggcacatatcaaattaacatcaaaattcaagcacccattcttggcctaaattcacatttgaaatcaccaacacattcacaaatttataaacatctgacaatatatcagttacacattttcatctgcctttgttgttgttttcccttttgagtttggctttcgaagacaaacattcatccctaaaatgtccatctttcttgtagaaataacattttttctttgtgtttcctcttgaatctccttttgaattggatcttaacttttggttccccttatcccttgttttctctattctatggttttcctctcacaaatagccttcactattttcatcttctttgtccttagttctcttctatatctacttagaacccagggaaaccttcacttcggacatggtcaaggttttcttaccatacaacattgtatcaataaaagatgtatattttcagcaacaaactcaacaagataatggcttgatctttttcttctagcttcatgctaatatttcatagatcaagtataatcttgttgaaatcatctaaatatcttcttagatctttactatcatccattcttagagtgtacattttcttctagtatagcttgtcagccatggactttttcatgtatatggaaccaaatttgttccataatcccaatgccttgtcctcactgaagactctctcaaaacttcatttcccaatctgagaagaatcgcatcatgtgcctttgtttctgttgggttttatgccnnnnnnnnnnnnnnnnnnnnnnnnnnnnnatttacttattaatatagatcaagatcggaagagcgtcgtgtagggaaagagtg

SEQ ID NO: 162639 - DNA, 2612 bp, Cannabis sativa
  modified_base (116)..(117): a, c, t, g, unknown or other
aggtattatttgctacagtttcctctatgtttaatcctttttattacaatatttacatcaatttggaactcttcaactaaaataaagcattcctgcaaaataataataataataannataataataataataaattaaagcatatacgagattatagcatttgaataataattacaaatgtaattgatggaattttcttaattgaaattgagtcattttcaaattgtcaaaacaaatatttaattatcagtaagtacacacgattaaaacgcatgtccatcgttaattactaaaatcactttgtttaaaaaaaagaaacgtatttcaagttaattaattttataatttgggttattttggtaagttttatataagttattatataaatatagattgcaatttaaattattttattagttattatgtaaattttaaatacatgatttaaattgttctgtatattgttatatatgagttactatgtttgtaaaaatatattaaaaatcagctttaaaatataaacatataaaaataaaaagagacatcaaagtatcaaaggacgttctaaagaaattatataaaagtacgtgcgtaagacaaaaatttcaaacttgtatgagttggatccaaccaaatgcaagatgaaacaaaaaaaatacaaataatggatcattaaatattcaaacctttcacttttaactagtaaataaagaaatttgaaataatagatcatattttcaaaacgtttttttgtaaatatgtattttttgtaggtttgggtaatttttatttgacccattttggtaaatgcaaaaaaaaaaaaaaaaaaaaaaacaatcgcaatatagcgcgaggaaatgggaacaccacctcaatgcattcaagaaccaactatggagtttgggtgctccgatttgaatctctggcaagaagccctatctgcttatccttcccgcatacaatctctcaacaaaccccatttggtttcgctagatgactattaccgcaacgaactcccacctctcctccaccaacgaaaacctaatccttacatcaccacctccgagctctcaaagctcatgcagtggaaacttacccgtggaaaatggaggtactctctttccctctttctctctttctataggtatactatatatatatatatatataaagttgtgtgtataaatcgaattcataggccgcgtctgttggattttgtttcgggtttggacgatgacctggtaaaatcagcatcggaaaaggggtttcaatctctccccaatgtatcgaaagctctatctgagcttacggtgctcaaaggcgtgggtccagccacggcttctgcaatccttgcagcttacgcccctgatgttgcgccattcatgtcagatgaggtcaggttcatattctggttgggtttgtttgttacctctttgtttatttatttaatttcatatcatataaacatggttttggtaataaaaaaaaggctatggaggcagctttgggaaactctaaagattactcggcgaagcaatatctgttgtttgcaaataaattacagaccaaagcaaaggtcagtgaacaaattaattctttatctacgggtcaatgctgcatagttgatgagctaggtattttgttcgtggccatatgaaagaatgatttttatgattcaaaattcgaactagttacgaagacttattttttaagtagaaccatttatgtgtgtgattgaggcttatgattcaaatttgtagaaagtgcaatcctcctgtataagtggtaaaaaggggtaaatttagttgccaacttatgaatacttatggaggatgaggcatgttgacatgttgtatgacttgaagttctaatcttacaaatacaatcataattaataatttgtaggttcatcttaattcaatttaggatgagtacatgagaattgacatgtatactaatgagtaatgaactaataacaacacacaggagttgagttcaggagaagagagcttcacaccatcagacgtggaaagagctttatggagctctgttgtagcggaaaagatgctatcttcacagtcaaagtctaatgaaagtaaaactttaagacaaaagagaaagcgttaattttgtaattccatttgctgacttcaacttttataaatttgaactcttaggtggtttaatgcttctttctgtttttttgccaaaacagtggttcaccaactgagtttaattttagtgagatgtatttttaaaaacaatggttcaaaatgttagtgatttatttatttttttgatagttaaatgttagtgattatatatataatttgctttggggaattatgtgtcttgccccatcggtgggaacaaatctaatggtctattgtattcttgatagagttttggtctaccgctgtattttatattttattttgggggaattatttaatatattattttatattgattttggttgtgatttaagatttttttctaacttgctatgtagattttggtaaaaatacaaaaaaaaaattattttaaagtaaaaaaaaaaaaaaaaaccccttttcattttttttaattcccaggttaattttttttttttt

SEQ ID NO: 162640 - DNA, 6413 bp, Cannabis sativa
ttattattattattattttgtgaacatgtacagcactacatgcattattatttcaagtgcaaagtagcatggtatggagctggtagcatatgcatacgcctacaccatacttcaatttgaagtcaaattatgttacgattttttaatatactatatttattttattttattattttttttatgttttttttatggaaaggctttttaatgagaattctaacatcttaagatgctaagtattttaataggagtgatatactgctattgatgtattttaatattaattgttgtatattttgatttaataataaataatataaaaaattgctaattagttatagagtgtcacataaatatattgttaagacaattaaataacaattttatttttaattaatatactttatcattgacataacatgttccttgttgttgtcccttacgctatgtttggtaatgagggagagtaagatggatggaaaattagaaggaatgggttgtaggagggatgcagatctcctttgtatagaaaaaatattaggtgtgaagttaaagcgatggatagaaaaaatattaataaaactacaaaaactatccttgtgaatatatattgagtattactattagttatcagtggtgtttagcatcttctcgacgtgtcacgttgtgattggctagcgatacgccctaaaagctattatgttaaattatatgggacctgatacttagttgaaccaatagcgatattgacacataggagagtactaggcaccactggtaccctttaacatttctcatatatattagtcactttttagaaagattaattagttgtattatttttttttcttttgtctttttctaccatcttccaaaattaaatggattggaatttttttaagttaagagggagaatgtctctctccatccatctctcatcttcctcttaccaaacaaaagatttaatctctaccaaacatagcgttagggtttccattataatatttttgttacgtatatcaagaaagactcaaactttgaaataatcatagtaattacaaaacaataaccatgatttttaagatatacaaaagattataagaaaatatcacttttgcattaatttgaaaaaaaagaaaaaaaaaaaaagccaaacacctcaaaactgtgtagtgacctttaacatggtaattgcatgcaaagcaaactatatatacacaacccatatttaccattatatataaatatatagatacaattattatatagttatagcttgttttttattataatcattgttgtcgatatggtcaccttgccaagtccaaacaatgtctttcaacgccggtctaacgtcttcatcacaaaacttatcgtactccaaagtatcgccggccgatttcgagaactcaaccactgagacttccggcgccacttcaaaaacctcagctgtcacagaaagcttaccttttcttccctctgaagctccctgcaaccttatctggaaatctttaagcttagcaaccttaaagctcaaacctttagccacaaactcaagcttcgccattattgtagtcgcggaacactttgacgtgaacatcgaccctgttttcctcttgttctcaaacaagctcgaaaggtcgaaacccgaagacatcgatgaaataaactcgaacgcgttgaagaattttggtgaagaagatgacgaggaagacgacgtcgttttattaacccaatcttcttcttcttcttctgattcagaaaccagagtggactctgttcgggtcgaattagagaacgaaacggatcgggtaaatcctttatagaaccacgggacccgcataatacccggaatagttatccttctattcgggtcgggcaccaacagtttgaacaccaaccgctttgactcggccgtaaaccatggcggacattcaaattctcccctgaaaatcttccgatacatcttcatgatgttctcatcttgaaaaggaagaaacccagcgagaagaacgaatagaacaaccccacaagaccaaatatcagccttgggaccatcgtagccctttttccggagtacttcgggtgccacgtaagcaggggtcccacactgtgtgtggagtaacccatcgtttcggagctgttccggcaaagcagagagtccgaaatcagagatcttgagatctccattatcgtccaagagcaaattctcaggtttcaaatctcgatgggatacacctctgctgtgacagaaatcaacggctgagatcaattgctgaaaatatcgacgggcttgatcttctctgagctttcctctggcgactttagcgaagagttcaccaccacgaacgtattccataacgaagaagatcttagtctttgtagccataacttctctgagttgaacaacatttggatgacgaaccatacgcataacagagatttctctttggatctgatccatcataccttctctcttaacttgttcctttttaattactttaatcgctacactttcaccgctcgccatttctttcccgtagtaaaccttagcgaaggttcctttacccaataatcttcccatctcgtattttccgaacaacacatgtctttcttcttccatacttcaatttcccttttttgtttaatatgattataaggtgtttggtagtgaagttacgatgatcaataataagggaatccaagataaaacagaggagatactgatttgaatggattccatgaaattaaagagactgacaggttagagaggataatcattaactgattcggatggagatataaaggtgatgaagaagagaaaggagggctggccagcagccattggagcacctggttttttttttttggctctgattagactctgaaagcacatagaatgtaaatggctatctttatatttatgcataaatatatcttattattatgaatattgttgtaattaaaattttagtcctatataatttaatataattattttttacaagataaaatatttagagatattaggtattactagtatccaataataatattttaataattaaacatatttaatgctgaaaaatattagatgtgataaattaagtaaatatagttacaaattctatgtatttaaatttaataattattataaaatattaatattaggtatcattatttaggcagtaatgctttaataataaattacgatatttatgtaaagaaatttctacttgacctatactatagtagtgtcatgcaactacaaccaataatacgaaaaattcaacttcactaatatacaaaaataaaataaataatgatagaaaaaaatatttttatatcaatggaaagagagaatgaaaaaacaatagtaagggaagtctttaatttttaagttaatattatcgtgattatataaatttaatttaattttctcaatatcacattaagttgtgtcatgattctcctactaaataatttctcatattataagaatatattcattaaataaaatatatgacgtattaatataattgaactcgttttaattagtttaatttagtttttatctaaattaatacaagtagccaggtacctcaaattaaaattataagaatattagcaaggctcttgatataattatattccctcaccaacatcactaacctatataattgacatgaaaaaggtaataaatatattattttgtttaatgtttttttttccaaagataatatactaattaagagcaactttaatgataaaactcaaacatggtgttggtttaatttcaaaaagtataattttaacactaatttttttattattccaaccataacaccaaaaattacactatatatttttaattattttattattttatcaaaatttaatacatatttattcaaccaaacttaattattgatctattatttaattattaaaacttaaaaaaaaaacttttatcgtgatctacaatgcttaccaaatttagtaaaatactgtagatatatttatatttggggtagtgtccttccgtttggattgaaattagtgttccacactatatatttaggaaattaagtttagagagtttttgataaaaaaaaattatagagtttttatagaaaaagaaacaagtaaaagtgttaaaaagttaatctagttcacaagttattatattttacttgaagagtgcttgtaaaatctcaaattcatttaagattgcaaaatagacaaagtttcgactatgattcaatatgttgtgtttacgcaatggctaatcccgtgattataattgtgcacatgtgattactctaattatatacttttattaatcaatttcattttaataaagaaaaattatgttttaaaacttataatgctcttaatagtgcattgcaaaaatcaaggaagaaaattaaaaaagaattataatatttatatatacatagataatggtgagtgggtgatctattatatcaactcaaagttgacactaatagttatattatttttaaaattcagacgtacaaatgcccataaattaattagtgaataatctaaattttacatttaatactgcatttttaactttatgtatttttgtaccaatcttatatatttaaaagtagggatttatatgtaaaaaaatataaaataaagttaataatattacctatttcagaaaaaaaaaaaaaagaagaagaaaaagaagaataaatacatagtaatttttttagaatttaatttatcgtaaacatcccaacaaaaaagtaatagctaattgcttgattagtaaatatttattaatatacaaaatttagttttatattatacacgcaacttttaatatattatattacaggagaatttgttttcttatttttaggttttttttttttctttctttgttttactaaaataacattaacatttcaatataattcctaatttttaattatttatctctcctacttcagttgcccactaaaaatatttgacgttttgcgttaatatttgtttaaaatgtcccatcattattctagagctaagaaattttaaatccacctaacaaacactttgttttaacaataattaatattatatattaatctcaaaaaataatggccacctcgtaagttccaaagtaaatacacatgcactaatgaagatatttacttaatttaaaatatagttttaatttattaattaagtttatggtttggatcttagtgtttgattggtgaagatattttctttcttaattagttcaatataaaattcaatatggccgttgccgacctagatagataattaagtaagtagtatatatatagtcaatattcgaggtatattatcgctaaatgggcttttagcggtaatgtgtcgtagagggaaatgtacatggtatattaatttttgatattttttttacaaaaatactgttaggcgatattttttacttttttactgtgttttctttataagtttcatattgcagtatactgtgttaagtttttattggtgttttactaatgttttttagttgttctattgttgttttgagttgttccgttttgtgttctactagtgttttataaaaacatagaaaaaaaattcgtgtgacagtatttttgtaaaacttaatccaaatttcaatatttttgtaagtttcccatagtaaatatgtcttctatatcagttagtttaatttgtaatgaacataaaatttaatttcgttagtacttaatataattagctttattcaaagaaaaaaaaaataccttacacaattaataatgagaacaagctatattggtcttctatattttagttaaatatcaaatttaaacttttataattttagaaaaatctgaatgataatcactctttcaatctatcaaaattagtcatctcttgcattccattttcatcaaacattataatgacatttttttataatgaaacaagcactagtctaccataataaaaatattaggttttttcagttttaaccaaaaaaaaaaagtaaaaatattataaaaatacttctagccagccaaataaacaaatatacaacctaaataaaaaaaaattacacacataccacttacacacactttcaatctaagatccatgcttcctgggcaactatcgtgcaaccatacagcaacccaacgcaaccgaaacgaaaattcaactagaaaaagaaccaccattaattctggtgacttcacctgagaagacgaccagaatcaatcaaaacaagagctgttttgaattcttaaaaaaaaagtgtagaaaaacgattacgaaactaaaattcaaccaaaaattcagtttaatttgtgtaaaactaatgtcctcacttcaattttgagatccatgaaagacagatctcaaaa

SEQ ID NO: 162641 - DNA, 1900 bp, Cannabis sativa
  modified_base (1863)..(1864): a, c, t, g, unknown or other
acaaatactattttggcttagatgagatataagtactagagttcaacaagagagtcataactcatacctggccccccttcttgccaaaagttacgcagtgaggatttcccatactaacacatgtaacactccaagtttctccattgacatctatgtcggactttacaactgattgatccttatttgcaggtaaccttgtaggtacatctgatgctttaagtactggttcacccatatcaactttaacctgaaatcgaatactcaaaaatcactatgcagtaaaatttccataattgaaccaaaatgcaatcacttgtgaatgttgccattgaagcatatgaacccaatagatataggtaattttcaagtagagaagtctatacctgaccatcatcttgtaattctggaataattaaaccagcaccagtatgtacagtaaagctacaacaatagatcataaaggcattgtcaaagaaagccgaaagaggtattcctaattgataaaccaaaggataaagcacattctctatttggttgtgcttagtattattagaatagttatagtatcttctaaatgttttactttgctactcattaacggtgtgtaagtatgtaattacatttaaaatggaaagtttttagtaactacatgtaattacactcaattaattatcatgggagccatgagaattggagagtgtaattggatttggaactccttaattacctccaattacacaattacaatgtaattacatgtcagtaattactttcaattacacacaaatctaagtggctttccaaacacaccgaagattgtttctctaataatgttttagaagcaaatcatcacaatatatatatatatatgtacatacatatgaatatgttacctgtgttttccttgcaaattctcaagctcagcaataaatcgagcaaagcaacgtactccattaccacacatctaaaacatgaaattacaaccaaaattttcatctttcaaacagtacaaaatcaattaaagcataataatattgaaattgttttgaatatcaaaacaagaattgaaatctccaatctcaattatcaatcacctcaggctcgcttccatcagaattaaaaattctcatagtataatcagtcccattgattcccggcatagcaaaaatgactccatcacctccaattccaaagttccgatcacaaagcttcactgcttgctcaggagtgactctaggctctgaagaatccctattatcaacctacaagaaaccctattcagatgaaaaaatcgaaaagagagaagagcaaacaacttagctccaattttcaaaattaccagaatgaaatcgttgccgaggccctggtacttgacgaaatgaaggaaaccggtctctctgcgatccaagaacgaagccgtagaggccttttcggcggcttcgagtctcatggaaatgggagaagaggctccagctgagacgccgatgcagggacgagttggtctgagaaaactcagttgattagtgaaagagtgaggatttgagagtgaggtgaaggaggtcagtgaaagccgccgagccggagatgtgagaggaggcgaaatggtggcggccatagccataactatgaagctcagtagagttagttgaacaaggtttcttcttcttctttttcttcttcttcttcttcattctgaaaatttagtgggctgggcttgaaataatagttgggccagcaatattgggcttctcttccatttcaagttcgaatcccaccaaaataaagaaaaaaatgtgttttacaccccatgaaatttttaattttttttaagaggttatttcacaaaaacataaaaacaacaannaaattacaaaaatacagttttatggaattttaaata

SEQ ID NO: 162642 - DNA, 2188 bp, Cannabis sativa
ttttttttttttttttgtatttcagtgatataattgaagagtacgaaactcaaatgaagaggctagcggggaagctgatgtggctgatgcttggttctttgggtataacaaagtccgacgttaaatgggccgggcccaaaggtgatttcaaagagggctcagctgctctacaattgaattcatacccggcttgtccagatccggatcgggccatgggtcttgcagcccatactgattcaaccctcttaacaattctacaccaaaacagtacaagtgggttgcaagttctgaaagagggaactgggtgggtcacggttccaccagtcaaaggagctctggttgtgaacgtgggtgatcttcttcacattttgtcaaacgggttatacccgagtgtgctccatcgggctgtagtgaaccggacccgacaccgattgtccattgcttacctttatgggcccccatcaagtgtccaaatatctccactccaaagattagttggcccaggctctccacctctctaccgtccgatcacttggaatgagtaccttggcactaaggcaaagcatttcaacaaagcactttcttctgttagactacctaataataatttttctcctcttaatggattattaatcactgatgtaaatgatcataatgcagtcaaagttaattaattaattattacactaataataataataataatccaattttgttcttttttttttgggttacttttcagatatatatcgattatcgatgattcacaaattaagcaacatttatttgtttttttttttttattttttttttaatatggccactattttaggttgagagataaaaaggtggaagactttgtaagtagtgtggtttgtcatagctagtattcaaagatagagagaaaatatttcaatacagacaaaaaaccgacatctttttttggccccagatatatatgaagaaaaaatttccccaatccaataaataagacattattgatcaatatcattgtaattaagtattctatttatgtatgcatgtacatcatctccaataatacaacaacacgttgtattaataatgttatatactttaaataaaagatagaataatttcgttacttcgaaacatacgttaagaactaaatagttaaattatcaacaactctattagtaaatcgcttaaaaagaaaacaaaaatacatttgatagattttgtaacatattacaatgctccaccaacataccataataagagcggttatgtaattcttctcccatgtagacaatcggtgctaaaattcttgcatattgaagaatattgtcccacatggattaaatgtaaaagtattgagctatatataagaacatggactactccacttataaccaattggttttgagatgaaactccataattcccaattgcaccactaaaaaccaatccatcttgaacaaaataaaaatgaaagaatattatgaggctcgcgattgatccaatatataataataataataaagctaaacggggccgaataaattgtcgtttctgatcgatttatctgatcgtattcaacaatgtggaatacgaaattattgtaacgacataattctgagtcatttatttattatatatatatagtaattataaataatattatgaactgtgtctgaaaccatgtgctctactttcgtgtatatataatggctagacccatctctgatgagaatatctgaccactactactactgctatcatataccctttataatattaatcattaatgaaaatctgctatataggttgtgtttacagttttggtctcttacaaatatctatgcactcatcttattaattttaaaggtaagctgttagtgttccagctaattaagccaaaaataagcaattttgtccttttatgtttagttattattatcactatatatgcatacatttaaaatagaggcaagtattttattgattaaagatatcgacataaataataaaaatatcaatgacaacccttacatattattgatttttttgttcgatctttctgtacgtatatatatactagatgagagttacgtggcgagccacgtaaatattattatataagttttagttgtttttgtttaagaattcagtaactgagcaacggcaacaataatggtagatagatcta

SEQ ID NO: 162643 - DNA, 1305 bp, Cannabis sativa
  modified_base (1273)..(1280): a, c, t, g, unknown or other
tttatttattattgttattagggggcagccaaattttgatatattttacagctttttggaggcatcctgatttcttgccattgttagcgcatatactctcacgtcacaacaccctttgtaggccattcacttgtagagatagaagtcaaactttaacggattgtagatatatatagtactaacatatatatacacacacactacacatatatatgtacaatatatatcaatcggttttttaaaaaattgactcatcaccaattatttttttcttcattttggagatcttatcttgtatataaatatttttttaagttgcttgaagattgaatgaaaacgacacaaccatatattataataagatgtattgcgaattaatttaccatacatttactttaatctttaaaattctacctataaggaataatgctgcatggaacaatatatatacatatatatgtatgtatatttttatgcatgtgtgtgtataaattaataataatcattggtattgctaaaatgggatgaacattatgtttgaaaggtgggttaattagcataatttaatttaaatagtatatactcattggaaaaggaaaaagctgagttgaaaagatgtctaatggcaattatggatggtgatcatatttgaggtggtccaggaatattatctttttggccatctcttctttatatgttaattattccatttataaagttaagcttcggaagtcaattcaggaatcagaaccaaagtagggtcgtccttcttaagatgactacataaacaaaaccccaaaaattcttaatggttaatttttttcatttatattctattttatatgcatatattgttttaattaatctctatggtagtgaaaacccaaccattggatgaaacagtaatttttgtttttgtatgtggggcatagcaagtaccctggacttctgtcccagctcttaaatgttttgctaaagatagacagattcgtttttcttttcaaatccctttttctcattttttttattaattatttattataatttttttatctttggttcttcttttttttttttttaatattattttttaaggggttgttcagcatgtaattgcggatgtggattttgccacctttaaatctgggctttgaaggaatatctggttgtgcatgattttgttttttgtcggttgtctcattagtgttttgatttggttaatttggaacataaaataatcaacattcatctttttcttagtttccctttttcnnnnnnnnttaatatctcactcttgtatttgta

SEQ ID NO: 162644 - DNA, 1207 bp, Cannabis sativa
ggagtggagattagtgtatgagtatatctaattaatttaatgaacacacgagaggaagttatctgcttatgtagttatataacttagattttgtttttcacattgtaccattaccataagcggttcgggtttttattgtaggataaattttttaaaaaaaaaattatttatttattggggttgaatgaattagatataaaaagtagtgaaaagacagtgaataaaagaggaagtgccgtccatttccttcttttgtgggtgcaatgccaaagagggaaataaggaaagagacatgagctaataagtgtaatgaaaaattcaaaagtcacttccaacaacaaagtaattatatatataggtagagggagagttgtttgttagtgcatgtgtatggatgggacgattccttccctctttccccctttgccaaacatggtaatcatcctttcactcactcggaatcctcaccctttctctcctcgtgtaactcttctttcctaacaccccatcctttttcttttcctcttaattactttttatatatttctctatttatacatatatagatagtaactaaatgagaaacaaaaacaacccttgctagctatcacttctctcattctaacttaactttctctttcgattttcagctcattcctttcattcatgaatggaaacttattggaatgaaaagtaccaaaacacatattggaaacttaaacaactgctgcacacacatgaatattatttaaagtgaatgttgcaaatcagtactcttaatctgatgaattagctacattttatttctatgtaagttattctcatcaacttccactacattgtcaagattgatcacttgatcggtattattagttaatacgtacgattgatgtgaagactttagagatttaatttcataaatcattgatttcatctcattactaaagacgacaaaatatattttattataatggaaaaaaattatgatgtattatacttttattgtaaaatataaaacaaaattaaaagattgattaaataaatattataacacgtatatattatatataaaaatagtaattgaggaagataaataaaatatatggaacacttcttaataggtaatacccattgatgggaactaaaaaaaattaaaaattaataaggtaataatctaataacatttttatggcaagtttctaaaaat

SEQ ID NO: 162645 - DNA, 1326 bp, Cannabis sativa
agtttaatatatatggtagggttcttgtgatgtaaatgggcttgcgctgatttagcaatttgggtttagaggaaatagggtcttcaacgttggtttataaaacttgaaagaagtattgtgaatgtttataattgacagtattgtaatactcgacttttataaaccgacgcaaataaacatcactaaattttttaattttttcctgtcagttatgttattagcgtctaatatataacatacacaaataatatcttttagtgtcagttccaaacacttacgtaaatacatggcctactattaacgtcggtcaacaaaatgaatagtagtgttacccgacgtgaatagtataatttgtagtagtgaaacttttgtgaagttcgtggagatgtgtaagaagaaatttaggcgtattttcttttttcaagaattttggccaaatacgtatcttatctccagatttatgcttgggtttaaccttttaggggagaattcaagcgcacttatctcagagagacttagttgaagacatgtcctatttgttgcatgcgccaactggggctagtcatttttggacattaggagttgcaactatcaccaatcaaacacaccatatcgtaccccccaaaggagctgggaattttgggctcaaattcttggtcattttcttggattctaacttgtgtccgcttctagtttccaaggagtagagttgagtgtggttttgccctgggcaacatactgttcttccctgaagcttcatgaatgaatacgataactttcaggctttagtgagaggaggccatggtctctttggaaaaactcagttatatgatatgtcccaaatggtccctttttgacttgaacctcataagggagatcataggcttcttccaaagtaggaggcttctagttttctagaaggaacacaagtcatgtgtccttgcacgagcaattccttttatgttgcggtccgaaagtcatgtcaagccctatgttgatgaacttttggatttttctagaaatggttcaaagtgtacaaggaactcaatcactgactttgctttcaagcgccgaagggcatatgggaaaacatcacagggagtagaaaagacttcaagaaatccttccattttgggaagcagggttgaagaagtatcgtacccccaatgattcttcttgcaggagaaaaaacttgcatgcgagattcacgttgaatttttacaaagcaaggttcgacttccgtgaaggaaggctggaattgcataaaaacttcaagcttagacttttcttgaaaagatcaaagagaaagcatcacggggagtagga

SEQ ID NO: 162646 - DNA, 4337 bp, Cannabis sativa
  modified_base (4267)..(4279): a, c, t, g, unknown or other
aaaaaaaaaaaaaaattaatgaatacaaaggattggctcaccgcggcgtaatttgatttttccaatatccaagcctataaaacagaaagacttttaataattaataatttgtattaatattttaattaaaatttaaaatcattaatgctttaacaaacctggtatactacccaaattaccatgaatgcatgagaaagcaatattactttactattgaaaagctgcaacaaaataattcaaatatatattattactcagtaaacaaacactttttaaattaattatctttaaaccctaataaattttggtctctgagacatgtattctagtcctaataagaattaagttatacattagaattaccgtgatatttcgggttatgacaattttactcacagtatgaaagactacttaaaagtgaagaggtagtttagtcttttgtcacttaagtttatccttaatgttggtttgtaagtggatttattctagactaatttttagagttgaatagataagtattaattaaattatctttaaaaaaaaccctcctccattctcctctctttctctcggctagaaccaccataagaaaccctcaccctaaatcagaaatttttaaaaccatttcacatcaaactaactaaagaatttttctagagttagtgttgaagtggaaggaaggatcaaagtaacctagttctcccttttctttgtgaatttgtgaagaaaaaatttgattttaagttgaatttaatggttttggttctgtatgaagttgtatgtgttaggttaagtttctaagcttaaatattagtagtttgggtataatttacggttgttagttgttgttttggttgcaagcttcaagttggagattttgaaatccaagcttgagctttaatggtgtattgttaattttggtgcaattacagtttttgagttgtggtttgtgattagaactaatattaagactattctagagagtttgatagatattggacaagacagtagtaggtttgagaagtaaaaatttgagtttgtggtttctacagagaaacaatgaacttttccccaagcagggtcccaaaaaatagttaactgtttgggaatccggtgatctgattggggacattctcgggaatctcaatttttactttttatcaatatttagggtatcatcacattatttatcaatagaaaaacttttgattttgagtttatgtcctagaacgggtttaattgaattatttatcgttttatcgctatcgtgacatagggccccgaatcgtctagtatttttccattcaagttggccgacacacttaaatttggacttgagataagaaaaatacaattgtaccacttagcatgtaaaatgcgatacggtaattaatgtttgtaagaaagagttattactatatcattgaaatcttagttaggtttcttataaaagttgtctcattaggcaataaagtaaaggttgtctcattaggcaacgatatagatggttactttataaagtaatagtattagtttgtcttattagaaaaatacttgatattaactattgtttagtttgagtataatgtctacctgcttatgaaataaaatatgtgattacttgattttgattacatgtgtgtaattggttatgtctgtggatgatatatgatgttgtgttattgcttttcttgttgagtctttgtgactcacgggtattttgtggtataagtaaggaaaagggcaaaataggacagccataagttagcagccttctccaacaaatgtatatatcagctcatccagctagcagtgttgagttgtcaggcgttattttatggcgcttgatctttaaatgttttttggtaaaaaaaatgttataacaactcttttgtgaaattctaaaggggatcctcgaacccaaaagctttaaatattatggatttatattttaaaattaattattaaagtttaattaaatcacaattttatttaaatagttagtttgttattataaactaatttataaaagcacatacatggcatctctacggattaggatattataaaatggtatcagagcgatcatagttttaaaggtccttgaaactagttgaatatgtatatttgctgtgaagactagtatgacacatgttatagtaagtgttatctgtttatctactatttgattaattgttaatgtgatactagaaaaacatgtttggaatatgtgtaattatgtgagatattattatatgagtggaaatgcttattagcatgatatttgactagatgttctatcgttgaaagtcattggtcacaggtttattaagcaatgcacccgaggcgatctaataggcttaccatccgtaagctttctgggctcggggttgacggtgaggatgtgaatcccgtaccaccttagaattcagagtaaatgtatgccacaatgaaagagacaattcaacaacaaggggatcatattagaaagttgagagagcagcaggtcggcatgcccatgttctattcttctaacacctttggttgtgccacaagatgtagggaatcgtttggagttgttgtacgaacagttcaagaagtagaatccactagtgtttaagggtggccttgatccactaaagacagaacagtggatgagcatgataacctccatctttgactttttgcgagacaagtgtagtgatcgtgtgggctatgccatattcatgttacgaaagaatactgtatttagtgggagattgtagcccaaagccaggacttgaatataatgacttgggatatattctgaactttgttttatgagaagtattacaatgagtctatccgtactgccaaagcgaagagttcatacaattgcttcagagtggcatgacaatgattgagtatgccagtaagttaaattggttggccaagattgtgtttgatgatgtggctattgaagcctcgagaaagacaaagtttattggggtttctgaagaacacatatcccaagatgttattgtgacagctaagcaaccgagcgtttttgtcatatgctcaaataatagagttggcacttgttgttgaaggggttgaggatcgaatttgaaagaagagtaacatttgaagagattcgtggaagctaccttctggtactggttcaagtaggggttttaaccttatttaccaaaagagcaagccaaatgatccacctgttacgggcccgaataaaaaatttcaaggtaatcaaggtttccatcaaggtaaaaaaatgagaattggcaaccctattctgagtgcccaaggtgtagaagacactatttgggcgaatgccaagctcgagcttgcttctaatgtggtgtagtaggccatctaaagaggaactgcccacatttacaaataccagatatgaagaaagatgatcttttggttcctgctttggtgttttctttgacccaagcagatactaacgctaacccttccactgtcacaggtgagatttctattgatgtcactatgtttactgttttgattgattttggtgctatgaattcatatgtgtctagtagagtaattgatagtttgagtaggccatgcgatgacaagtggattttgtacgttgtcacctatggtgggttagatctcttcccgtgtgtgtggtaaatatagaattgtcaatgtatcttattgagttaaacttagaagattttgatgtgatcatgtgcatgaattggttagcaaattataatgctaccactgattgcaaaaggaagatgacgacatttgaaccgaaaggtgagaattcgtttgtgcttgtgagaaaagttcatggatcccgagttcccatgatatcaatgcttaaggcgagagatttgttacgaggggaatgtatcagttatttagctaatgtagtggatactacaagggaggtaccagtagtacccgaaagtgtacatgtggtacaagaatttctagatgtgtttttgaaagaattagtagggtttaccaccaaaatgggaaattagattgatttgataatggagacagatccaatttccaaagctttgtatcgaatgacatcagtaaaaaaattatccgttttttcgacaaagcttatgaaatatggattttttttttaacaaattattttgtagcaaaattaaaaagaaaaatttaatgtaaaagaacagtttagggtaaccagttacctcactcactataagataaccagtatatatatatatacgggtgactattcaatggttannnnnnnnnnnnnaccatatggttacatttttttttgacctgcaatagcaggttaccaataggtaaaaatt

SEQ ID NO: 162647 - DNA, 1664 bp, Cannabis sativa
  modified_base (1587)..(1596): a, c, t, g, unknown or other
ctttcggtaaaataaggacagtatgcgaggtattaaaatagttgacgttattcacataaatattattaatttcatgtatatatttaaaaattccccctttagttttatcattgatggaataaacaataaaataataaaacatgaggatgatatttgatgatgatgatgatggtgatatatattatatgttattattaattattttctaaaatatatttcctatatttagtttgacaaaaggtatatacattcattaatcactacttaatcatatctctaatgctatggaactgtagccataattatagcgtaatagtatagtatttccactaattttggttaatcttcatcaataaacgggaccacgaaatactcgttccattaattaattctactatacatataattaattaaataattattatttaaactttgtctaacttaactaataacttgtttagttactacttatctggtgttggtgagctccattaaattctttaaatgttctagatgatgtagttttaatattcatagtaatagaaatacataaataaataaaaaaaaatcgtatgattaatttatactttagtatagtaacatttttttgttatatataaaattacttcaaattttatgttaatatctttaactaatattcatttaaaaaaaaaaataaaagtaaactaatatagttatatgatatatatatctcttaaaaaatataatatataatatttattatttttttaaatagaattatcacttttgttcataatataaatttgtaagaatactctttttttataaagcatctaacttactattttaaataccgaaaatggaaaatatctctattagtagaaataatttttaagttctcatattaagtgattttttatgtgcatttttattaaatatatgtggtatttaataccactactatgcaccgccttgtgaatttagtaaaaaaatatatgacattcaatatttaattacgctaataattaacaatatattatcttgtagtaatattgaacaccactaatattttttaacatttctcaattccctataaagaattttaatattttattattttctataatatttcaaagagcattattaagtatcttaaggtgttcatattatgtagtgtttcataattagttaataattttttatatcatttatcaaattaaaatttataagactcaatatattaaatacactaataataatatgatattttttttgtagtgtttaggcccttaaattacctcttaacatttctctattttaaataactctgaacgaaaattattcttttatttttttttatttttatttttgagagaggggagatctgcattttttacgtgacttgtaattaaactttaatggcatgtttatttaaagggaatgggaatgaatggtatggtattgatttgtttactacattttggaaagggagaaagtagtaggacctacaaaaatttgggagaaaacaaagggaaaggttctcctccaatttttatagagaatacctttccctttcctaggttaatttattttaattttaatttnnnnnnnnnnaaataaaaaagacaaatatgccctttaaaaatctataaacaaaaaaaataattacatattctaataat

SEQ ID NO: 162648 - DNA, 1870 bp, Cannabis sativa
tctctctctctctctctgtgtgtgaattcctagacactaattcgattttgtttttcataagttcttcacaagatctcacaagttcttcatctgtaacactttattctcactactgtaatactaaagagagccatagtgcgcgaaaaattataagatctaagcttgtaatctgcatggttttatctcaagagtaaatacagctaaaaggggagtaggtcattacccgttcatcatgggggccgaacctctataaattcctatgtcacttttataatttattattattattatttacacgtgtgataatcaacaattaataaggcccctatcactgtactaaatttcaggacaacatgtttcttaaatattacaagctgcttattgaaaaaagaaatagaaaaataataaatgaaagacttaaacgatatgcatatcatggtggcctttaatgcaaacttgtgaagagttgacagagacatgcactccatctatatatacagattacatttgagggaaggtggataaaaatattaatgcaacaaaacaaatattactccttttttttttgcagcaattatattaagttgagaacgaatatattagagacatgttgtattaaaagaattggattattataccctaaattgcaaaaaatcaaattctccctgaagtgtgcgttgtggtgggaacttggggaggtgaccagcaatctcaacggcagtctttaaatacaactcaaacttagtgacaattccatcatgcttaggttcttttgcctctgcactattataattagttacaggcacaccatgatgttgatgtacattggaggcattattcttaatgaggcataaaagtgccttgtctttggcagtccagttccctgttctcaaatcaaagtgataaagagccagaaaccgttgtccataagtagctatgaattccaatgctgccaaaatgaactcaaattcttcattgggcatataatacggaaaactgattcttgtccatccaggtttcacgccagtgtagccctattaatcatataattaatttagttaagccctcttttctaagtctctacacagcagagattaataaatcaaacttaaatttaaatattgtaaagtcacctcttttataacagatctataggtatgagaattagcctcattaactccgagcagagtgtggccatagggtcccgcacaagcacaaccaccacgagcttggataccgaatagatcactgagaagagctgcaacgaaagctccatgaagaggcttaccactattgttgccagtctctccccacatgtaaagccttgattcttctctctcattatgagcacgtccgtctttaatagtgtggtctgttgataggtaagaatttgttgtggaataaatgagaaatgatagtatagcttgtcgtttcacacttgtgtttcctaaaatttgtatgttcttatttgggagaagcctctttagtgccttttctacatagaaatgctcatatttttcaatcacttcataaccaatgtattctttcacccaaaaggccaatgctgctcttattgtttgtattatttgtggtgtcccagcattttccctttcttcaatctcctcataatataatgtgtcctgcattcatgaatgcatattatgtactaatatttttaactataatgtaatataggataatgcttcgttttatgtattaaaaacgattttttttaattttatatttatattaaatattattttctaatttatttcttttttaatatgaagataatattaaatataaatataaaaaaaataataatacattaaaaataaaaataagggaaattaccttatatactattttt

SEQ ID NO: 162649 - DNA, 2430 bp, Cannabis sativa
ttagtctccaatgtgttgataccaggttagatatggagtatttatagacattgttataactatttctttactttcctattatgctgcagcaaagcttaaggaaaggcttgaaccaaacaaggaaaatttcccacctcatgttttgcaagttacagaggaagatcctataaaaccacagttgttagaggcatcttcaagtgaattcagcatttcattagtttcagagctcatagcaaatcaacactggtctaagctcaaaacccatctcgaagacatgaatccgatcaagtttcttcatcatttgtttgaatcaaatgttgatccagagctcattatgaggtacttcaattggtcccagaaagagcttaatgtttcatatccacttgaattgacttgtagactcttacattcactagcacgtgcccaaaaatactcaaggattagagctttcttagataggtttgtaaagaaaaataaggaacactcaaacttcacaatatttcactcgttatcactgtatgacaattattttcatcacatgaatacaatcattgttgatattttggtatgggcatattctgtaaatttgaagacccaattggccattgaggcttttcagagagctggtgattatgggtacaagttatctttctttacatgtaatcccttgttgtctgctttggttaaagagaataaaattgggtatgtggagtacctgtacaaggagatgattaagagaaagattaaggttaatttgtatacttttaacattgtgatcaaagggttgtctaaagttgggaaactgaacaaggctagagatctcatgaatgatatgaaggcctttggaattttgccaaatgtgattacatataatacaataatgcatggatattgcaagatgggaaagtcaggaatgatgtataaagctgatgctgttttgaaggaaatgattgctaataaaattagcccttgcccaattacctacaatatattgattgatggattctgtaaagatgagaatgtattggctgcattgaaagtgtttgaagaaatgaaaaggcagggtctgaaacctgatgatattacctacaatacactgatcaacggactatgtacagaagggaagcttgaagaggcttgtgctttgagggatgaaatggttggcttcagcttgaagccgaatgtcattacctacaatgcatttatcaatggattttgcaagaagaaaatggtgaaggaagctgttgagttatttgacgatatcataagtcagggtttatcgcccgatgttataactttcaacactttgattgatacatactgtagaaatgggatgatggacaaagcatttctcttactcagtacaatgttggaaaaaggaatattccctaatgtttcaacttataactccttaattgcttgtttttgtagacaagggaacatggaaaaagcaagacagcttttagatgatatgcagaagaaggatctaaaagctgattttataacatatagcatactaatggatgggctttgtaagaaaggggagacaggaaaggctagaagaatgatgaatgacatgttgaagtcaggtttgaatttaactcatttgatatacaatatactgatagagggctactgcagagaaggtaacatgggggctgcactgaatgtgagattgcagatggaaaaagacggtaagcgggcaaacatagtaacttataatttgttgattaagggatattgtgagaagggcatgcttgaagatgcaaataggttacttaatgagatgttggagaaaggtttagtcccaaaccgaattacttatgatgttgtaagagaggaaatgttggaaaagggtttctgtcctgatatagcaggacatctcagctatgtctcctctggcagctgaagattggaaaatggtagcttagtttcttcacctaaagtgaccatctttgtttgataatctctcagaaaatgaaagagatgcacaagattggcttatttcataattccatgtgatgaaatgggtaaaattcaagtaggaaggttagtcaacaatgacaaccatattgggaagataacagaagtggatgagcttcacccattaagcgacgaggaagaagcttggattgtatataattttgcaaagggtttggttagtaagccgccaaaggatagtaatgtattatttaatacataacaaatagtttgtattaacttgtattataatatttacaaaggattcgaactagaaacctgggatccaactcggactcggaccctgactcgggcttaggacccaaacctggatctagacctggacctggatccaattcagactcgggacctgacacgtagtcggtgttggggtcgagtgtattgaaaatatattataattttacacaatccattaatacaagttaatac

SEQ ID NO: 162650 - DNA, 1379 bp, Cannabis sativa
ctactcacatctttcaaacaaaattaccctattaatatatagtttatttttcgttcttatatttatatgtattgaaaggatccatgctaatccaacttccagacccttcgtttctctctctctcagcaccatacaaatgaacagggcacctttaaagtttttgagttcacacttgagttcagaccatttctacacagtgaaataaattttgagtcccagttctcgaggtctaggtggctccgcctcctcatcagacgtcaaccatgcaagtaccagtcgttccaaccgctctcattgcatcaaccatcgtcgatcccaccgttccagtcgcatcaaccataactcagatccttacccctacatagcgttgaaaccgagatccccaattcatgttagcatttatggagatttataaggtatttatttctatacccaatttttccttcttctcgttaaatccacactacattctagagttataatcatgatctttaggtttaaattcaaattttaccataaatttcctcctgaccgagcccttttcttggttaatttgggcaatgtggacactcctccccctcagaattctaatgattacacttgtttttgtcaaattgaatgtgggattacattaattatgttatggagtttttgtgttcataataatgttcatcaatggtgggatgtgcaacaactatcttccccattaattctatttttgtttgttcagatttttgtttatgtgttcttattttagtgagatgtgacatgaagctacttaaaaatccatttattgttatatttagtggcgttactataaaaggaaaccttcactttctgtccatcacacacacccacctccacctctgtacgcatagtaacatagctccatgttcttactttccgttctcgtgtacacagcagtacactatcgtggatgatttaactacatccttatatgtggctctcattctcacagatactgaaagcactattcagactctccatgaacttacaccaacaacaaccactgagtctgaaaccctccttgcccaatactttttggttactaaactacacattgtcaaattctttaactgaaaggtgtttatggagaaaatgataggggattggaataatatttctaggttccctttcaccatcaccgatcattcaaaaggcctatttttgattgagtttgcatgtgaatgagataggctcagagttcttttgcagcagccgtggtcttaccttaatcaagctatctttatggacattccaaattctgtggaagtcttaaaggggatagccttctcaagatacccctttgggttcaagtgttcaatactcctttcctcaaacgctccgaagagttggcg

SEQ ID NO: 162651 - DNA, 2962 bp, Cannabis sativa
aaaccagcactactacgggttcacaccagtcaaattgtgctactgaagttggtgttgaacacaatcctgtcaccattagtaaccccgactctgaaatcttagcaccaagagttaccactgctgctcctcttgctccttctcatccaatgataacgagatccaaggccgatatttttaaacccaaagtttacataggagaagcaaagtggcagtgggaaaatgatgaagaaccaagctcagttgaagaggctctgcgtcacaaaggatggaataatgcaatgggagaagaaatgatggcattaaagaggaatggaacctatatcttggttcccaaacctgctggtatgaacataatcgaaaacatatggatatttaagaagaaatggaatgctgacagtacttttcaaaggtataaagcccgtcttgtggcaaagggtttcaatcaaagaccagacatttattttggagaaacatatagcccagttataaaggcctgtacagttcgtatcattcttactattatcgtagccaagtcttgggagattcgtcaactcgatattaataatgcctttctcaataggcacttggaagagaatgtttacatgtatcaacctcaaggatttgaagatccagatcaacccgatgctgtgtgtaaactgacaaagtcattatatggtctaaagctatatggtctacagcaagctcctcgtgcatggtttgacaaactcaaagcaactttgatcagctggaactttgtgaattcaaaggccgattcctcccttttcttttacaaaactgctgatttaattgttctcgtgttgatatacgtggatgacataataattacagggaatcatactgccaagttgaatcaattcatccacaaactcaacaccacatttgctctaaaggatttgggacttctacattttttcttgggcatagaagtgcatcgagatgactctggtctgttcttgaaccaaggcaaatatgtcaaagaattactcacttgaacagggatgctgcatctaaaaccaagttccattcctatggtcacagggaaaaagttgtctaaaactgatggtgaattgcttaccaatcccactgcctatagaagtatcataggaggcttacaatacctcactcacaccagaccagatctgtcctttgcagtcaacaaattgagtcagttccttcaagcactaaccacaacacattggaatgcagtcaagcgtgttctaaggtacttgaaaggtactgcttaccatggtcttcacaccaaacattctcacagactcaatatcacgggcttctccgatgccgattgggcttgttaccccgatgacagacgaagcattggtggttactgtgtgtattttggagacaccttggtgtcatggtcctctaagaaacaaaccgtggtttcgagatcaagcaccgaatccgaatatcgctctctcgcacaggttgctgctgaaattgcctggattcaaagattattgaaggaattcaatttccctctaaatcacacaccatttacatggtgtgacaatatgggggcaagtgctcttgctatgaatccagtctatcatgctcgtaccaagcatatcgaattggatgttcattttgtcagagataaagtaatcaacaaagctctcgaaatcagatacgtgccttcaagtgatcaagttgcagattgtttaactaaaagtctaagtcatcacaggtttcatttcttagttgataaacttggtgtagtcgagacaccacctagtttgagaggggctgtgaagaaatgatttttaccctctataaatttaggtgtatttaccacacgtggtggtcctggttgttgtaataaactttgtcctttttgtgtaccgttagaatattctttattctgtgtaaaaggtatttgattgtgtaatgattgtataggattctctgctgtaaatgattggtatacaaattcaattggccagctctgttattcattgagctgagcatttttcaagtttctccgtttgttattttctttaagtgtgcttagcacctctagatatatcacattgtgattggctaataatactctttaaaaattattatattaaactatataagacttgaaatttaattagaccaataatataaaaatagagtaaaaatgattgagagcacttgacttttgaagtaagaaaatatcttttaagtagttgcattttggtaaaataaaaggtgaaacacccttgattagactcaactttggagacaagatttgaaatatacttacaaagcctatctactttggaactttattaagcaatttgcttaaggcattatgctattattatatgctgagtgataagtgtcaaatggcttgatcaaatgaaatcgttttttttttttgttcaatattaacattagaagaaaataactacaagtgacttgggttggggctattgagaactttatgccattttttagagttagtgattttaaagtttgagtatatgttagtaagtatttattataaattttttaaattttaatcacaacaaaattcgtgattaaaaatgaaaaaagttattactaatataaaattacaaaaaatcttatttttagtcataataaaatttgtactaaaaataaaaaaaattattactaatataagtaatcattctaatattgtgattaaaatatctgtgataaatgtattggtcacaaaaattaaaatttattatgactaaatatatttttagtcataatacttattacgactaaaattaaattagtgataacttgtatctaaatactatatcttaagaagaaaatagcttgtgagcgatgaaaaggagaagaaaaaaaatgtgtgtgagactttaggtagcgtttggttgaaggtaatgaaatgaaatggaaaggaaacaatcttcaatccattcttttatttggttgcataaat

SEQ ID NO: 162652 - DNA, 1789 bp, Cannabis sativa
  modified_base (1763)..(1764): a, c, t, g, unknown or other
atagacaaccccctgcgatatagttttccatccataatcacataatgagggccttagtattggatctttttggaggcagctcgatctgcgaggagttcccccgtgatcaagaattgataaataggtgccatctaggagtgtgaattatccaccacgacattcaccccttgcacaagaatgctggatttttgcaggtgacaaacagggactataccatgctctatgatttctgaatctgtggccaacttggccaacatttcgacgaatgaattttgttctctcgagattttccgtatattataactcttaaatccctgtaacaattcacgcaacattaggacataggcaaccattcgctcaccttttgtctaatactcaccagttatctgattcaccaccagttgggaatcactataaatatccacctgttgggctcctacttatttttctaacttcaagcttgccaacatagctttatgttctgcttcattattcgaggcacggagcccaaagcgtagggtgatttggagctggtgtccttgaggggagattaaaattaccccaactctgaccccttctcattggacacaccgtcgacatagaccttccaaatgggtagcttaggaactagctcttctagaagagcataaaagcttgtgcactctgctacaaagtcagcgagggcatgtccttttattgacacatgtggctggtaatgaatgtcgaactagctaagttccatagaccacttcagtaacctgccagacaattttgtcttctgcaatacctatcgcaagggatgatttgtgagtactctaatgacatgggcctggaagtatggtctcagcttgcgtgatgctattagtaagcaaaaggttagcttctcaatcatagggtctctggactccgcgcccaacaatcttttgctcacgtaatatagcggatactagactttgtcttcctcttgcacgagtgcagcgctaacagcatgatctgacacagccaagtacataaataaatcctctccttgtatcggtttttataagataagagctttgttgaggtgctcctttaacttcttaaaagcgtcctcacactctttagtccacacaaactttttgttgcctcgcaacacattaaagaatgggatacatttctcggtagatttcgaattgaaccgactaagagtagcaacccgccctgtaacactctggatgtccttatgcctcttgggagaggacatgtcaaggaaggccttgattttctctagattggcttctatcaccaggaaatgacgatgtatcccaagaacttctcgaaacaaaccccaaaagtgcattttttatgattcaacttcatcctatactttcttatgaccaaaagggcctattctaggtctcagccgtgctcctcaaaagttttagattttactaacatgtcgtccacatacacttccatattttggtctaactagtctttaaacatccagttcaccattatttggtatgtcgctcttgcatttttgagtccgaatggcatcaccttttagcaaaagatgcctttgtcaatttgaaaactggtgtgccctttatcaacaatatgcattttgatatggttatacctagagtaagcatccatgaaggtgagcaacttgaaccctgacatggcatctactgtctgatcaatccgtggtagtgagaagtaatcttttggctaggtcttatttaggtccatgaagtctattgtaacgccctaaataattnngcacgctacccaaaatacttatgaa

SEQ ID NO: 162653 - DNA, 3770 bp, Cannabis sativa
aaaaaaaaaaaaaccatatattttgatttaacatttataaactatataacaaatattcatttaccgaacacatataatatatatcagtttcattgtaaattatatttgtcatatttaatctagtagattatttgtgaaatactgtttcaaaaaaaaaaaaaaaagattatttgtgaaataacaaatagtactataacagtgtggtatataaggtatccaaaacacaatataagatatctatgaagtgatttttttattggtaaacaaaagttttcattgatctgaaaaaactttactgacaaaatccttcattacaattatctataaattattagctctttccatattacatattaattaaatgtatataacacattgtggtgtggttacttcaggaaatttcattaactaactacacactagccaaataggtgtggtacatattgaattggtatgtaagaataagaaaaaatgaacaaaaacgatttattagaggacgaccccacaaaagaaggtgaagaagccattaaccatccaaaccctctagtccaacagataaggcaaagatagccccaaaacttaacatccatcacacaatttcccctatcacacacacatataacccctttcactcttgacttcatccccccaaacacatagttgatacttcatcctctgaccccagcactacctatggccaccatcactgccgcttcagcagcttccacctcatacttcttcggaacccggatccacaaccctgcagccggagcctcctctggctccaggttccaagcccggttcagcttaccattcggaaagaagaaggcaccaccgcctcctcctcctcctccatccaagaaattttctggcaattctagcgatgatcgcctagtgtggttccctggggctgaggccccagagtggctcgatggctccatgatcggggaccgcggtttcgaccctttcgggtttgccaaaccagccgagtacttacagtacgattatgatggtttggaccagaatttggccaagaacgtggctggagaggtgattggtgtcagggttgagaccaatgatgtcaatccgacgccgtttcagccatattctgaggtgtttggaatacagaggtttcgtgagtgtgagctcattcatggaaggtgggccatgttgggagttcttggggctctttcggttgaagctctcactggtgttgcatggcaagacgctggaaaggtaatagctactatatttgcttattattacaattagtctatatatattaccttggtttaaattaagttaaatctgttaagacctttatatcgctattacgagtcccactgataataataatatgatcaatttttagtgatgattaatataaatatttcaagagagatcaaatcttaaaagttacccattgaggatgattttttttggcggcatatacgtgtatattatgccctaatcgcgtcgtcttgtgtaaataatcctctaaaaccaaacccctggcgccacactttttccatcagtcgtgtcttcttctcagtcatataatatatatataaataaaataaaataaaataaaaagtgtggtccttcataatcataatgatgacaaggaaataatcagattccgacaaaagatatttcattttgcttttgattttatttgttttctatttagaacgtagcttaatttatccttttgccctttaattttgtcccgaaaagttaatgataaagatgcttattagttattatgtacctatatatgccactacataataaaattaatgtaataataatgaatgaaatttgttctataatagattagcttgtacatatacatagaaatcactaatatgatcgtaagaatatttgcaattaagttaataatagattaattaacatattaatttgaagaacaggtggagttgattgaaggatcatcgtaccttggtcagccacttccattctcattgacgacattgatatggatagaggtgttagtaatcgggtacattgagttccagagaaacgcagagcttgacccagagaagaggctgtacccaggtgggcaattctttgacccattgggccttgctgccaaaagcccagaagagttcgagaggcttcaactcgctgagatcaaacattctcgtcttgctatgattgccttcctcatttttgggattcaagccgctgttacaggcaaaggccctattagtttcatagcaacctttactaagtgatatatctataaacaattccattttctatcccgaattcccattttccaaccaacacagtgtcacagttactactctctctctcccccctctaattcattcatatctttttctacttcaatcaaaagtacgtagtgcactaagtacttcttatattacattacatttaatatatgatttttctgtatttatgaaatgttataatttatatgattttacttatgtataaacatatatattactgttgggcagaatagttgtttatacttaaaaatcaatgattaatttccagttctatgaaatttgaatcacgccctactacctacaaaaaaaatgatgttgagctaaaaaaaaattggtaggaataatgcacatttggtagctaatattcttttagttactaaatttttttggtggctacttcgtagctaaaactcagttgctgaaagtttttgctactaagatagtctgtagcaaatttgctactactaattttgtagcgaaaaatattgattttagtagcaaaataattttactaaaaattttttactactacattttggtagcaaatcaatttaaaattggtagctcactaagtttgtataattaaaataaattttattataaattgccataataattttactaccaaaatttggcagcaaatagtaaattagtagcaaatacaactttagtacttaaaaatataataattttgttactgaattctattacaaaattaaatttcaattgaattatatgtgattttccaactaaatttatatttaatatttaattgtaattattctattattgcgaaatttctaactatatattaataaaattatttaaaaaaatatgtattattaaaatatcaaaacacactttattagaaagggacacgattttgtcccgttaatgtatttaggggtatatatttcgtgatgtacccagaccgttagatggataaattatgtattttgtaataaaaaattatttaacttaaaaaagtaaaattgacatgaccatccatcagtcatcaccctcaaccgtcctcctctcttcttcttccttcttcactcgtcaccctcttcattttttagttttcttttagattagggcaaaactcttcagtttccatttttcattttagaataggcaaaactctcactttgtattttcatttcgtgtacatactatgaaggaggaagtgttagtagttcattgtggtgtacattgttcgtgttccgacaatggtctggttctcacaatcgtgggtcttgacgactgtttctacaagtaagtttctctagttcttcttttcatgtttttcgttcatcactatgggtaatcgaaaaatcaaatcttttttgaaggaaatgtggtgtagtctattttcgtgtactccattgatacaagtgcagtttgattaagttggtttttctctcaattatcgatagctctatcactggtagttaccattttgctcttgaggtatctctctctctctctctc

SEQ ID NO: 162654 - DNA, 1495 bp, Cannabis sativa
cacctagtatatataaatatatgtccagtcctcaccaaattaaataaatatatgtagggaatgtttttcaatgtaataccaaaaaaaatattattgtgaatattaaaattaataatgatttaattgcatgatgattttgaagaatttcatcataagaaaatataatccagcagtacaacaaaaatattaggatatcatgattatatgagcattattaatttattaccttaatattatagatactagtttctgctctagctagctaaagtctctttttaaagtacttctcaactctcactaaatttactacaatatttgaccccacccattcagaatgccaaataacataaatatataaaaatcttgactcaataatataatagtggaagtttatatcaatcataatcagtaattcaattataagtgatttatgcattaataattttaagtggacgtttaaatcaattatatataaataatcagtaggcagacattttaagtactttaaatgtatttgttttccttttctagaaaatattttcttttttccttttatcaaatattattgcaaattatataatcttattaaaagaataaaatattgttttttaaaatatactttttatttgtataaaattattttcattgtaatattgtaaattaattttcattaatattgttttctttgataaaaattgttttctaaatataaagaagagatactatatgtagtgtccttccttatccacaaatatgttgttaaaatttaaggaagaagaataataaagaatgatcatatgtacatgatcttatcttttgaacctaaacagtgataattaattaaaaacaaatgacttaaaacagaaagtttatacgtttcatacaatttacgaaacatgattacatgaaaatgagtttagctgtaaaacatgaaaatgacaacaattcaaacatgatatttttataaaaaaaaataaataaatcttaatggcttaagccaataatatagggcctcccaaacaacactatattattgttggtaccacgttgatactcttattaccctttaacaattctcaattgaaaaatattaaaggtggaagcactataagaagtgtcatattgttattggtgtatgaatctcatatattttaagatactaaatacttatactttataattctcttaagtaacggtcttgtttgccaacaatagtacttcataccttttgtctcatagaaagatagagtttttagtagtcaaatcttctcaattgccgttttacttgtattaactctgtaagtttaattttggcggtaaaaccttttaaactattgaactagtagtaaatttaaagtattatccagttaagtgtcactatggaatacttatataatgactcttgtacacatgacacgtttatattggtacacctaatattattatttaaaagttattttcaaaatttattttgaaattaaataaaattataaaa

SEQ ID NO: 162655 - DNA, 4043 bp, Cannabis sativa
  modified_base (3945)..(3945): a, c, t, g, unknown or other
aaaagtaaacttaaaaaaaaatattcttaatgagatttgaatcttgaccgttattatatatacaatctagtttaatcattatatttttttttaagtaatggttgtgatttttttataattaaaagagtaaataagcttccaaagatagcatatattataaaattatataaagggatgaagaaattatcaaaatacaaaacaaacacgtaaaaacagttcaagtacaatattatattggtacaagggataacaactccactatagagatggactaatgatatggctttgctagggtttttctttaaacctttaaagctgccgccacatttcttctttcgaccaaggcttaccgtgttggatcttattttatcaagatcgatctaatttattttagcaaaataaagcaactccttctattcaatcattgagatttcgaaattggcttaggaaagagcctctttgagtagttgtcttaggttagaatgagttataggacaaggctctcatcatatttcttatatagactcacactagggttatgtttagatgagatgagctaaaataaaagacaaatgagctaaaaaaccctatcatggccgaaacacatagtgtaggcccatgctttaatttttgtcattttatttcagttaaataaaataatttatctttttccaattttgccactgattctaaactatttaaatacaatttttaagtttaataactataaataattatcgaacaaaaaaaatacaatttagatatatttatcaattagactcaaaaagtgtcataattaactatatattatctgtatttctgaatagatgacatgtgcgtttccaaaatctaaaatcaatcaaaacagacccaatcctgagcccaattaagttagcaagacgacccaattacggagtcaagctacggctccgaatccaaatgtaaggtcaacttaaagacgcgacaagtttagaccactacggtccgagaaatgttgtttggcccagaaggtgaagggtccatcaagatctatctggatgccctcatgggacaatctagatacgggaaattgaagagacatttggaagccttcggatatcatcctaggtggcatcctacagacacggggtcccaccacgtcaggggtttgtcccctacattaggcccaaggaaagtgtgtaccacctaaagcaaccaccgttttgtccaatgctatattctctgacattctcagtagcatcacaatagctcgcgacattaacatcataattggtccccactcataaggacgaatgattatctcgtaaattgtgcctcacctaattttcctaaagttaatatatattatattttaccctatcagtgggcctacttgacacctttaaattctatcgggttgggttcatccatatccagttctattctataaatagaacagtatcccttcacgaaaaaggttagaaaatcaattctgagaaaagggcaaagaattagggttcatcttcttgggaaaaaatatttgtgtaaagatactttgaagcttttcaactcaacaatattgactcgttgactagtgctcattaacgcataaaccacgtaaaatcttggttttattctttaaattatttctttcttaagcataattattttataaccagtttcaaaaaatctcggtaaatatttggtgctttcattaagagctaaagaaagatttaccatagttgtcatctacaacaatgatttaacttgaaaggcagtggtcaagccgcctgctcaagatggtagggatgatgtcgccaatgatggggagaaccagctcccccgacagatgctcaggtgggtgtcgcgagggacatggaaacatcggaggtgggaaaccatccgcaccaagaagaccaacattgcttaaagaaagttttggacagtcccattgatgaggatgagcaggaaggtcaagaagatgaccacgcctaaaaccataactaagagtatgaagaagaatactacgagtaggatcctgaggtaataggactccagcaggagcttacagatacccaaaggaggttagcagagcaggaagaagcctcacaccagatgcaagaaactctggtacggctacaagctcaagctaaccttcccgaaaaaaaccctcctactaagaaatttaaccatcttggagttgggctcttggccccagcaaatgacaatgggaaaggtgtaataggtgtccctccgtgaagacccatgaacaatgttatatggaacaacagaaacacagttgaccaacctcaacacaaagaagtggacacccaaggcccacggctaggtcaaccaatcaatctgtggggcagagttgtgtggaacaatgggcctggtactcaggttcaaaggctcaatgttagagggtggaaaaaatgccccaacaattatgttaaccaaagcatccatgtggaagatctagacccagaagacatcatgttagtggcggaccttagggatcgcctgaatgcaagatgagaaagagtgaagggcaagaaagcaaggcctcgcggaggcgatttcagaaatgatatcaacaatagaaagcaaggccttataccaggcgactagaggaccaaatagccacattaacaaaactcaccgatcgtttggttcagaaataaagtggtgtcatatctgaatcagaagatgaggatctagattctaaagagaatcattgaggcacaactacgagaaattttttgatgcaaatggagctgtacgaaggaaaaatggaccccaatgcccacctatgaaagtacattaggctaatgtgagtagcacaagtcagtgaagatgggaaatatctatgtttctcattgaccttgtccaaatatatcaaggattggtggaaaagattgctgtccgactttatccgaaactggaaggatctgcagtccatattttggaagcaatttgtagtcgtgaaggactttgatatggaggtcagctaactaaccaacatcaagcaacaagttggggagagcctcaaagcttatatccaacagataatggaggcaacaaccaagacgaaagttaatgatgacatgaagctagtggccgttcaatcggagatttcggcaggatccctgttttggaacgaaatgcaaagacaaaggcctgacactttgttagactttttgacaagggcccaagattttaggaagaggcttatactcgagtttttagagtggctctaacacattcaatcagtgtcaacagttccacactacaactcttggttccatctatattacctcctagaccccaatacacaactccaaccatctacggacccacaaccttggggtatgagccttcacagacaattttctttggtgtcgtgttcgtgttcgtgtgccgtctcgaaacctattttgctactcgtacttatgagttacttttttaaaaaataataaaacaaaacttgatcattaattaatgttttctaaagatactagcacaccctggcctcttcattagcaaagaaataataaaagacacctagcacttttttgcatgttaatattactactggtggaattaaatatcgagtcccatataattatcactaaccagttgccaggtataagcactactagtgtcaaataacaatgctcttattaacacaatacatggagctagacttcaccagtctaaattcgtttcctaatatttatttcctcatttttcttttttattttaaacataacgatttaatattttttttctcaatataatatacatatatatatatttatttacattgcaatatattaaattatttacgtaatattaatttgtgtaacgatgttgtatattaacgcaattacattgcagataatcggtcccaaattaaacaaaattacatcctatcaaattaaagtatatatataaatatatatntatatatatactaggtgaatgtacatgccgagccacgtattgctagttttatttaagattttggtctttttaagattttgaatgtattttatttttaa

SEQ ID NO: 162656 - DNA, 10212 bp, Cannabis sativa
aaaataatttccaacacctacctcgaatgacggctcgatgtctgcgcgtgttgatggttactctgcctgtaatgagtacataacggatatttttggggggaattcgaggagtttaaatttttgaaaactgcttataaataggatcgagggccttcaaagattcttttagccattttcattcttgaagaagcagagcaaaaagctttcaagtgaatttttctctaaaattcttccaaggattcccagaaaaactcttgacaacatcatccgagcaaaacaagaagcttcgaaccagtgagtaagttctttatttctttcttttacatatttggatgcttaattttctaggtttctggctgtgaatcttgactgttcttgaactgttctaggttaaccatagaaatcttaggttcaaaatttagaaaccttaattgtgcttaaccataacatttgattttaactacgcttcgatttttaaccttataatatctattttcactcatccattaggagtttagtgaaaatcagattccgatttgaagttttgaacttttaggttgaaaaatctatttttgagtgaaacttctatttttgatccctcaatcggacctagtcagtacatttaacctgttttttattcgttgctccgacgaattctcattttcttatctcctaccttttgtagatgaaccctggtgacttttggggaggcaaccaccgtatcgaccaggatctgtttcaacttctgtaagaggatcatccttgtctccatgctagcccatctttgtccagtgataatctttctaactgtagctttgatgattgggaaataagtagttaacacacgccttccctagaacccgagatgcaacatcacttctatcctgaccagatctaaggtgagggatacggtcggttcatttgggaacttaagaaagggtagagacgctgctagtttagccgtgctacagtactttgcataaataatgtgcaacctttgctaatcaaagggtttatcaaaaagtgataaaatttaaactttaattaataaacataaactgtattacatttataaaatttgagatctcatatttatattttttaactatacataataaaaagatgtcgcacagcgactacaaaatcgtgagccctagctgtccctgaagatccagcactccaggtcgaattgtttccatatgtacaatctcatccagctccaaactcaatgtcgttcaacaacagctttgcctttaactgcacataacatagcatctgtgagtcaatagactcagtaagaaaagcattaaacataccatataaccgactctgtggccaagcgcccgtacacctatcaacaagtcataaaccatgtcaaacacgtatagctaagtctcgaacattcttgaacatagtacgattgaccacaacataacatgccctcagtactctagtcgtactagtgttggtagcatcaatcgatactataagtaaaactagccataataccacatgcacttagtactctagcgtactagtgttgatagcactagttcatacttttggaaaccaaccacaatattgcatgcactcagtactctggcgtattagtgttggtagcattagttcatactttctgaattgtcaaacacatatattcacgatatcaagatgcaatcatatatacaccaactatcattctaactgatatgtcatacacgcaaacatgtacgtatgtatatgtgttatattagtcttacctcaattttaattttagatgtgtcagtcaacctgagtggaaatagttgttggtagtcgaaggccctaagtcacaattctagaaaaacttgtcctaacactttaggggacttaaattcaagactaaaagtttctctatcgatagatatcatggcaatactctaagtatcgagaaaacactcaatcaaggtcctgggaaaagtctcaaaataggcgatccatttttaaaacgaacccccaaattttgcctaaatcgaacgatccaaaactccaatacacaactttaaaactttcatagctcattcagttctaatccaaacattaccaaattttgcaaggtacctaaaaacatcataattaaaatttttcatgaaagagactcaattaaattctcaagaataatcaaattaaatggccgtcctaaatctgcctaaatcgaacggtccgaaacctccctgtctgagtttggaaatcacataaggcacccaatcataagctaaaccttacaaaatttggcaaaacacctatacacatcataattaacacttttaatgaagaaaccttaacccaattcgcaacataattcatgttatcacaaccaagtcaagtttgatttctttgaattcaaacttgcaatacttttgctacaaccacccaaaacacttcaaaccacttctaaatagtcctaaataaccttaagatgctttttctagccttcctaaactttctcaacatgtcctactataaacagcaactaaaaactatcaaaaaccctagaaaaccataacaatgagctagggtttaccttggattacatggagaagctagggctaaataccttgatgaattctagctatgaagaggcttgaaaatggtggaaacactaggttttactctagttttggcagccacatagtagagggaaaagagaatgtaaactttgactttttctttcttcttttgaatttggtttttggttttagtttttccttttacttttgcttttcctttttgttttatcttcaagctgctggtcaccaataaatggtgagtcacaaccctaaaaaatattccaaaaaaagtgactaatcacttagggtaaaaagactaaaatggcattagttccctattaagttatctcgtaaccctatgagtaaaatggtctaattttgttatttcgttaaaccttgatattctaagatatccaataatatttctctgtaaaatacttgatacaaatttgtatccatgtaactaaaattgtcatccgacccatttcctctattactgggtataaaaaacgtgaaaatataaaaatttacatatagcatgcatattacacctacaattcaataaaatctttaaaattgagaaataatgatcataacacatattttcatgaaactaggatctataaagcataaaattcataaataatcacataatcaaattaattagtgctaagtgtcccactaatcccatgtgtaagtataacggtcattacagttcctcctcagatcataaaaatcaaaaggaatagaaaagcaccatcaattacagaaagctctctggaagcaggacatatatctagaagatattttttaattgattgaagaaaaccctctgggagtgtgatgctgccccagctgtggtattctttcagtggctaagctcctcctaagtatgagatgttgtacttagcaagggtttaatccaatctttcttttttctttttcctcccttaaaattttttctttaacaaggttctatgagttgaaatcatcaaaccaggttctacaaaaaccagtgattttgcccctatacagaagatatggcgggtttttccgcactactcatcgacagtgattcatctcacttatgatcacaaagtgagctcatgcttgagcaccaagcacacaagcaataactcactacaccttaacagtggtctatctcactcacagcagatagcttcaacatacaaacttcaaagtttttcaccccagtcactaagaaatcaatgctaggggcaagagcagtcaagctcagacagtgtaaacgaaatttcaaacatcatggcaacaaaggtggtggttaataatcaagcatcaccaaatgttttaatcaagtgatcgacaccaagtctccttggaaggtcaacacccaacgacctccgagccatctcactaatctaccacctgtccgtcaagttctcaacagcagctggtatcgaccgtctccttggcaaccaaagagtagaatgcaaattttacaacatattgttgacattcaccaagaagacctcctcgactattgcaaggggatgaggaagacctcatgcgctgtgataatatctaaggagaagacctctttcgctatcaagacatccaaggggacgaaaaaggtctcttctgttgtgaatacaatagaagggatggtgaagacctctaaggttaaagactaaggacaaattggagaccgcacctacaataattctaatgtgcacccaagacggggaagacatcacccctatcttgggtatactaatttgggagttggtcacatcctcaattgaccaaagaacgaccatctactgcttcaacacaacactggcagacgtcaagaagacctcctccactgtaaagttgaggagataatgaagacctcctttgttgtgaagctgaggagatgatgaaggcctcctccgctgtaaattcgaggggatgttaaagacctcctccattgtaaagccaaggggatgttgaaggcttcctacgttataaaattaaggagttgacgaaggtctcctctgctatcaaaccgaggagatgaacaagactaccttcgctaaactacagcatagggaatgttaaagaacttcaatgctacaacctaagagaagacaaagactacatcaatattcacataaacagacagtgtgacaagagagtcaatgctaggatgatagctgaagattagattaaatgttgacattccaatgtctgcatgatcacaatatctcaaatcaaaagaaatcacccaaggtgtcattaacttaaaatttcaaattccactattcaacaaggaatgggaattcaaaatcctactctcagtgggagtgctcgaagaatagaaacaattatccaagattgtcaaaattgatgcccagctagtagttttgagagaaacggacttaattcacgtcattaagtcaacctcacacaagtataaatttgacctgggagaaaatatttacatcaagagtagccttgaggacgcggacataaatgttggacgtgtagcaagaaagatgacatctcggagttaagtagtcctgagtcatagtaggtcgacctaggaggggtccctatccctgggcccaggttgactttgagaactctaaaatggaagtttgaacttcaataacttgaatccaactcactatctttcagtattctgtaccatgaagacatggagcaacctaatccaatccctgggagatgaaatcacacgaacttgtaacccgaaagccaacatgggcacctcgggtttcacaccgcgctcaggttgacatcctcgactaggattttagatctgagaccgacttagtgaaaaatggtcaaagcatgcattgggtcatcaactagacataccacgaacacatttgaggcatcagaattagaatccgagcaagttagtttttgagcacccggggccctgctaactctatgaaaatagagttatttagctctttttgtccattaaattagttttgttctcaagtagttttaatctattttagtgacttttatttagttttacttaattttgcatacatattaattttattatttatagattagttttagttaacttttgtaacgttttatcaaattattagtttctcattttataattagttcaatttaattatgtgtgattttgtaggtggcttagttgagaagtgtggaatttaaacgggtcaaataatgaaaagaaaatcatttcatgtgcaacaaattaaatgagaagaaattaaagaaaaaggaaagcaaacaagatcacttgatgatggtggcaattttgtgaggtccaagagataacatatatacatatcttggtgcatctattaaatgaatgagaatgggccaagtttatattatgtatggttaaaattaagcccaaaatttacattgatgtattaagaaagaaaggaagagatgagaggagaagaaacattaggcttagcaaaagtcacgtggtagtggagggctttgttttgttcatgaattttgttatcatatatatttatatacgttagggatagttagttttctatttactattgcgttagttatttcggtttggttgttagacagctgtcattggtttgttgtgacagttaatgtttgttgctgctcttatataaacactcttgtaattcattcttaatcaatgaagagttatctttctctctcttatctttctctgcctttttctcactttgttctgttacttcttcattcttctctttctgtctttcatgcctaagaggtttaatacctctaacatggtatcagagccatggtcaccattgctggcgaacatggccaccattgatcctggaaacttgaattctcaccctacacaataagatgctcctgctgcagtaacaagaaatcgaagcaaagaacaagatgataccactgtgtacttcaaccacacaatctcaatcaagttaaatgatcaaaattgccttctctggaagcaacagattcttgctacaattcgtggaaatcgattaatgaaattcattcaagatactcctccacctccacaatacctcagtgatgctaatcaagctgcaagaagactcaatcctgagttcgttaattgggatgttcaagatcaattgctggtttcttggcttctctcttcaatgacagaaagtcttctcacaagaatggtgggctgcaactcaaccagacagatctggaaagctcttgaacaacattacactctgaaggtttcctccaaaatcttggaattcagaaccaaattgcagaaattaaagaaaggcaccttgagcttaaatgattatcttctcaaagtgaagcagcatgtcgacttgttagcatctgtaggtgaggttctctctgatcgagatcatattgctgccatctttaaaggcctacccaatgaatacgataccttcatcatctccactaatacaaggatcgaaggttatactgttggagaaattgaagcgttgcttcttgcttctgaatcttgcattgagaaggaggatcaagaagtggaattcaatgctaatcttgccacagcagaacaagatctagctatggaagcctttcttgctcagtctaatcgaaattacagaccttatcctttcactcgaggtcagtacaatcccagtcatttcaatttttctaactttcctacttctgctttgaataccagaggaaatttttggggtaactcccctagaggagctagtaacaatcaatcctcaactatggcaagaggaagaggaaattgattttcacctgagcagaacaaagttcaatgccaattatgtcacaaaattggccatagtgtcatcgactgcttccatcgatttgataaaagcttcacaggtgttttccatgctactgatcagtcacaagcacaagctcatattgctcaaacatcttaggggacagatgacaattggtacctcgattccggtgctaccaatcactgcactccaaatggtcaaaatatcatgacaccagttgaatttaagggtcctgaacagttgtatgttggaaatggagttggtctgcctgtctccaaattggtaatgcctatcttctatccaattcttgcaataaacatcttgttcttacaaatttacttcatgtgcgtaaaatcacaaagattttacttagtgtttctaagtttgctacagataacaatgtttactttgtgttttatcctaatgtgtgttatgtcaaggatcaggtgagcaatatcacactgctgactgggagacatcacaatggcctatatacttttgactctagccaactccacttgtctgcaacctcatctcccaattgtgccaaacctgaccaaccatccactcatgttgttactgctgatcctcctcaaaatgatcctaattcagtcaactcatctctctgttttcagtgtaataatagcaataataaatttgaactgtggcataatcaccttggtcatccctcagaaaggttagtgaagtctgttctttcccaatgtaatattcctcttatgaataaaatgtcaaactctatttgcaaagcttgttgtttaggcaaaatacacaaactcccttttttcaaaaatgtctgaaacatgttataatgctcccttgcaacttgtgcattcagatttatggggtccctcattcactacttcacacaatggatacaaatattatacactttatagatgcctactctagattcacttggctatatcttctcaaaaataaacatgatacaatcaaagtctttcatatttttaaagccgagattgagttgcaattaggcaccaaaattaaagtgtttcaatccgattgggggtgaatataggtcctttacagactctttacagcaatctggtatagtgcatagaaaaccttgtcccactacccatgaacaaaatgggattgctgaacgaaaacatagacacattgttgaacatggtcttgcccttttagctcatgccaatctacctctaaaatattgggatgaagcctttaggacagcagtgtatcttcataacagacttcccacccctgttctctctctcaaatctcccattgaagtcttgttcaacattaaacccgattatagcattcttaaagtctttggttgcacatgttttcccaacattaggccctataacaaacacaagttagagtttagatcttccccttgtatattcattggctatagtttaaatcacaagggctacaaatgtattgacaaagctggcaggctgtatatttcacgcgatgttatctttgatgaaaactcatttcctcacaatcactctatcattgaatctatcacttcttctaatctcatgactgccacttctgctacaatacctattgctcccactctttatactgttggctctctttttccatatgatattgctgtattaccaactgactcacatgatcctcttttcacttgttctcatcttcctgatgatggtacaagtaacattatccagggatctagctctcacaactttccaaccaactgtgcctcagcccctcatctacatcagctgccttctataatccctaattctgttcctaagcaacagattgtcaacaatgttggaggttcttttgctatccccaatgaaacagcacctgacattgctcctagcaacaacactgttgctacaataatacctactgaagctactgtcaacatcatgtctgttcttgatgccaatactgcttccacagtgacaagaaacactcacaacatgacaactcgtgccaaaaatgggatcaaaaagccaaaagcttatcttgtcactcaacttcctaccacattaaaacaggctcggcagcagttacaatggaacaaagccatggcagatgaagtggttgcactcaaaaagaataaaacctacacccttgttaagctaccccctggtaggactgcaataggttgcaaatgggtctataggattaaagaaaatcctgatggaagtgttgataagctcaaagcccaattggttgccaaggggtttcaccaacaaccagggtttgattttacagaaacatttagcccagttgtcaaacttgttacaataagggttgttcttactcttgctctttccgaagattgggatagaaggcaacttgatgttaataatgctttcctcaatggtgagctacaagaggaagtctacatggctcaaccccttggttttgaagatccagattcccctgatcttgtttgtaagctacacaaagctttttattgtctcaaacaagctcctcgagcttggtttgagaaactccacagttgtttgcttaatcttggctttgtctcctcaaaatcagaccatagtctctttattagacacacaccattgtccatgacaatcatccttgtttatgtggatgacattattataactggtagtgatcccagcttgatctctcatgacacaacagccttaaatgctctgtaaagtccattttggcaagttagtggacaaaatatttttaatttaatggtaagatattcttgcatttattaccgatttcttaccttgcatttttggatctagttcctcttttcttggttaggaaagatgcttttgatgctaaactttcctttgtttggaaacttattgtaagagaatcttttctcttat

SEQ ID NO: 162657 - DNA, 3188 bp, Cannabis sativa
ggatttagtagttaccttttttagattttattatttttgacccattactaaatttacgttttaattaaaagatttttgctccttacccgtcaaaaaaaaatggaaaaaagatgagaaattatctaatacaccataatttgtaactttttttctatttttacgttattattttatacttcctacttttataaaacttattttgcataaatataaattaataaacttataattttcatttatacgtttacttatttctaaaacaaattatttccccttttcagcttcttcctccacgcaagagagagcttcacaaggccaccttctgcatccaaacctctcgaattcggcgcatcaaccaccagatgcaaccctcccattcccttactcgaactctctatcgaccctttcttctgttgctcactcatcaaagttatcgtagaagtataaacattatcaacctccttctctaactgatcggagagaaggaattctatttgagtatagtcaagtgacatatgggtcgttgggttgttgaactcgggtccattaccacattcacaggtacgagtttattatttgtacctttcatctatttcatttctcttctcttttcatatttttttttatttatctctgcatatatttgttcctatggttctctacggttgtaattttatttttattctctaattagtgattaagtaattaaatcaatttgtgctttgttctttgaatgctgagagttgagatgagaccattagtatgaaaaatagtcatagtcaagtgattgtctctattttgtagagttctatattgattctaggtctttctaacagggctacgatttagttattatccgtttgtttttttttttttttttgtaataatcaagtattcccctcaaactccattctttttcctagctcatggattcacattttaagtttgttttgcttttgttcattactttagggatatacattatgaagtgctcccaaaaattcattggctttcataatccgagctctgtctcataatcatttatgattttggttaattgatttaaattttctaataggtggtgaatggtgtcttgggtttcattgggtttggtagtaaaatcataatatgtgattttggaataggttatttagttttttttttctgtttatgatgttatctcatagagaagattatgaggaaatttgaaaaggatggttagtacatgtaaatttcttaatagtttatgttatactttaaatttttccctttatatattacatgatctggttgtagttatatccaataggtataacagttttttttgtgcttacagtctagtagatgtgaaagtcttaaagttattgttgtaactactccagggacttattatatagtgtgagatatttgatgttttgaatttcttatttgtgtgtcttgaactttcatttgatttgtttgttgacttgtactaaaatatatatgcacaaacatcatcttatatgggtacaaactttcgtttgatttcttggtcattggatttgcttatttacgcagtagaagaagatataccattagcagcaataatttctattgatgtttactcattagctacttactcacttatactatcttgggagctattttaggtgtctaactttcactttggtgagtgtttggtttcaaaaaatttagctggtcaatgcctaaaattgagttgtttccatttttaatgttatttgtttctattttttatgttagatgaggttaaatgctagttgttttcatttcacaacaaactatagtgtctattccgagattatgttatttccatttcgcaacaagctatgaaagatattgctacaaattttgttttagaacatatccctttctactaatgatctcgtcttgttgtggctttcaatgtggaagtggctgtgatgggggctagcccattttctacttggagataccttgtccatcatggtgttgtgactgaagtggtaagaccttttgttttatttttgtcttccatggtgaaggatgggatctagctttacatttcttatgtacttgcgcttatgaaattatgtattattattagaaaaatattccttttttatttttgtcaatgttccatcgagcagtagctaatgatttttattttttttatgactgttgactctggattttatatctgcaagtgtgacccgtatttcgatgatactgattattctcatcctggttgcgagcttggatttctaactccgaaatgtgctagaaagtgagttgacaagaaccaattcaagaagaattcaaagcattataataataatgcatacataatcaagtccgacccccacagtattatggatgaagtttatatgaatggtccaattgaactttcattcaccatttatgaggtaacatctggtttcatactttttagttagcaatttaaatgtagaaagaaaatgacttaatttccaaatgtacatgctctgcttcttaagcttctctaaaactattcttaagattttgctcacttcaaatgaagagtttacaaacacataacaggataagaaataggaggtcatgctgttaagctaactggatgggaaactagtgataatgggaacgactattgagtaatttatacgctatacctctaactttcaacttttaatgttgtgaggtattatgctgattttgttctttcttttgatgcagcttcttgcaaatcagatggggtgggtgatctaagtcccttttaaaacttcctctatttttagtaaatgtatctattgaaatatgtgacaattttgattttttctttctggatggcaggatggttacttcatgatcaggagaggaacaaatgagtgtggtatcgaagatgatatggttgctggtctgctttcaaagtgaaatattatcaaagaggttgcaagtgctgatgccttttcggatgcttcgtattgattttaaaacttttcatttacactcaatgttcaagcagaaaataaaaggactccaaatttctactagtatcatcatattatactctattagtttagaattcaattattttacttatggattagttggaatttatcttttgtatcatataatgaacacagaacatattattggttgaatacctccatatatatatactaggtaagagt

SEQ ID NO: 162658 - DNA, 3707 bp, Cannabis sativa
gagagagagagagagagaaggtcattccttctttgtttaggaagaactcctgtgctttctttgtttctgatccataaggggctgtacccttctgctgaaattgttgttactgctcctggatatgattctttcggttggagacactttgttgtatgcttacttctgggtttagtcatctctcaataatacatgaagtgtcgaatttttaagtcttaacttgtgcgtggactgaatttgtgcttgggatgaagtttaaatcctgtattcatggttaatgtaggtgtgtcactgtcactacgtcctctattacattacatactattaaattgagtcaaaggaatgaattgacttgtttggggtctgccaaacaggatagacttagatcacaatgataaatttcaggctagtatacgtgcacatttcattagtactcgttctatttaagaagatattttgtttttgatagtaataataacaaagactagcttacttttttttattcttcatattatgccactatgatgtatcttgctggttctccatgttattaattttgatgatgtatttatgtatgtggttgttttccgttgatcagtttctgatggccatattaaacgtcctcatgatgaggacatacagtctgatgtgctagagatagttggatcaaatattcagtcaacatacatcacctgtccagtagacccaaatgcaacacttggtataaaactaccattcctggttataatcgtaaagaatctgaagaaatattttacatttgagattcaagttcttgatgacaagaatgtcaggcgacgtttccgagcttcgaattttcaagtgtgtaagtttgcccttgtttagtcatgtttatcaatttttttatggttctaccttctttatttgatcttatcacatctacttttatttttattttggcgagatagatgtttaattagtgatatgcttccaaataggtatcttttttcacttagagacgagaggttgtagattgactatgcatagaatctttaactagacaatcacagtggtgtataagaatgacattttaggtcaatttgggatgagcttggtttggataccatgttatggcagttattgtttcttttgttttgttttttagattgcagtggcaatatgttggattttaacctcttataagaaatagaaagtccattcataaaattctgtaatagaacaagtagtctccacaaatagaacaactgattgaggaagaaccagtgatatttaagtttttatataacttgtcctaaaatcgaagtatcaaatacaataagaaaacatagatgcttaagccagtctagtataattagatgaacagagtcaggtgttgggtggtgataggaaccaaaatctgtaaatggctattgagccttctccattgacattcaatccaagatttacaagaaatgcgagccgagccatcccttaagcctgctaaagaattctagagaatctccaaagttcacaaaaaaatccctgctcgatattttcttccactcttacttacaaaacaacaataaccatacaaccaacatttagaataccccatgattaacaattaattacttaccatttctacttctaatattgaccaagtatttatcaatcgactttttaaacgatgaggcggaagagtttatttgtattgtattgggattgttaggggcctagggtttgggaatatcttgtcccctgtactgaactgaattgttctttttttaaagaaagtagttatatgcatagacactgaaggatctagattttgcctaccatgcccctgaaaatgttaaaacacttaggcaagttactgtttaacaactcaaaccaaactgctggaatacaagcttattaacgctattgacgattcctgacaaaaaactcatttttattttgattctctaaccataaataacttgaaactttgaattgcaaatgacttctgatccttgatactatgtttttgtctgcttcttttatctatggtagagcgatagttatggtgaatttgttgcatagagactgctccctttaattgagagtggggtgtttgtttaggagttcttagaatagatgctggcctctttgtattttgaagaataaaaagctatgtgccaagttatgggatacctatacttggagtttttacagtgctggtacagtgaagatgacatttttctccgagtaccatataattattaagcttttggcaggctgtgactcgtgtgaagccgtatatctgcaccatgccgctaaaaatggatgagggctggaatcaaatacagtttaatctagctgattttaccaggagagcttatggaacaaactatgtggagacattgcgagttcaggttcatgcaaactgtcgtctgaggcgtatatatttttctgaacgcatgtgttcggaggaggaacttcccccagaattcaagctgtaccttccaatgcaacaacaggtaaaatatcttacctgatgatctcatgtcagatggtgcttgaatcaaatctaactacaatttttactttattgcagaaagcttgatatggtaattttgaatggtgtgatctgttagagaagggcttcaactctcaagaccgtgaacttgattatgccatatatattatatatattttaagaatatgtttattaatctatagttctagttgatcaaattttttcaattctgatggagcttcatagttcttagcagattctgaactttatctgtatggaatggtttacatttttcaagattctaagctttattattttacatgtttttgtgctcaagacatttttcagacaacattctccttacatatcaagtttatttattttttttatttgcaaacgccatccttgatttgcaataaaggataagttgtagtcacggagatcccggaagccaagaccaccaacatgcttgtgtttagtcgaactcatccaactcacacctttgcttgaagaattagattgggacttccaccaacacttagacattcgtccttctaaatccgaacaaatttccttagtaagcaagaagacgctcatagcataactaggcagcgcttgagcaatagaccgaatcaaaacttatttgccagctttagataaaaattgactcttccaattaaaaatcctcttcttcatcttgtctttgagaaagtcaagaattgtatttttatttcggcccataatacaaggtaagtcaagataaaggctattatcaaaagcttcagccatttgtagcatgttacacaaacaggactgagcatcggcgagagtattcttactaaagaaaattgatgacttaaagaaattcacttgtggacccgaagccatttcatacatttggagaatatgaagaatactagcagcctcctcctctttagccttgcaatacacataactatcgtcagcgaaaagtatatgcgagacaacaggagcacccctcgctactctaataccagaaatacgatgatgtcgttcaaaagccttcaatagagaggagaaaccttcccacaaataaggaagagataaggagacaaaggatccccttgtctcaattctcttccaggagtaataggccccatagtatgcccaccacgagtaatcttttaccttaccgtgctaacacaaaacatgatcaaagaaaccacccttctat

SEQ ID NO: 162659 - DNA, 1620 bp, Cannabis sativa
aaaaaaaaaaaaaaaaaaaaaaaacattcacttcatttgttgtggatctttggattacagagaaaaaaaaaaataagaatttgataagagactgaattcattgaaggaggtggtggttgaatttgtcaatggtttgtgaaacgaagtaggtgcataaaattttagagagacaaaggaagaaccgagagagaaactatcaaaaaaaaaaaaaaaaattaaaaaagaaaagatcagaaataatataaaaataaagatgtttaataatttggtgttcctcactcaaataaaacaaaacttcattaaataaagtgtcaacttcttaggctcttagacaccctaccaatggagttgtcctataaaaaattctccatatatttatatataaacctatatatagtagaactatatgaattatgtcatgatcagaagaagcatttaattagtagagaagtataagaaaatcaatggatgtggagtgaaattatatatgaacattaaacaattatagatagtacattcttaataatattaattagaaacatgaattattactaattataacatgtcttgtatttatatatgtgttgaaccattaaaaaattcataattaataataccgactaagttgtgtgacgtaccactttatatatatagtgttattcaatgaattgtatagtagctagaaaagcaattaaataaaaataaaaatttaagttattgaagttcaatattagctagtttcaaatatgataggaatgaccatatgcttaaatttcttattacaaaacaattaatgatatgttatttaattaatctacatctacaatatgatcatgaaatgatttttatcatttgaattacgtactctgtgtatccatttaaaataaaataataataataataataatatttttttaaaaaaaaaaaaaaaaagctacataggcttattaaaatgttgtttttaacagatattttaatttatttttaaaatattaatttcttacactttataagttttacattttaatgtattattattattattattattattatttccgaaaaaaagaaaggggttttttagagagaaaaaagaaaggtttccagatacgaaattgttgccttcaagtagaagcaaactcctgaaaatattctagaacttaattaattatattatttatattgtatatattaaataaattatattgtaaattattttattattaattgaacaatatttgttttatcacaacccttcaccttcttgtgaaagtcgtcctttgaatttgtcataaccttgttataaaaacaacattaaaaaagatatgcaatataaaaataacatatataaaaacgtggcaattatgtgtatatatggatttgaggtcatttttgtttatagtattttttgccgctaaacttttttagttgtcgtttcacttgtatttaatcttcaaagttcaaattttaaaagtaaaactctccaaaatactgaactggtaacaaatttaattaaggtatcattcagttatctgtcatcgtgagatgtttatatgtgtacactcagtggcggacccagaatttaaagtgaggggggcgtaaataaatttaaaaagaaaa

SEQ ID NO: 162660 - DNA, 2413 bp, Cannabis sativa
tagggcatcgtcctgaataaatgataatgcatatactccaactccttcaagttcaaactacttcaatttaaatatcgattctttgcaacactcattccattccgattcataggcctataatttttcatggatattttacggtcattcattagtgttcattttatgctacactgatgttaagctaatgaacacatcaacgtttattcttttacgtgagttgtgcaatttgttgcttttaaatcaacttctacgcaacttaattatttggttaatcatatttaaatcttctatgagcaattatggtatatatttcttgctgaaaactttttttactgagtgatcattatagttaggtcacaccatcctagtggaataaaatatagaatctctaaaaatatttttttatttattttataattaatattgtaaatatttttcttattatgatttgtttataataaggaaaacgaaaaaaaaaaagaatttcaaaaagtatattcgacttaattgtgtgtatatatatatatttattgtgtgaacacttattgctcttaataatcgttttttacataaaaatagttaaaattactcataatagctttgtacgaaaaaatttattcacccataaaatgtaatattatagtcataatcctacaaaaaataatattaaatgactaagtttgggcatcattttatcccgtcagcaaaaactggctagagagggtaacattttgcttgccacaccaaatctgtaccacttttaagaaattaaaacttatattttacaaaagtggctccactcccataatattagttaaaaatatttatgatgaaaagtaggtacatagtaggcaacctatcgaataatggaaaagaagaaattgtgtgttcattgtttaatgaaagtgagtttgaataattcaaagatatagcaatagttattgtttaatgaaagtgagtttgaataattcaaagatatagcaatagttctctatctctatcatcagcattaatattattatagggaaggatttggtaattaagcatccatattcaactaatgactgagccaagtacttctagaaacccagagacagtctctcttactattgaatttaaatagtttcaaaaatcacccccttataaattaaatacagctacctgatcctaataataaataaatgcattttttgaaaactaacatggatgaatattattttaatatttttcaattttttgtatgtaaagatagtccaacaccttcgtttgcatgaggaatgaaataatttgaatatatagtatatgttttaatggtgtctcttgggattttccatcacgaaattccaaaattggatacattattaaatgaatatagatttgactttaaaagtgttcaaaaaaatgtatataatctaccgtatctactcaagcttgaaacttgcaatatattataacaatcatgtatctagtacaaacttccaatagcttcaaatatttgagctatacatcctctaatcatatataactaataatcaagtttgtatttggaaaacactatacacatattatattatcacactataagcaatataatcgactcgaagtatatagtgcatgcaatcttcaatattcacaactataaactttttgctcaaagcttctgaaaagaaaaattcttcgccaatttgaacctaatgttgcctcaatttatattataactttctctattctctatatagttttttcttttatgtttattaaaaaaaatatataactttacgttatgttataatcacaacatattataaaattagtaaacacttcgcgtttcgcagcaaatgtataaaatattttaaattatatattttaattaataataattacttagtaaaattatattaaaattttaaatttattattaaaaaatttgtgacataaatacttaaaatattgaatttgttgttataaataccgaaattcgaaaaatagtagcataaatcttcaaatttctaaacttaacagttttataattttattggtacccaatataatggtcttgatcggagaccaaatcaaataataaaaagaagacagatttgagtttggatttgattcatttataatgtaatttttattctgatatgtttgttaagttctaggttcgaattttattgtgtgtttttaatgtttgagttttagtgttttattgagattctactgtttaagtttgtgtttatgagatcttattttttaatttatttcttttcataaattttgagaacttaaaatttgatgttgttcctattgattattgggattgtttaatttttcatacgggaattaaagtttgccttttcgtttcattgattgaaaaatattagtagaaagtttatgaaatgagaattttgaatat

SEQ ID NO: 162661 - DNA, 2566 bp, Cannabis sativa
  modified_base (1926)..(1926): a, c, t, g, unknown or other
  modified_base (2387)..(2395): a, c, t, g, unknown or other
atcattgcatttgaattagtgaaaccttaagagatactttaaggtgtgaagcattattattggacaataatagtaatgcctagtgtagaggcttattagtaatttgaaaaaagtgtgaaaatctattaggagattgatactggtactctttcgaaaagtgcatttagagatttgtcatgtttcaaagaggactatattctatcattggtgcttttattgagagatgaactcaagtcagcgccaaactccaaatatactctttgagacagtgtcaatttttaattgaactaaaattttattttctcattccatacacaattacatatttataggccttcacactatttttaaattattaataagtccctacactatacacacggtgtcatcttataatttaattaatttatatgaaaaccgatttttgaaggtgctaggcaccattgatgctttgatgaacattgatattgggaaatttctagcatcacctaaaagtggtaccttgtaatttgcgatatttttaaaagtttttttgtaaaaaaatttttgcaaagtactctaaaagttatttaattaatttatatgacactcaatacttaattgcactaagtttgtttttgctttttgcttttagtattttgtgaagttctttttgagaaagctaaattaaagctttttagagttaaaacttaaaatccactcgttacccaactagtggaagtgattttggagcttcagaagcccaaaaagcagcttttataagcccaatcaaccacaaccttaaaaaatactaccactcgtaacacgccatgtcatgttactatagcgataagtagcttaaggtgtttaatatcaacgactcttttaattatgatattatttgatttgattttgattttaattttgttttaggaggagattgaggttgaagccaagactttgaggatgggaaaagcaattggtgttgtgagtgttgagtttagaaagaagaaaagtggtaaaattgttgctcaaggtcgtcatactaagtactttggtatttcaagtagattatgaagaaaaaattgagttcattttcttatgttaatgtatggatttagtttacaataaaggaatgatcctttttcttgttattatacaacatcaaaaggaaatagagtctagactagtataatataccaaatgaaacatcaatattttacctaaaataaatgaacttattaaaattgtgtatttatttaaaaattaaatttagtgatatagattgaatatttctacttaaaaattacaaaaaaaaaaaattaattaattttctcaactatgtttaaaagaagcaattcataattaactcatgaagtataaaagaaaaataatattaaaaaaattacaaattttaaagtattaatagttgatatagaggcacaatttaaacaaattttttttctcaatgtcttttttgggttctctaaatgacagtgttgagtgtttttttttcagttgttttatttgagatgaatgtagatagggatagtgaaattgggcaatttagtgggtcgagtcggggcctgtcgtgggacatccagttcgctatttgcgtcttcgccccacctcactacttattttattggtttggggctgacccgaccaaccccagttcaattttttctcaacacattatgggcgattagctgtatgacaatactgaccttacgacatattaaagcttattctatgaagctatcattctacctcgaatattttgatttttatgcttcaacaacacatcttaatattttgatgcacaatggtcttgacttcgtccccatgaaatttcatgaattttggagatgtgtagagtaagattttaacagaaccctaacgagtgtaagagtaaggaaaaaatttgttaaaatttaccctgaaaanaagaatatttttaatttttgaattaggggccattttaaccaaatttaacgtgaaatcaatcttcatattcacgtcttagttgcaccaattcaatgtgactagtggcaaaaaatatttcgagatgggttcgggccacatttcacataggggtagtactatcagaaatgtgagattttcactaattcgattaaaataacttattagtgcatgaaaactactttttctgtcaacatgtctaatagaaaagtgatgcacaatggtcttgcctttgtccctgtaaaatgtccaataaaatttaccctgaaaagaaaaatatattcatcttttgaattaggggccatttgaataaaatttaacgcaaatttaatcttcatattcatgtcttagtagcacgaattcattgtgactagtggcaaaaaatattccaagatgggttcaggccacatttcacaaaggggtannnnnnnnngaaatgtgacattttcactatttttattaaaatgattgttagtgcatgaaaacaactatttctctgaaagtgtccaatagaaaagtattgcacaacggtcttgacttcgtccccgtgaaatttcaagattttttgagatgtgtaggttgagattttaatagaacactaacg

SEQ ID NO: 162662 - DNA, 2317 bp, Cannabis sativa
actggtaaaagttacttttatcagggcaatagcaaactgtgatggtaagagtggcatttcttgtagtgattagtataattaagcaatgtctcacacaatataatttaattaattattataaatatcgctaatcatttacaaagcatctcttataaatctaagcactaccatgctcaaattcaaactcagtttttcaacttcttcttatatatataaacattaaatatttagatataagggcaacacgtgtatgtcaccacacatatatacatcaattttttttgataaatttaatcacactatatacatcaaattttgattctattaatatagtgtagtatgtatcatcaataaatgtatatatcaattattatttcttattggacatatgtatattttagtattgtttttattttaattaattaatatatttatatatataaacatgtggatatatagtttatttatttaaagtttgaagtatataggtaacaataacgtactaacgataacacgttacacattattataccgacaaaaatttggtggctatttcactaaaccctaattagttttattttctggctagtatgctaagttttggcaacaatatataatatgagacacaattttattccgtgatgtatttttacgggatgtattccgtagtacattagatgagtctcaggttacattagatgagatgagtgtcagggtacgttactatttttttaccttacccctagatcaatctcaaccctcagatcaaataactctctcatctaacgggtgccacacattacggaatacattccatgaaagtacaatcacgggacaaaatcatgtccctatatattatatattaactttctgaatttggaaaagaatgatcataattaaagatcaaaaatgacacttatatataaaggaaatggaggcccattaaataatatatatttatcacatggatatcaatttttttttttttaataaattaatcatacaatttttatttatagtaattagttaaattgatagtttataattttatcgagacattttctttcattacagatatgattaagattagaattagaaaaatataagctaaataattaacttcctaattttcagactatttgataaaaaaaataacagcatcaaagttaccttaagaatatctatactcagttttatctacaactcagaagatacaacagtagaaactgttgcagcatgttcattcatattttcgtagcttaaacatttaactattgtgcaaggtacgcaactacactactaacaaccccctttaggcgcaaagaacttgtttttctcaaccacaacgatttgatgtcaatccatcaaacaataaaaaagaaccaacaacgaaacaaaataaaataatatatatcacacagattagactaaaaatattcgaaaccatgtcacaaagacaagactaacaatataacaaaaatcgatcgcaataaaaaaatataatcccaatcaagctgcatatatatgcctagagaagacccgcgggcctagacaaaaaaaaattacaacctcctatagccattaatttaagaaagagaagctctagttttttaatttaatcattattacttgatcataataattaactactaattattacagtaatctctagtttgctataatattttaattaaattaacaattgagggtcaaattgtatatatacctttccaaaaaaaaaagtcaaagtatatatagaactactaataaaacttgtaaaatgaaaagcatatttaaaaaattctaataaattgagggaaggagagctggttatatcctaaattaattagacaaacttacttctacatattataatttatatatataaataaatatatataattttatagtatttttatatttataatattgtataataagtaggaagaaaaagagttttagtatgcatatttttctctcttagctaaacttaaataattaatggattaatgtgtatattgatttatcaatttgtgtagatttataatacaagaataatttgaagatgtaaatgagctagcttgtagtgaatatattttattattgtgtataatttgtctgtaaattggcttggcttatactataaaaaattgtataatatattttggaccaattggaggtgggtcgaagtgttttaaattcaaaaatataaactctgcaaagtagggctgtacataaatttttgtaaaccgcctaacccgaataacccgcccaaaccaaaccgaaaaacccgacaaaaatttcaaaccgaaaaacc

SEQ ID NO: 162663 - DNA, 1116 bp, Cannabis sativa
aaaagtatgttcccggctacaccatataataaccattattaattcaaacaatatttgaaaagtaaaaaacaggtgcatgcgtgcatgtgtgtattcatgtacctatactacaaagatgtacgtatagcaaatatatactggcagagatgctagccaaagcataattggatatcatatatctatattttcttttctttgcttttttttttcttgacaatggaaatacttaattatatatattctttctataaaagaaaaagaaaaagtcatttgcttgattgcttcttgttggatattagtatatataatattaatactcatcattatattttatcaaatgaccatcatactagctatctttcaaaatggatactagtgttggccaccatatagtggtttagattgctataatcaattaatatataagtgagtgaattttggcaaatgcgcttccacttcgaatttcgtctgatcatatatattattatggatcatcatcttaatcttgatattcttttttcatttatttttcctttaactaaaaaatgagtatcactaagtgacaaattaagaaatataatataaaattttaccttatcaactaggaatctatacgtaaatacttccccagggtttatagcacactgggagattgaggctgtaccatctgcccaaggtgtacccaactgaacaaaacacaaaccaattaattaggacaatttacattacaatttacaatattagagcattactatgaggtaatatttacctgtctaattccatgccaatggatgacgacaccttcggtgtggagcttgttggtgaggtgaacgacgacggtgtcgccagcgttggccctaatagtggggccagggaactggccattgatgcccatcaccacgtgctccttgcaatcgggtgccccaaaaatgtactctacatcgaagttgtagtgtcgaacctgagttcggccaccaacaacagccacagcaagaagagatagcagaatcaaggagcgtatcatcaattgtcccattactcctctgctctgaggacttttattaaccattctgtttaatttgtatttatatatatatataactaaatatatatata

SEQ ID NO: 162664 - DNA, 2368 bp, Cannabis sativa
atgagacatgatggtgggatcgatgtgatcaagaaggctattgagaaactaggcaagcgccacaaggagcacattgcagcatatggtgaaggaaatgagaggagattgaccggtcgccacgagacggctgacatcagctcgttttcgtgggtatgtattctatagttctttgcagaaatggccttaagacaccctttacatcctgttggaaattcttgacattctagttttgacaagcttaccttaataggatccaacaaatttgtgttattttacaagtctgtcaaaagaaaaaacagaaaagttactcttttttcttcattttctttaacaaaacttgttataattaacagggtgtggcgaatcgtggagcatctgttcgtatcggccgtgatactgagaaagcaggaaaaggttagtttaaatgtcatcttggcctagaacttcacatgatgagagaaaagtactataaaaacaagtcaatttcaactaagtcaaaaccatcattaaatcattttgatgactatgccacacaatatgggaatcataaatttgcttgttcaagattaaaaacaccatgctgctccattgaattgtaatctcttgaatttgagtcttactactctcttgattagggagcacaagtcttaaatctagttaatttgttttgtggccaatttctctctgcatattatgacaacaaacttcatcacttttttcttttgtgctcttgatttgtgacaggctacttcgaagacagaaggccatcatcgaacatggatccatacattgtcacgtcaatgatcgctgagaccaccattctctggaagccatagaagtgaagctaagttttgaaggtgactcaaagtgagtaggaaatgacatatattcaaataagcctatcttttgtgggttactgttttaatgtactctttctgatttttgttatgtgtttaaacttttgatcatctcacccttgtgtttaagtactttgcttttatttggttatgattttgctattgaattctcattatgtattttgttaaaccacaagaaaaacatcaacaaaaaagggtgatattgaaataagttagtaaattacaatgcataaaattaataaataaataatgcattaagattgtcaatcacatttggccaagagtgacattatacatgcccctaagaggagtgagaaacttgcccctatttggatcttgaaattgcataccattttagagttcataaaatcagaggcaagaagatcaacaagagccatgtatattagtattccagctgatgctgctaagagaagaccttcaataattagtgatgaagagcttttctcattgtaactcttggatattccaatcccaactactatcccaattggtgtggtcagtgaaaaaaataccaccattattgctactgttttgcacttgaaatttgcctgttcaataatataagtgaaaattatacatattacgagttttttttatatattttgtgcaaaaaaaatgttttttttttttaaaaaaaaagtaaatatatttttctatatttttttaacttttttttttaatttttcccacataataattttttttttttaaaaaaaaaaacctatatttttgtaaactttgcaaagaaaaaaaacataaaaataaaaattccccctaatataaaactaaattattggtttataattgggcatatcataattgatacatgtaattccattttctttatattttcttgttaaactaaaaaaattgaatataatctaaattgttttaaaaaaaatcaaaggatcactttggacttagctcacccaattattataatattaatttgaagagtgctaattaaaactttacgtttaaaattacatgtcagaatatttttctttcaaaatttttttatagcagtattcattgtaattactgtatcattcttgtaaatttttgaatagtttacaatgctaaaaatagatttcctgatatttcagtttacaacgttcgttcaaaaaactttaaacatatttttggcactgtaaattattcgaaaattttcaaaaatttacatggatgatattgtaagtataactaacaccgttatgaaaaaaaattgaaaaaaaatatcccaacatgtattttcgagcatagaaattgactaaaaggttgtaataagaagttacagtatcactcctcttttaatttttaatttcataagttgctatgtagcaccaatttggtaggagtttaggagaaaaaattaaaaacaatgtaataatataagagcatgtttggtattgttttctattttttattttcaaaaaattatttttagaaatgaaaacaaaaaatagttt

SEQ ID NO: 162665 - DNA, 4278 bp, Cannabis sativa
aactatcctcattagcctcggctagtcccataagtgtacaaacttgactccgaacctcatcacttgtattcttgttgaaaaaaacaggaattgttaaaattcaccttttggccaggccccaactcataaatttgaaaaagctgcatcactctttgagcttccctaccattagccttgcaatacacatagctatcatctgcgaaaagcatatgagaaactcttggagcaccactagcaactttacaccgagttaaccattgatgtctttcatactttttcaagagagccgaaaaaccctcggcacaaataagaaaaagataaggagatagagggtctccttggcgcaagcctttaccaggacaaattggacccatagtatgaccaccatgtgtgacattataggtaacggtagagacacagaacataatccactcccccacccttttgtcaaaccccattcgaatcaagagcgactcaataaaagcccattccacccagtcatatgctttactcatatcaagtttgaccgccatatagccttccttcccaaccctttttcgtttcaagtagtgcattatttcaaaagataccatcacattatcagaaatcaatcttcccggaataaacgcactttgattatcagaaataacattgggcaatactcctttcaaacgattagccaaaaccttagatatgatcttatacaacacattgcataaagaaataggacgaagattggtcattacctcaggttgtttcttttttggaataagcacaatgtttgtgttatttaattccttaggaaaaaagccatccatgaaaaatttcttcacaaaagtcacaatatcatgactcaccgtgctccaacatttctggtaaaagcccagagtcatgccatcaggtgcaggagatttttccggatgcatctgaaacaaggctctttttatctcctcatccacaatcggctcaagaagcatattattttgagcagccgagactgtattgggaacacagtcaacaacctcagcaaaactaagtccagaaggagagaacaaaccagtaaagtaatcgacaacaacttgcgagagtccaccttgccaatctacccactcaccagtatcaactttcagcctttggattacatttcgatgcctcctagttgtagcagtagcatggaaatacttagaattactatccccttctctaagccaaagttgcttactcctttgcttccaaaaaatttctttttggagcagaatattattcaaattattaactgcctgctgatggttttcaaccgcaactgagtcactccctttcttccaatggcgaatctctttcttgcattcctttatacgctgagaaaagttaccagtaaaatctttcccccaaatcttaagagcctccccacaagcttttaatttctcaagaacaccattactattatgcaaaaaccagttatcagcaataatcttcaaacaaacgggttcatttaaccatgagttttcaaaacgaaaaattcatgtttcgagcaaccacgacttgattaacagggattaaatgtatagcgcaatgattagaggtggaaacttttaaatttaaaagtttagcagaaggggaaagatctaaccatggttgactcgccaaggctcgatcaatacgcacctccacccagtcgatagttccacgccgatgctcccaggtatacggatgcccaaacagttctaaatcatgaagcccacattcagacaaaacatcattaaacccatcaacaagccagtttggatatggaatgcccccacgtttatcctcacttgaagtgatgttattaagatcgccgattatacaccaaggcagactttgcttatttttcagttcagttaataagtcccaagtctttctccttaaatgtctttttggttctccatataagcctcttaatctccattgtccataaacaccatcagtcacaataacatcaataaactctctaccgaactcaatcacccgaacctcttcttcaaacctccagaaaagagcaacaccaccactttttcccaaagggtcaaccgaaatagccccttcaaaaccgatagaaacacgtaccttctcaatcacttctctcctggctaacatttcacataagaacaaaaagttggctttcttttggatcacaagatccttaatgaattgatgagcccatgggttcccaagcccatggcaattccaagaaataatactcatgatgatgggtgggcctgagacacaaggcccacctttgaaacgttttttgatccctcaatatcttcattcatttggcccatattgaccccagttaaatcaggttcaacaaagcctttttccatttcagtatgcctacgtttgttctccataatcaacaacaaatcatcttcattaatttcagcctcatttggaattccttccttactactagcaccaggctgtacattagtaacaccatctttactcattaaaacacttttatttttccctagaatcatgggatcactatcctgtctcaagtcaacattgtcaatttccatgattttcggctccattactgctccatcaacaaccctgcttcgacgagaatctccaccgtccccagctatctccaccgcatccaactctgagcgaagccactatgctccaattagatagttcttccttctaatttgagctttcattccaattccatacggcttgacaatttgatctagagcttgatcaaaccgtctcgtacaaaacctctcagaatgtccaatgataccacagacaaaacagaatgtaggcacatgttcatacttaaaattcgcccaaatccattctccattctccttgcagagcttcatacgacgtttcaaaggtttctcaatgtttatggaggcacgaacacgcaagtaatccctccataaaccattgaagttttttggatccgccttgataaacttaccaacatattccccagcactttgcacctccttttcgagcatgaatcctgtcttcaaatcatgtatttgaacccacatatcaagggtgtacaacagaaccttctttggatcttctcctctcttaattctctgaaaaataagaggacacttattgaaagtccatggacttccatcaataacagattgaacatccaactcatgatagaattgaaaaagatacctatttgtatctaattcctttatgtatactccctttcccggctgccatattgctcatatcttcctaccccctgattactgctagaagccatactcaccagaagcaaacaaatattaccacaatcaaacaaatcacaaaacttgcatcaacatgtcaaaggacaagacgtgaggtgcattttaatatcacaaatctagtgaattaaatgaatgtgatgattatgtaaataagtaatgttttaatattttttttttcaattttttaagttggagaaattttttataacaatgtttacttaatttttttttaaaaaaaaaccagagtttttgtcgtcttcttagttatgtagtgtgttagtaatcccggacttttattttgtgaaggcttatttatcaaaaaaaatatttataactacattataatcacttttactaaatttatataattttgtggagacttttctattattttggtttataattattaaattaaaaaatttacatttaattttttaaaagacaatatttttgtaagtggggctataacccctacatcaattttaatgggtccgtccccgtgttagtggttattttattcagattttataaattgtgacgaaagggctttgttgaagaaactcaggttgatgatcgtcatttgtattagaaatattgatgagtttctaaagaaatttaaattgttacttgaatttctttgttggtctttagctgcattggaattttgcaaagtgattgaagagtgtggaggcttcttaagaaaagagagatcgaaaaaagagtgtcgcgcattaaaatctactgctgggttatattgtacagaaaagtcaatgatgtgggttccattccaagcataaaaaaaaaactttccaagcataaaaaaaaactttaattgacaataatctactacaatacattccaccacattaaatatgcacatgtgacaatacttacttgatcatgggtcccactctaaaataaaagggaaacttacaaaaatactggaatttaagttaacttttataaaaatactgtcacacggaaatattttcaaaaatactgtgttttt

SEQ ID NO: 162666 - DNA, 2757 bp, Cannabis sativa
tccaaaaataaaccagaaacatctaaacaaaactaattaaacaaggcaaagcaagtgatggttttgttgtaatttaagattaatgaattaaacatataaatatttatatttttttctatatataaatataattaataatctcttctgtttattaaaattgtgtgtcctttggaagggtttgggctacaacaatgataggtccctctcgtaataatagcagtgtctgactgcttttaggcaagagaactgattcaaaggacacctatgatagtgactattcattaccacccaacccaaaacccaaccccaacccactcattattcatgatatttccaacacatttctcctctacaaaaataccccttttcaatttttttggtctacctatcttctcaatcttttaatagcaaaaagaaaattcaatcctatatatttatacatggattttttttctttacctcttcaacatagttatcattatatacttttcttttactaaaataaagcattattcatcatcaccacagtaaaaaccaagcattaccataagtgtgcaacaaaggatactaacaaaaatacatgtatatatataaatataaaactaattaaggtatatgtagaaatatataaacccctgtagaatcatctgtaacttttagtcagaactcatcatatatataatatatatatatattgtccaataatatttcatacaatacttattgttagtttgaccaagaccaacaattttccttttgggtggctgggaaaaagatagttagcagtgaaagaaagaaaaaataaagattgttgttgtagatctccaagctaggattggatctttacaagcttaaccaaaacagataaaaatgaagattgagtgtttccaagaatgtgatcatcattatgatcaatattaatatatatatataatatatatatatataggtaattataattaattataaattaattataaagctagttgggacagtgagaatttttttgaagggtggctaggtagtaaaaaaaatcatactttagattttttttcttcttcttcaactacttcttttcccagtgttatatatatatatttatatgtgtatatatatatatatataacaatactcaaaaatcagacgaaagctagctagggttaatctgcggtgggaatcctgatgatgctgcagcagttgcaagcagtggtagggaataactgaaccgccattggatcaccactgccatggttgctgttgttgttgttccggccacccatattgctgctgctaggaaactgactattattctgtacatatttatataaccccaacaaatattattaatccaaaatattaataataattctaaacataaatcagtattaattaataataattaatatataatattacatgatggtggtgttgttgttgttgatggtgaagatgatgatttggagggtaatttatgggatgaatttggattggattatgattttgatgatgatgatgatgatgatgttgatgatctactccaggtcttctcatgatctgattattattattattattgttattgtgattataattagaaggaggttgaagatgggttcggcttagaagttgcatggtttcattctccaactggtacccatctcttctcatcatcatcgcatgatcaccactattaacctaatataataataataagaataatttatatcaatgtgtgtgtgacatttaataattattataatatgtaaaactatataataataataataattaccttaggcctaaaaccaggattgcgccaatcagtttcaaaaggcatcgaattaggttgatgatccataataagaccatgatgtgtggcagaggttgtcacataattgttttgcttaataatatttgcattgccaagactcaaatccaagttatgatcccccaaattactactactgttaccaggtgatgaattctctactgaacatttaataataataataaacaaattcattaatcattaatgacaaaaggaaaaaacacttcaattaataataaatatacacacgacacgtaccaggtgagtttagctcgttgtcgtaaatacttggatcaaaatttgtaacagcgtctttcccattacacttaattgcagctttatcataagccctacaccaccatcaacaacaacaattattactattattattattattaattattgacccgaaaaaagaaaataaaaaaaaaactgtattaataatatgtaattaattatttatttatttaattaattaccttgcagcttcaatttcggtatcaaataatcctaagtacacgtacctgtgttttatgaaaataaaacgaatttataaagcttaattaagaaaaataaaatttaagaaaaaaagaaaggaagaaagaaaaagaaagataagatttatatactttttgcccaaaaactggcccatacgagcctcccatcgtccacacttgtgcaaagtaacccctctatatttagagcttcctctagggaatcctgtgctttgtctccttagtacatgaacaaattcctcttttgttaaattgctcatctgtaagtgttattaattacacccaaaaagaaaaaaaaaagtttacaataataataataataaacattcgaaataaataaaacccagaaatatttatgaactgttgaagataagatattcactgttcaagataagattattattattattatta

SEQ ID NO: 162667 - DNA, 9600 bp, Cannabis sativa
gagagagagagagagaaattaaagttttttttttcttttcatactgtctcgggagtgtacttgcgaaagggtatacaaacgccgcgctcgaaatcaagctgctccatggcggagctagactttccgggcgtggaaatcctcgttatagctccatttgtagaagccgcaaaatttgaaatccgcagggaacatttagttcttttccttcttctactataaattatacttggggaggaattgagggaagatagagctgttaatgtcgcttgatgatgatgacttgaaattggccgacctctgtatttgaattgattatgattaatggggtatctgcaatttacacagaccaagtccatggatttcgaaccctagacgatgataatgatgatgatgatgatgatgatgatgggttaatgaatcagaaggaggaagggagagtgttgtgtgtgccgtacaggtctggaagaggaggaagaagagtcgttggaagaaggagcaagaaggaccaatttttaaaaattagtttcataaaataaaataagataaatatattatatatttttttatatattacaaaacagaaattagagagccacacacataggattattatttatttataataataataataataatattgttattcgaaaatgtaaattaaagtgaaatggttggccaatagttgtccacaacctcagtactcagcattatgtgccataactggataacttgtacgtgcatcgtttgcaaacgtagatttttcgttttcttttcccttttggttttaatttatatttagctaaatgaaattttaacttttaatttgaaaaaatttcagctaaaatacaagactagttccatttttttattttctaatacatatggtatggaacttgtctactacaactcaaacagacctctccaatacatatatgagcctaaccttatatagttgatagaagtttcatgtacttatccttgaaattaaattatttttttcttcttctttttttttgacaaaaatagctcaattagagttgcatttacttttaagttggttatgggattctaaaagcaatttatgtgtgaaactctatacatcgaccactacgaaatttactattcacgccagttaacgcgactgttcattgttaaaaaaaagtgattcgattatatttaagattgtgcgtcgtgctacaattgtaattgcgtggcttgtgacactctatggtgattgtaacgtttatggttataaatttgagttatgacgacatagaaggtgactaaagttgcttaatctcccaatatgatttgcgggttaacgttgcaagttgcatttgaaaggaacgaggatgatttagttgatttatgttattatgatacgacgagtgagtcgtaacttgttaaactttcttataagcgtcaactcaacttatagttagttttttttttttgtgttgcaagtaagtgtaagactaaggcgacatgaactttagtgtgtcgatgagttaaagtttccgaagcttaaaaaagtgtgaatagtgaggagctgaagctcaattttgcgttataaaagttttatattgcatttgtagttttacgttgaacttgcgacctttttcttaaaaaaaaaaaaaaacaaaagttagttgtggttttgtaatcaacttataaatggtccaagtatgctttggcacaattttttagattttaaaaatagatattactgattcaatcatttgaaaattgatctcatcgttaatttaatacctattaatatataatcttgattgttttttttttttttttactttagtaaggcgaacttgtaattttagaaaaaatgtaaaactactaaattatgcctataactactataattttaaatgtttggaaacatactcttaggatgtcttgtaattttttttttttttttaatttttcaaattacaaaaataaaagtaaaattttgttttattaaaagaaagattgtagtataagtctccaaaaagtatacttggatgcagttaagtacttaatctcaaaaattgacgttaataattctcaaagcccaccatctctgtaagtttgttaatcatcttctttaacaaattcgtttactgattcaaaatgttacgtgttgacacattattggtctaaattatatttttgatttaaaataatttaatattaaaaaaactaaataaactattttaattttttttctccactggctgcccagaaaccacaccccaaattcttgtgtttttaatcaaatgattatataggaatattttgtgattatcaaatacatatgtaatcaaaaaacgtgaattaaaaaatagacaaaaaattaaacaaccaaatataatgagaaacaattgtgtaaaccgagacacgaaggcaaagcagtatagttctttttccttgatggcgaagaagaaaatatcgtcttcaaagttgacgtccgtttctcggacgactgaaggggattttggcagactaaagcagactgaactagagctccattcaaaccaggaaggctttgatcgacaacgggaaaaagagattgatgtagatattgaggatgatcaggatacgttggaaactgattttttggctctagttcgctcctccagacctagggagagttctctttctgtggagattgtggtgattctgaccaccattttgcacgcctaattgcaggccctatagtctcaattgaagcctcaagccagcaacaaaggtaatggagttcattttacgacacctatagtcaagaaaggtttgtcaattgctaaacttgatttatctgaagttgaatttgaatatgacttctggaagtctgcgattgtttgtatggtattaggagttaactctccttttgctgtttttgaggatttattaaacgtatttggggaaattttagtattgactgaattttgagaatgaattctggttatactattgtcaattttaatgacacggctactagagatgtgattcttgaagctggtgttattcactttgattgaaagtcttttattatgcgaccatgggctctaaatttggatgttatacaattggttcgattggttttggtttgggttcgatcgcaagattttgtgactgtagtattggggcctcaattattttagtgctcttgttagcacgataggcaagcctattctcattgataaagttactaaagaacagactttaattaagttcgctcgggttttagtagagatggagatcaaggataaagtttctaatgttatatcttttgagaatgaatgagatcagatctttgaggttcctattaaatttgaatggcttcctactaaatataccatgtgtggaaaatatagccataatgttcctgattgtctataagtgataaaacaaatctagaaactaaaagttcaagctatagatgagattgtttatattgtgccaccttgcgagaatactgagaattatgttgaggttgaggttgtaggggagaaaatagagatggtttttgttactatcgttgatagtgttgtgagtaattctgatcagattattcgtgagtctattaatattgatgttactgagattacaaagaataactccctaccaagtacggagggagttgttacttagtaggcaacaaggtgtgatgatcctggtggtatctgggagacacgtaaaggaaatcgatggaagttaccatcacgttttgggagtcctcctagaattaacaaggagggcagggataatgcagttcatcattcttaatggattgttgcaatctactttgttggaatgttaggggtcttattacaaggaataatcagaaggatgttagtactctctgcaagttgaataaagtgggaatatgggctttgttgaaaactaaggttcttggtaataaagttgatgttatgatgactgccgatttttttggttagaattttctggttacatacatatgtaaatattactgtattagttgaaaataaacaatacttgcactattttgttaaacactctgggatcaaaaatgagttttgtcttactgtggtctatggtttgaactctatcattgagagaaagaagttatggcaacatcttgcttctcttccttttcctgttaatccttagctcataatgggtgttttcaatgttatttttgatgttgaggatcgagttggtggtcgacctgtagtgcccattaagcttgaggattcttgcaattggtttagttgatgaatttaagagttctagttttatttttacttagataatggaagaatctattctataattgattgggttttcaagaatgaaattgggttgttctacatccatctactaaagctttttatcaatagaatcttatttcagaccactgcttgtgtattcttagaagtttgcatgttgggaatttagaatttcagccttttaaattcttcaatatatggacagaacaccaagattttagatagatagtgttggaaaattggttgtactgggctatttcaaactatggtcaagttaaagagagtgaggaaggtacttggggagtttaataaaatattgataggggatgtccaacaagcttatatttcagctaaggttcattttgatcagctccagcttcgaattcaatgtaacattcattccatggagctttttgacgaagagacaaagattaaggcaaccatgagttcttgttctaaaatgatggaaagctacttgagacaaaaaaataagattaattggttgtagtttggggatgaaaacacaacttattttcatgatagtattaaatagctcaaggaaaccaatcgtacagcctcttttgttgaccatcatggtaatttggtggataataatgataaggtggtctcacactacttaaaccactttaaaagttttatgggaagtcctagtctaatgaccaaacaaaaaaaggattatcaagaaggattgtttcatcatgggtactactctaaatgttgatcaacaaattcatttgattaagccttttactagttttgatgtcaagaaagctctgtttagtattcttgatttaaaaagtacatgccctgatggttttggctcaaaaattttcaaggctttttgggctgatattggtgatgacatctcgaaagttgttctttgaaataggggaaatcccctctcagctgaataacatactcctttctttaatccctaagactaagaagccttctaaagttgttgattatagatcgattgcttgttgcagtacttttgtacaaatgcatctccaagatgatgtgcagcagaatggctaatgtgttaccttctctcgtaaacaggtatcaaggtgtctttatcaagaataggtcaattacccacaatatgctcattcttcaagacctacttcatgggtataataggaaagtaatttctcctcgatgtctcatgaagattgatttgagcaacgcttatgacactatagactgagattttttagaagaacttctgaaaagttacctcttcccaccagattcatcaattggatcatgacacgcttaaggggttctacctactccttagttcttaatggtcgtgtgcataggagatttcaggggaaaagtgggttaaggcaaagagatcccctctctcctttaccttttgtgttagtaatggaatatcttactcgattattactctttgatgctcgtggtttagatttcaagtatcatcctatgtgcaaatccttaaagatagtcagtccttgcattgctgatgatttgatcttgttttgtaaggggacggttaagtcaattcaggtaatccaataaactttttctatttttagtagctatttgggcctccatgctaacccaaacaagtctcatatttactttggcgtggttgatgaagcaagtaaactggctatctgggattcggttccttatgatgagggtcaattccctctcaagtatctcagtgtgacaatgaggccaacaaaatagaaaatagtagattgtaatcattttcttttgaagattcaaccaaaacctcatagctgggcaagcatgcatctctcatttacaagtagagtgtgattcattcaatcagtgttattggacattcgttgttattggatgagtatctttatgcttccacagaagtagttaatgaggttaataaactctgctgagactttttgtgggatgtgaaaggtaattctagtaagatgcatctaacttcttgggatcttgtctgcaaacctaagaattatggaggtttgcattttcaggaaggaatcaagtggaacaatgcttcgattgctagatatatttaggctatttcaataaaacaagatgttctgtgggttaaatggatcaatgctatctatttaaaaaaccaatatttttgggtggttgataagaaaggtgatgtgagttgttactgatgcaaacttcttaagcttgggagtgttttcactcgtgacacaattgtggatgctggaagagagggaagattttgggttattaagctttacaattcttttcttactcctcatgctaaagtagataattgtaaaataaattggtgtagattatccataccaaaatataaatttattctctggaaagtccctcataataacttattaacaaaagatcacccgttggcaagagaaattgccatgaattctactagctgcccaatttgtgaggttggtgttgactgtcataatcatcttttttttttttttttctttttccaagcatctcatccacgctatccattcttggccaggtaatgccatttggccaaactcttatctgaatttacttttgtggttaaatgctaaccgagatcgcaatctgcttcataaaagtgttgaagctgtttgtgcggcagtagtttattttatttggtagaatgagaatgtttgtattttttgagcaaaaatatttttttgatttcttatgtgaatagtttgattagagttacacataaagcgagattaagacttgttaataggaggaatctctctaagagggaccaataaatctttaattttgtttgtaacatgtaagtaagtctgtcttttgttgttttgtggatgctaattcatgtagaatttgctatgttttgattaataaatttttctcctttaataaaaaaaggataataaaaaatagatgaaaatcttcccatatgaattaaaaaatagatccctcccatcaatccaagaacctactccgcccagtttacccaaagcttagccacattactgcccaaagatctaggttcaaattttagggcgcacaccccaaatctgaaattttatatttgaaaaatcacaaccctagtggtggagatcggcgatggcatgggagaaggctatagaaagtggtttatgttggtgatgaagagcttgtcattgtcgttagcctcgctgctcgtcgtcgacgaaatctgaatagatctgccacttgtctctctccctataagtttggcccttgtttgtagacaggctcgttggtcgaagcctcactccacaatggttgtgatctgtgcgtgttggaagtctgacaagccaacctccagttttagattttggatcaatggtggtggaagacggagaaggagagaagacaataaacaaagagcttgaaaaagaaaggtggtatattgagcagctagggatgggcttctctattagtgttgttttcatggccatggatctgtgctccacgaagaagaagaagaataaggagagagcgacgtgaacaatcaagggagaaaacaaataaaaaagaaaaacaaaataaaaaaattgaattttttattttatttttttaataatttttattatttaaattatttttaattaaagttattatttgaaccaattaaccttcaacatgtggcattcttgtcagcacttaacatatctgttaaattaggtaccgatagacttacaaaaatggtgaacttgggaactattactgtcaattttcaaggttgagcacttatctgcattaaagtaaactttttggggacttataccacaatttttccttttaaaaagataaagtgtgtttcataatttttgttattttttattttaaaaactaaaaatagaaatgtgtcacaattttttttcttatttaagtgaggaatgagaaagggatgttagagaaagtgggttagggtctagggttcaggtttggggtcggggttcggaggctgggcttggtgtataggttcgaactggggtcttactcgaggagctaggggtcatggtctaggttcggaacggttgccggtggtcgcggtcctagtcggagacgggggatggggttcgaggtccggacaaggagttggggtctgggctcatggtcgtaatcggggtctaattgcaaggttgaggtccaaaatattgatgaaaaaaaaatacaaataaactataacggaacaaaaaaaaaagagtttaaataaatttgaaaataacttatttttatttacaaaattttaattctcattttaaacaataaaaaatgaaaacattttctaaaacattactttttttaaaaatatttttacttttttaattaaatttatataaaatagatacttgctcatccaatcaataaaaatagatatattatgaatcaattgttgttgaataaaatatgatttaccaatcatactcccaaatttgaatttataaaaatattttttttttcttctcaaaaatatgtgcttagtaaagcattttgtaatttaaatttgagtataaatttagatgataactaatcattcaatttgatatagttaaaaattagtgtatataattagtaattacaccttataattattagaaattttcaattttaaaattaattattaaatgatattattttttagttggattacaaactatgtaattatcgcaacagacccaagcacactacctaataaatttgattaattaaattttcactttgaaaattgaccatcatcatttcaactattatatcactaatggtcaaagcagtctaaagtgatttttttttttatatattttattaaaaaatattttaataaacctgcttgaaaggtgagcattatgaattatttttcacatacatttctctagtttttatctctaagaatctgagttataaattgtgtgtttatttatacttaaactcataacttattttgtcatttaaaaaaagtggtattattgtgtgtttactaacacttttttaatcagttttttatttttaaaagtaaaaaagtgaaaaaaaatttcaaagacatgttctataaaattatttttacttttcaattttttaattaagaatcaaaatttcaaaaacaaaaaaaaatcattttcaatatttttttaaacagttttttttcttaatcaatattttggaattcgatcagacccagacctaaatctcctcacggccctggagctaaattcgacctctgacctgaacccgaatccgaccccaaacctagacccgacgtaaataaaatcaataaatgaatataaaaataaacgttacagaacacactttt

SEQ ID NO: 162668 - DNA, 2482 bp, Cannabis sativa
  modified_base (2437)..(2439): a, c, t, g, unknown or other
gcattaataacaatatataaaaaatagtacaccgtcaagcttatgtataaaagtttatgtttttctatttccattttgtttttaagggttgttcgcatatcatcaccaagattctccttttcctgttcctgaaaaagtcacatctctctatctcgatcaaaagctcagtactcttaaaaagatgccatttcaatctaagcaataaaatttcctaaaccaataattacagatctgccattacctagtcagcttactataccgaacttatctggttgagatcaatcccatgaaagacctgacgaacaacacataataataataataaaaaataatataacaagaaaagaaaataaaataaaataataataaggtaaaactaacctgataaattaaccagtgatgaatcaagatcattgaaggtaaagatggaaaaacaaaaacaaaaacaaaagaggatcatcatcagtcgaaacccagtcgatgaaagggcaaagggcacacttgaatctttgtatggtcatcaattcattgccgatgcagcatcatcaagattctcagtaaccacacaacttcggcgcccgccgagaaactaaggattgattattagggccaaaatctctcggttaggagccggggttcacttttatatgatgtatatgtgaatcttgatgatgccacaccagcaaacaatgaccgcagaataccttctcatctacagatatttatgtatatatatttggggtgtattgaagccagaaaatgtgaagcttaattataacaagagaaaatatatccttcaagtagaaaacataaattattaataaataaacaagagagatatggattaagaaattataatatatataatcaataataagccaaaatgagcaggaagcccacgggtaaaagctgacttggcatcttatgagtggctgaaacctaaagtgattacttcgaaggaagaatctgttgttatgctcgactatactggactcccagaacaaaaacaaaaacaaaaacaaaactctatgctcccatttatatatattatctttccaaagcaagcttcatatatattaagcaacccaaaataaatacactttcctagtcctctcactctctccaaaataaaaaaaaaaaaaacactttcgtaaagatttattagttcagaatatatttattaaagaaaaaacaacctaatataaacagagaaaaatataaaagtatgtattaaattgaactgaaaaaggaaaaatgataaaagcattaatagaagggagaatatagataaataggaataataataaagtgtgaaatagatgaagaaagcacaatatgaagatccatcatcttcttggttctattaataggactaaaatatataaaaagaaagtaactgtgaaaaaaaaagttagaaggctcacacaaaaggtaatattttaggtgagtactagtggtcctgttgagatgaatggagtttgttggaatatatatacacacatcatacatatatatatacatgtatatataggtgaggtgacccaggaagtttattggtatgtctgagttttattatctacgcatttctattggttaatgcttagctgtacagtactattgcctcaatatggccgcagttacacatcgccatcttgagtaaaccctagcttatttttaatttagtttttctttcattattttcgacatgtgtagagctgaaggggtggatgtgtgtgtggtgagctatccccttgtgtacttaccatggactctcatttttcaaaaccacaaatttctaatcgttttactgtacgaccttgctatatggctagtttgtgtttagtcctcttcaaaaatcaacaagatttcgtaatgatttttaagacttttctggtcgactattttgtttaatacatgtatacatatatagagacgacgtaccttatatttttctctataatccatggaatgcattcgtagttgaaataaacttttttcaatacctaaaaattaggtaatcaaatcgcccaattggagtcacttattggtgtattgacgaatataccatgataatttcacccacaaattcgtttatcctattagtatatgggtaagtattgacggtaagaactagtgaaactaaaaaattgctagaacattaaagatttactgtgaagtgaaaataaacaccaagaacttaaaataaatttgagagctctaatgaagaagaaaaaattaatattgtattgattgaatgagtatgacattatagtcatttcccaaccccttttaaatttgaaaagggggtctttataggtgagctctattggctctcatttaccagatgatgtcctagtggtcccaagaagaaaggaaggacgtgttgctcttgcaggcgacaactataggtaggattaggggtgtgcataaatcgatnnnatccaatgagaaccgaccgatccaattacaaccgaccaccaaa

SEQ ID NO: 162669 - DNA, 3427 bp, Cannabis sativa
  modified_base (2969)..(2973): a, c, t, g, unknown or other
gctcgtaatttgattggaaatgcacaagttaaaactcaatacttacttaggcagatgagtaaaaggggaagaagagatttggttgggaaacccagatggtgatggtgatggtgggagacacggaaaagatgatagcggtaggcctggtctggggagccaccaacgccttcatgcgccgcggcgcagtcatatgggaccgagcccttaaatcctctcctccacccgatcccacccgcaaaacccttcatcggttgcgtacctcaatcggcaactgggtcaagctcctcgccatctggcagtacatcattcccttcctcatcaacctctctgcctccgccactttctttgcgattctgagtcacaccccaatctcgctggccgtgcccgtcaccaacgccaccacattcgccgccaccgccgtattcggcgtgatcttgggggaacgcactcacctgggttttgctttctttggtacgattttgattgttttgggtgtttggctttgtatttcgtagccaaccagccagccatttctcctgtgaatctcgtctcggtaggtttattactttctgtgcgttgatataattattgtcgttttcaatgctgtggtcgttttgtcgaattatatcgttgtaatccatataatcgcatcaataccgttgtcgtttccatgtaattgacgattttgatataattcgtcgttttcctgttatttttgataacaattgtcttgttacagatagattttgcagacatccatatattacatgtacattgttttaatcacagttaacttggagtgaccaagtggattccttccatttttttttttaaaaaaaataatacagaaaaaataagggtctcgaatacaagaatgagattaaaatgaattaatctcaaatacataataaatcaatttgatctttcagtttaggagtagaaattacccccaacaaaagcaatacaaaagtagtagcaaaactaatgagaatttgtttttcagtttggaattggagagaaagtgaaaacttcattcagcagcataacaaatcattagagtccggtgttactgttatgtatatctgtatggtcattatgtgtcatcttacttaaaattgctgctttgaacattctggtggcatctgaccattgaaccttttagtatctttgcagtaatcatagatcatgtgctgacttctcacccaattcagctgacccttctgagcattgctcaactgcttgtaaacaggggaagtccaccagtttcctggggtattagaggcacattggccaatgctcacaggtccattccacttgcaggcctttcctctgaatcggcggaacctagctgtgaatggcgagttgttccagtctatcttcaccaagccacctctggttgcccaattatctgcattccataagcttgtgtgaaccttcatcccttgcttgttggggtatgcaatgccctgattttcatagtttcgaaaaactcgaattggcaaactatcaacgtaccacctgatatttcaaccttaaagtttagtgtttgttttgtttgtttactataaactgttaagtattttgtgttttactttttttaaaacttacacaatctcagtagggttccaatgaatggtgtagttgtggaaatcagctgttggatcaaaccaggggtagaattgctgctccttgcttcctttgccttgtgtgtagaggtttgtgtggataatgtaaggttgtcccgagacgtttcctaagaactcgaaatcgatctcgtcatgtttgtcaccactagaggttagctgcagaaaaaaattagtacaaaagaattagatttagacccctttcacattttttcagtttatatgtacgtattatgaacttgataatatgttatgctcataaacttacatagtaggctgtaacagttcctgcagaatttccaggtaccaacttgatgagcatttcaatgctaccaaataagaaacctctctttgattgagcagcagaccctggaaaccaaaacttaaaattcatacacataatacaatagtatattatattatttcttgtgtaatgccattatcatatcattaatgtaagagaataattacctgaagtttgatcgagaacaagctgaagatcttcaccatctcctgaaatagatgcatgttgttgaccccaattaatatacatactccttgaaatctttgcatcaacgagtacttgatcaaaggcaaagaggcacagagctatgaacataactcgtaaaattttagttcccatttttttcgactcaaaaccagttaacaaagctctttttttttttttctttctttgtttttttgttttgttttaatttatggtgaacatatgttttgttcgaaatgggtacaggggtggtttagtcttggggttttaatgtctttatatagcttactaataactatcatatatgcttggtttgtaacggctaacttagtctcacgattaaattttctatttttggattatggtttgacctcgtcctaataatttgatattatccctaagaaagtaaatcaaaaacgtttgaagtgaacaatttaaagttaggtttggtgcaattttgtggtacattttttatttaaggaagtcccctatcctagaggtggttggtgagtgttgttttgagcaaagatattgtcgtttctctctctatatatatatattcaagggacggccaagattaaaacttgcaagtgttgatccactactaattagttggtcattagtatgtaattacacatgttatataatatttatatatgagatgagagccataataaatgttgacgtgagaagagcggaggagaaaggacatgagctcagctgctatgcttagctggccacgcgtagagagtctgagaagaatgtcgtgcttcagactaatattattgttgcaaggctcctctctctctctctctctnnnnntctctctctctctctctcatattcgacccaagtatttgaaaatttgaaatcatatatcactatcactttaatttcatcagagaaataataactttatgttaactctatcataagatagtgaaaaattatggtgttaaaagtagtgaagttttgtgttttaattaacttgtgattgcgtatataaccattattagatgatactaacacaacaaaaatatctcagtaattatcacataaaatgtatggagacttagtcttgagtactacatatatagaaaaattgaacaaagattagaagccgatcgagttcaattcagttccaaacctcaaacaaacaacaatattgtgaaataaattgtttactttgttttcttgaaattgagacttttgcatcactacacttatgagttctcctaatcatttcatgtcattctatattttctcttaagaaatt

SEQ ID NO: 162670 - DNA, 1588 bp, Cannabis sativa
  modified_base (1557)..(1562): a, c, t, g, unknown or other
ttgcatcctacacaacacgtgaaaacaaattaccaatatcaagttaggctcttgagaagcgacattctgatttggaggattaaggacatgaaaatactaatgagtaaccagtcttaaaaattttatagacttttccctttatagatttttatctcactaaaagtatgaatgcaagtacagaataacactttcaaaatccattgcataaaaccataaaacagcttgaaaatttggctgagatcaaagcaaactataaaacaaagaaatcaataagcattacataagaaagaaagaaattgcatttaaggtgaggtctacttcatataaatatatatatatattgctgttgttatgtattgaattggtctctgctctttttgttttgtacttgtttattatgttgattggattaaaaaagattatcccaaagatttgattatctatagattcatgtaccaaataccaaccacaatgcagaagatgaccataagatttaacaaagaaaatattggatccaaatgtggaccccaagcatggagaaaagtacaatcttgctttccaagtaatgccacttacctaaaatcattaagataaagaactaccgttaaaacttaaagcatagactcactcaactctgagtatatcaaaggagcctgagtcaacactcaaacataaagtacaattaagctgcaactttagtcacaaacaaaataaaatatgtatatagtagagaaaaactatgaaaccaacaattaggtgttatttatatcatgatgaactttgtatataaagagatattcatgatgaacttagtctcataatcttttttctttgttgttggttctgagttactttacttcagatcagatttgcaaggatttggaagttccacaactgagtatgactttttattgtttccataaattgattgttcatgtacttttaagttgaagcatgttcgatctaaatcattagattgtctcttatgttttagttttcaaatcctcctaaatttctttttgagctttattgattttgacaagtttattatatcaagtagttccttttatcagatactggatactgagcctttgactttgacttttataccataccttgcactatttgtgcttttcttcgttttttctaacaaaatggtatgctgctgttttagcctttggagcttagagagggagaaaatagctctgtagttctttgaaatagaataagatggagggcaagttcgcaatcaagaaagacgctactgaagtaatttatctttgtcataacttaatcttatgatgcttcttttgcttgctatatatagttatatactactttactaatggctttctttttttaattttggttcatgtagttgattggcaatacgccaatggtttatctcaacaacgtcgttgatggctgtgtagcccgcattgctgccaagctagaaatgatggaaccttgctctagtgtcaaagacaggcaggcacaaatatataaattttagggtaaatagcggcataagtatccaaagttttatgtttgtaagcnnnnnnaacccaatgtttatttttagtggcat

SEQ ID NO: 162671 - DNA, 1495 bp, Cannabis sativa
  modified_base (1415)..(1415): a, c, t, g, unknown or other
agtgcatttgattcttaaatggtagaattcaaaaccatcaaaagaatagtggaaagcaaacttattgagaggcctaaaacaaaagcacctaaatttgaacacattattcttcttggcctgctatatattagcttttttcataaagtaaccttttcattacaataatttgtaaaatgaattgtagtgggctttgctagctttacctcttgtccaaatatatcccatcaaaaccatttctattctctatataagtaataggtattcacttcttcatatgttcagtcaaatgtatgttatgtgaaccctcatcataactacaactacaactactatacaactctaattttcttattccctccaaaaacatctctcaaaatcccaataccatttttctaacatggattcatttaaggctaataagaagcttcaagtttccatgaattcttcttacaacaaaactcattttttacacaatctcatcctctcttctatggttgcaataacatgtagttttctttgttcttaccctttctggttttcatcactaactacttcaatcaagcactttgctttcatatcccttccaacaatctgttcttctttccttaatcccaagtgcttgttcatagtttttaatgtcatagttgctttccttgttggtgaatcaaagctccttggctcatcatcatcatcacaacagtcatctctagccactcatgatatctactcagaatatgtagagaggagtcaaagtcttcatggacagaaaagaataatcactagtagtcctagcactattattcctgaggagaaagaagaattacagaagttggagataattgagaaagaagaaaatgtttatgaagtagaagaaggagttgtacttgatcaagtggaatatcatgatgaagaagaaaaacatgatcatgatgatgatgatatggcagaaaccaaagacttcaaagaaaacagtgatgatgggggagaagatgagtctgcagatggattattgccaactgaggaactaaacaaaagagttgaagagtttattgcaaggattaataagcaaaggtggcttgaagctaaaatgatgatatgttgccaagcataaatattttatgtatgatcatagatttgtattactattatttctcttttagtggtggaaatttaagtgtagctctactactatatggaattgtttttgtaaccatgagaagtaattattagttaattataatatacaactaattaagttataataattttcatcttgtattgagatgtaatggtcttattatgtaagctagctagttaatcaaattatggttctttcaaatatatagtgtaatattattaatgtttttcaatataccaattattttctctttattcactacaagaaatgtcacttntaccagcacagttcgctactgcgtggtaaaagtaacttttaccagcgcatttcgccaactgcgctggcaaaaagatcaaa

SEQ ID NO: 162672 - DNA, 2518 bp, Cannabis sativa
aaaaaaaaaaaaaaaactaaagtagattatgaatgacaaatctattcaaaatactacggcagcaatgttatgtcatacatatatattttaataatttaatatatatatctagttaaatataaacaaaaaaaaaaaagcataatgcaaacaaagttgaagtcacttacaatgcactattgtattgattactcaattacaatgcactcgaacagttttgatggtgtgacattgaacaacacaaatctattgtttacctctcaaatttaaactaatgaaacttctcataacagctcaacaaaaagaagtaaatataaatgacaaattttatttgatacataaattttgaataacaaattaaaagcaagtagacaatttcacataaagcataatattcccaatcttatcccaccaccaaatcattacttatcattaagtactctgtttatataatacaacatactaacaaaccttaattaattcttattatttgtactctgttttgaatgggacatagtagttgatcctggtggatgagaccttatcataaactttgttcggtgaatataatccgatatatgatccttaaaactttctttcttcttaatcccatgatgctgttgttgttgatgatggttttcccctgctgatgccaccttattctcaacctcagcagccttgaaactgtttttagttcgattgagaaacttatcaaactcgtgattcagatgatcatgaaaattagtagtaattttctcttctgggattttctcaccatccttattagccttattattattactatgcttacgtttattatggactaaaacggtgttagtggtggtactggccttggtggtggggggtgatcctccgcttacgatgtcgatgaatttcacggcactgtggttgcggtggctgcttctgctgctgccacgtggggtcatcaccggcgaggcttgtcgcgatgagatacggcgaatcatagtcaacagctttccacatactcctaattcttgagatgatgagtctgtgtcgtcatgaatggtgataacggtggaagtagtccttttctccattgatactaactaaccttttcttttctttcaaatatgtctaagttttgggtgacaaaattaagcttagagtgaactacaagtagtacaaaaacatgaacatggcttgttggggtatattatatgattatatatatatacataatatgtatgcatatatttatagagagagggatttataatcgtatctaattagtatgtgtttgataaaagttttcagtgtgtaaatgggaaatgacagacccaaaaaagaaaaagattctttctcgtggaaaaactttgattgggagaaaataaccattcatttatcttacttttctttaatatatatatatatataatataaattttcgtgtgaatttgtgtttgggatcatattcttgcttacttttttttttcttttgtatctgttatcctcaactactatataatatgactcatttatgtagtgatgattaacgtgttagttagaactttaagatttattcaaagtattctttatttatagctgttttacataatatgaatatggtttagagttgcaattatatgccaattaaaattggttaacgataaattggcttttgggtattagattcgtaagtttgaaaaataaataatgagaaggaaacaactactatgttattcttataaagtgaatgagattccatgtctaaagtcatttaggttcatctgaaaattaattagcaactcattcctcttatagattctattatctttccatatattagcgatgtaagattatctaagagttatagaaacacgaggagaatagcatgaatttccaatctctctgacatgtttccacgaggaattccttttgagaagaatcttgtttttttcttttttttttttttgttttcaggtaccaatccataattttggtttaagtttttgcaaagtggtaactctttttcgttatataaagtggaagaagcattttcttttcaatgagtaatttcttgtggaacaagctaactccaatactaattgatgaagcataggtagagaataattaataggctttctgtgttcggaatttgtaaccaccaattattctatgcttaattacagtgtgaaaacataaaatttaattctagtatattctttctctgtttttggattggatatagttccaaattccaatcatttcttacaatcttaattaaccctaatttcatatatagctttcatttcaatgcgtatgtttatagatcagtttttttaaatatatatttatttatatatatttttgataaattttatttacacatctaaaatttttaaatacaccatattttaataatttttattttatataagatttatatatttaattatactaagtttttttaatttttttcttcaaattcatattcttaaaaaatataccgttcaaacaaaaataaattatattttagata

SEQ ID NO: 162673 - DNA, 930 bp, Cannabis sativa
atattatgtatataaaagtagtgtaccgagacaacaagagcagaagtggcaagagcaaagccagcgatcttagtagcatcaaggcacttttgggccaaatccttaaagtcagtttggagtgagcaagtgagcctggctccaccacaactctcaacaccaaaagcctttgaaacactctgagaagacctcagttgcaacccacctcggctagcattagaccccatcttagtgggctgcattagagtggccgctgcttgtagcgaggctgccatgattggttacacctttcttcttcttcttcttcttttcttcttgtttttctattgtcctaactgaaaaaacagagtaagtaattgaaaagtggcaagagagagagagaggtgtgtttgtgtggagagagtggatatagtacacttatttttttaagctgagataatggataggataaggtcttctctcattggctacttcaagctaaatgcattggtttctttcttgtgtttgccacgtgggctaagtccttgtttggggataaagatactctgtggtcagactgtttgttaacttaagcctagctagtttagattgtggactcttcaaatgaaatgcaccacataattgttatgtggttcttattcattcatcacttcactcttatttcaattgtcattgatctttactaattactttgatatattattgtttaagcagtaatttaattagctttttttagggtaattctatactcataattaagaagctaatcataatcatatatatacttgaattaaaaaattacgttatctaaataccaatccattatagaattactcatttacctctctgtaggaaatttaaattgccatttacaattttaccctacaccaacaaaacaaaactaatcaatttccaaggtcaatttcgaccttt

SEQ ID NO: 162674 - DNA, 1361 bp, Cannabis sativa
ataaatatatattatatgtatacacatcactgtttaggagtaaaatacatccagacaaaaagatctgtataggtagagagagttatttattactcaaggcaatatatatggactgctatatataactactattagtttatttaatccaataatgttaaaacatcatcatgtgctatgatttctggtcataataagtaaatatgtttaaaatggacaacatgagctggcttagtatcatagatgtgtatatatatgggatggagtaaaaccaactgctataaatatcaattcataattcttcaggtgtgaatgttcaaattttagaactattttgttcacttgcagtttaatattggatatgaaattagggaagttcattgatttctgttacaaaggggtcggtaaattcattgctgtcaaaaagttttttggtatgaggtaattaattttcatgatattataatatataatatatatatatatatatatttagtagtgtatgcagttcttagaagatcaaaatcaagtcgcaaagctttctctattgcttgcatcagcatatatatatatatatatatatatatatatttatgggattggtttcatctgtctttctcggcttaactagatgaatatacgtataagagagatatataaaaatatatattataaagcagagcattaatttagaactcttatcatattttgctatttattattatttgcttatgaaaattatagtagtaatatatgtcgtttgaaactaaaatatcaattatagctagactaaactgacaacgaaaaccaatctgtgtgaaatcaaatacattatacaagtagtcttttacttttcttaaattgattatgaagtaagtcataggtttggtcagacatatagtatatacatatatatgttataagtcaaaaaaaactttcaaagctatagctaaaactaattataaatatttacttaaattaataattttattttttttttatattttcttcaagttattaaaatttttattttatatatatttgttataaaagtaaacttcattttcattcttgtttaagttgtaaattcctataccaattagagatttttctttttctttttccttttaattttgggatattggggaatattatgtatagaccaatctaaatttagacaattttggcagcacttttctacgcatctggtaatattgagcagaaatattgggcagaaataatgtatgttaaagctaattaacttagaaaataagcatcgctgaaatcagtggcggaactatgttatggtatggggtggccatggccccccctaatattttggggaattatttttaatatatata

SEQ ID NO: 162675 - DNA, 2997 bp, Cannabis sativa
tttttttaatattttaaactttaactattttttaatactatatttttttaccatttatttataccatataaaaataaactctattatacttttccatatttacgaaagaaaaaagaacccatttttatatgctctgcctgtgtatcttctacagttccttttttcttttccaagaggaagttcatgttataaagaaaatttaattaaaattattatacaaaaaagaaaacaattagatatattgaacgatgtcttttcactcttgatactctccacatctatacctaaccagctcctgtctgtgtccacaatgttcttaatcaactctaaccaattttcatcttctttatttttttaagagttaaaattacagaaattctataagctgcggcttcataaatgtcttgtacaagtaaaacaaagaaaattactaaaagactattttttttctttaatatagaaaaagaaaaacaacttggtcagttttgataatccttcatgtataggaaacaaagaaactatcactaatttcatttttttttgtccatcaaatttattgagaaccttcacttatggctgaggaaaaccgtggtaacaaaagataaaaatgtaaaattacacggtagccatagtagtttattttgaggccctgaagatcactgtcctaagaacaaacaatgtataattttactaccaaagaaatcttctcactttctcattcctatgataatattacctcgtaccaaactgtatctaagagtaatctccacttctcaaactctgcagtagatccaagtatccataattttccggacgaatatagctggattaattagaaagttaaacaagcaaaaaatattaaggaactatatactccaaatttctgtgtatttaaataataatggtgctggtaaagcaaatttgttatactccaaatgcacgtattgatattgacaataaaattttacactatgagcctgctaaagaacttcttgtgtaaaaaacatttgttacaatcattacacatttaactaacaataaaggttttttctcctaacacaactttatatcttagactattccgaaaaacacatatgaaataatatcaggggtgaacaatgggtgcaccatgttaactctggccattgttttaggttagaaaaaaaatagaaataatatagaatgcaagcaagtttgatgtgagaaaaaaaaaattagacaaaagacagagagagatggaaatacccatgtcgaaatagaaagtcaatgatgacaagacagcaatttggcttgaaaattgatgtcctacgtatgacattcgcaacatgtgccacaggaatcaacttgaaactttccacctcgccatctgccacatacaatttttatgccatttcagaggatgaagctctttgcctataattataatacttttacaaagaagattacttctataagattcaaccttcaacctgataagcatataattaaccttgccactactaaattgagctgaggtcctagaacgtctaccttcattcttaggtataaaactttcgggaagttttaaatcatagcaaaacaagacatccctcttgtatctgtatccatcaatgtccatgtatgaaacagcaccaactggtatagcactgcaagagaagcacttctgaacccatgagagaaacactaacagatatatttaccaaccaagaaaacaaagtgatcagtgtttaacaagatatttgataattttacggttaacaaggacttgcctgctagaaatggatttgggtattccagcttcttcttggcattccttgaccacattctccccacatgcaatcccatgaggctgacattttaccatgttgaattgcatacatgaaattaatatctcacgctacagtatgcacacatattcaatggagaataacaatattcaattgacttagagcaaagacattgttatcgaattttcaaatacaaagtaatattttgatacaaaccagtcctccagcaacaagatgatcgagcattcctgggaaggtagatttttcttgacttctcttcccaatccacagaaatttctttccttctttctcaacataaccattcatgtgaattccataggcctgttatcgcaaaagcactagaaaaacactggttacacattggaaatgtgatcaacaatatagtcagaaaccacttgcaacaccctagttagtatattggtcgcatattgattccctttgtgtattcattattgtaccaaatcacaatggatgaaatagaaagaagaataaaaaacttcaaaacccatggctcaagaaatcatatatggtttttacatgtataataccaatgccaataaagcatacctttattccaaaataaggagcagctgcacgttctaatgaaaaaagtggtgatgcaccaaaagaagaaatcactgggtaaagctgaataaaatcaactataattagctaaaaaacacaatgatcttcacagatgttttgctttaatcacattgaaacaaccagcatggcaattataatgtttcatctagccaaacacagaattggtgtctattcaaactcaactagctcaaagcagtacctcattccgaatacctggaaactgttgctcccctaagatcttaactacttctcctactgctctggtcctgtcctcttgggtcttaagcgacggatgcaatgtcaccgtccctccatggaagccatcattagagttatctggtaagaatttgaacactttctggaacttcctcaaattctgagcaaaactgaaccaaattttaacggtgaaattcacaaactctttgagcacgaaacttcttcactaacttagaaaaaaaaaaaaaaaaacttacccattatgaatataaccaattatttgattctcaattacaaaaggcataaactccaatcgcatttcctgcaatccaagcttggaattaatcaaaagaaaaaaaaaaaaaaa

SEQ ID NO: 162676 - DNA, 3347 bp, Cannabis sativa
  modified_base (3182)..(3192): a, c, t, g, unknown or other
  modified_base (3295)..(3300): a, c, t, g, unknown or other
attatagtttaactataaatgatagtttaatcaatttaagaattttgattacgttttttaataaagtaaacaagataaatcattatgattttatttctaaacaattttagtaaacaacatattacaaatattgattccgattatttttcatttattttgttatatttcttttttaatttattttgattttaaatactgtataataaacatgccataaattgattttatatggtatatttgtatgtaacgacattatacggtaaattgattatcacaccatgattttgctaatactgaagtttaaaatcctatttcagtcaaaaactgatatatctacattatctcacacacagattgtgtcataatcctatattttgattatggatctggacacaatattttgcttcttactctttcaagagaccaaattaagtccaacaaagccacaatcacctgaaatggatcttctttccaccttggaactagcccaatctgcatttgagaaacactcaatatgggtgtgcccatgattcttgtaaacaataccttgtctaggtgctcctttcaagtaacaaaaaatttgctctaaggttgcccaatgatgaattattggagatgacataaactgactgacaacactaactgagaatgcaatatatagacaagtcacagtaagataatttagctttccaactaatttgggatatttctcagggtcttcaaatggctctccatcactcattaggtgcatagcatgattccttggagtactacaaagttttgctcccaattttcctgtctcagttaataaatcaagtacatactttctttgagatagaaaaataccttgtctactccgagtgatttcaacacccaagaaatacttaagcacccccaatccttcgtgtgaaatgggtatgaaggaatgacttaagagatgagatactttcagtatcatctctagtaataataatatcatccacatacacaaccaacaaaataatactgtcggttaatcttttatagaacatagaatgatttgacttactttttaacaaatcaaatttctcaatagactgactaaattttccaaaccaagcacgaggactttgtttcgaatcataaaaagacttacgaagacgacaaactcgcactaactccccttgagcaacaaacccaggaagtttctccatatacacttcttcttcaagatctttagaaagaaaagtatttttaatatcaagctgctgcaaagtctaatgatgagtagctgccattgaaatatatatagctgaacagatgtcagtttagcaacagaaaaaaaaactccagtttgagcataatccttggcagcaagccatgcctttaagcaagaaattgtgtcatcaggattgacttttaactataaacacccattttcaccctatgaccaatttttccaaaggtaaattaaccaagtcccaagtaccattaacaactaaaacattcatctcttctatcattgtatcaagccaattaggatgagacatggcttcacgaatgttttaagaatagtgatagaatcaagagaagtaataaaagagcaagaagaagaggacagatggttataagaaataaaaaaagaaatatgatatgtttttgttttatatataggccatctgtgggttcaacaccccatacacaaatgatcagattaatcttttacctgatcagtgggtagattacgtgaaagtataagtggttagccaatgaaaattatgagtatttttcttaaacattgtatgttttttgattaagtttgttaaatacatttagatgattaatattacaaacattagtattgttgccatctatatgaaattgtaaaaatctaaaaaatgaatgcatgaaagtttgcttctttttttttttcaatgtaacgttgaaaaaatctatcgctgaaaaataaaatttttagatttaaaactgtagtctacactatagggcacgattttgactcgttgcctataatagtatagggcacggcttaaaactgtcgcatatatagtataggtgacgagttaaaactgtgccttatactcaacattatatatacgcaaaaattttacaccgacgggaaagatttttggggacggttgaaccattgcatattctaccctttttgcaacagtcaaataggcgacgattataaagatcgacgaaaatactttacccgaatgtttaaaacagtagggaaaaactaatttttagtagtgcatctaagctttgaattgtcccatgcctaccaactcctcgaccccgaaacctgttagatccacctgagcctcttcctcctttgaactgactagagttttcaccacaagtaccatctcaattagattagtttcctctgccacctaaaagccacaagtcatgttgtggcaacattagcattaagactaataagatttatagggacactcttgttaataccaaacataatgctagtctttcaacttcactatcgaagcttagaagatatcttgtaattcttgctaggttgtggagggtctagctttaatttgcacaataataggtaagtatttaatgtcaagatcatataaaacattagacactaattgtttctttggatatgggtcacctgcaagaggcaacgctccgacccatttgcgtttctaacaaaggtaagcagtcattaacatggcttcttttggcagtttggatctttgtgccgtattcatgcatcttcgctcatgaatgcacatcaaataactcttaccacagacttaaagatgagtgacatcacatgacttctgtggtgatgctctctcagactctcattcatagaatcatataaccaaccaggacaagttggtcgtgcataatctaagtctcaaattctggattaatgattattgtctctccacctgaggactcattaatttggtggataaactcaattagtttcacctttgttttgttaagacaccaatttaaacagtgaccacgtacaatggaaaatacctttgttttttcacaatgtgtatttgtttctatccaacttcagagcaaacgtttgtgttttagtacttgcaacttgtggtccaagcagaatcggtcctgagttgaaataggccataggtaaaaaagaattattgggctcttactataaagataaatgnnnnnnnnnnnaattattaaaaaatatatgtatattttataaaatgtattttttttatttgagcccctataatgagtaggccctaggcacaggctgttggaaatattttaccannnnnnagatttactaccatgtatgtttcgttaacatcctaatatgaattcta

SEQ ID NO: 162677 - DNA, 2583 bp, Cannabis sativa
  modified_base (1261)..(1263): a, c, t, g, unknown or other
gagagagagagagagatgaacttgagaaagggaaaatgagagatgaacagagagaatggagagaagcagctagtggggtctcgtatatatatactgaagagagagaagttttttcagtagtgactttggaaacgtctgtatgggaatgtgtagtaggaataagaaggcaactactagtgctcccagatttttctaaacagctaacgtccagctaaatcacctttgttatgtcagaagaagaaaaacgttgaatgcatgaaatgacaatacaaaaaacttccaattattaattctttccttaagtaagaggagaaaaaaggaaaaaaaagcccctgaatctgatttttttttttttgacaaacaacaaatctgacttgaatggtaagattttgcaaaaatatttatttatatttaaaaacagtatccagtttagcaatttcagagtttagcttatagcttaccaaccatctggctatgagtcaagaagtctcatatggctataagtatcttagaagctctcagtcaatggcagatttttttggctacagtagtagtacactccttatggaaaatgaactaagagagagatatagacaatgagaaatttatttattttaattttttttttaaaggagaagaaccaaaccaaattaggcttttagattctataaatatattaagctacggacttattagcatctatcttcaaagtactcaaaatcaattttttttattttgcatgagggtatgtataggtaccaatcttgtagtttgtccttttatatttttactccttccgtcatatatttgtatattattaattatttatattaaaataagcaaatgcaaattaaacgtgattgagcgggacccactttgtgaccgtagagacgactacagtagagtctagcctagcatgaattccataccatattgtctatatatacgtatttcttaaaaaggcattatataaacaaatgtaattttcacgtgagttagaaatttatccgttgaaatgagtactgtattgaccaccaaccaagtatagaaattaacaagctatcacaacatgaattcctttttttttttattttgaaaggaatcacaacgtgaatttgacgcaccgatttaattacatttgataaatttttagatgctaacttttttttttattatctcccactactaactttactattattatataatttatttctacaatatatatggaatactataaataaatttaattataaatatnnnttttaaaaatattaaaccattagattttagtccgataacgaataataaaagagaaatttatacttaatttagttacttaattaaaaaaatatcaaaaaatatatatttctacactatatcaaaaatatatttatatgataaaatatttaagtcaaattcaacttttttttttatcacttttttgccaaaaaatgttttttattattttttttttcagctgatggatcaatctccgtccacataatgtaaaattgagaaatttttctaattaaatagaaaaattaatcataaaaacttaaaattttctaatattacccattcatgagtaatagccattaagagtgcaaccatatatataaacatataaacatatattttgtgtttacccatttgataaattacattatttgttttcttcttttggctggttttagatagtatcaatgtgtctgactggtatatgtgttatgaattttatcatcttataccatgcatataatatattaggaagccatattttacatctcacacatatactattattatgacagaatcataaccattttataagtgtgaaataataatgcctctatttatttgttattacttattattagtatacctggttataatcgaatttaatagtaatatttttttaattagttttttttttttatttttataattaaaaaagtaaaaatatttttcaaaaatatattttataaaattaattttactttttaattttttaattaagaatcaaaatttttaaaattttgaaaacaaaaaaaaagtttagtttcaattttttttaaactgttttttttcttaatcaatattttggactctgatcctgttagatgtgaatttagccaaccgacatggagtctatctaggatcattacttatgactgccacgtgtggaaccataataaatgtaaagagacacacagatttatagatgtttgatcccttttgtttaggtaatgacctactcttagttatattcactcttgaaataaaaccaagcagattataggctaagatcttataatttcaaactaagctctcttcagtattacaatgagttttgcaggtgagaagtatgagaaaagagaggacttattgttatgatgcttctgagcgtaattgcatcgtaagttctaagtatgtatattgccctttatatagtagtagggcttacaagctgcacatagagatattcttataaactagggaggttacaatgtatatttgaaatacaaagagaataataattaaggaatagggttgttatttgttgatggtgttgggttttat

SEQ ID NO: 162678 - DNA, 2234 bp, Cannabis sativa
agagtatatcctaatccaattaattgcaattaattaagattctttacttaaaataagaaacctcaattcaatagtacgccttgcccccgtttcaaaattatttcttctatcgttaaatgaaacgtttcttgctagttgaggaggttaaaaatcgaaacgtttttctgttgaggttaagaacacgagtgtgtgaagaagagagagagagtcacatctcactatcacaattcacaacaacccattgattttttagataacgatacgaaacgaaacgaaacgaaacgagaaacagagccatggctggtggtgcagccaagccgagcccaagcgcgcgcgaacgaaccattcaatgcaaaaactaacggttctcagaacgagaaaagaaaaccattttgggattttacgaagaagaaacaaaacccactcttctctctctctccttcctctttctctctctatatctctttctagggcaaacttttccctcataatcgtcgctcttcttcttcttattattattatattcgcgtttctaatctcaaccgactgttattttccttaatcttcatcagctagggattcctttatccagtttttcctcaagcaaggtacatcaactttttttttttttttcttttatgtatattgtaatcgtaatacatattcgtctcgtttcgtttaccttattttcgaatttgttaattttaattatattttatctatttcaatttgaggggtttgagtcctgtcgcattcgttcttcgttaattgtttctttaatttcaattcggttgtttgtttgtttgtaagtctaaattatttaccttttttcttttgtttaattgtttttagctttagccatttttggtttattttttaatggtttgagacgttttttcgtagcattaattagttgaattgattattttacttatcgaaatgtaattcgatacttttgcagacttatgtggttttaatttcacgaaaatgccacttaattttctttgataatgaatcttatccatagatttaggatgaatgaatggaatttaactcaaattctttcccagtttgttgcattgggcttgttcaatgagcaaatttatgacatcttttaatgaaacgtggattgaagagattatgttggaaaaaaaaaagtgaactgtttggctcagcctgctattctatattcaatttctaatgattcagtttgtcttattttgtatttatggcaccatatgcttgatgggtattgctgttcatttttattttatttatttttttaaaaaaattatttttttataatggatttgatcatttctacctatgtttttttttttctgtcttttgaagggtagtagtagcatgcttcatgaagctttgggctttattatgtgtgtgttattgtagataattaactaatatatatttttaatgttgttgtcaggctgcttatgaaggacactgctaattaaacttgtgggggattttctttgagacttgtgacaatggcagccgatcagtggagaaaacgcttgcatagtaccaatattgcgggctgctatggaagggagcagcatcgagcaaaacggaagaatacagggttgcctcagtatgattcaaacataagatctcatatttctcttgagtgggatggaaatcacaaaagagtcattgccagaaaagaacaaattggcataaattggagagacttgaagccatttttaggttcttctcctcacggctcaaacattgttgctgatgtttgtgctgttcctccggaaatttatgaattagaaaacattaaagaggtgctctcctatgaggtaggatttttttcatggttatgcatagttcattatgtatggactgtgttgtccacttaactcattactggcttttttctggacattgtaggcctgggagacttgtctctcggaaagtgagagaaatcatcttatgcagtttcttccaagagatcaagaggctgagcaagttttgaaagcattgctagctggggataaccttcattttggaagcccttttctcaactggcaagtattgttacatgttagttatgctatggctgtaaatatcttttgaaatcccttgttatagtagttttcgggtcttgtgcatgctcatggcgttggcagtgtactcaagttaatgaacgatacattttagtcttgtcattgactcattgacatggtccattctcttttcatgttcat

SEQ ID NO: 162679 - DNA, 2741 bp, Cannabis sativa
atgtacaaatcaaataataaatttataagcatcaaatatttgaatatgatcatgtcgacgttgttgccaaggttcgtggttctcaagtcgatgtcgaacggcaaatacttgagaaagatgagtgaagaggagagtaatgaaaatgggatgaatgcaacattcttgaaatttgaaggagatgacattacgagccctttagtaaagtttgcagtggagatagcccaaagaaatcgggagttcgtgcaccttcgaagttgtcacaacaacaaatacttgacaatagagcccaatcataatactctcaagaggattgtggctggggccgatgaacccatagaagaccttgattcaccctcatgtactatgttccagcctatcaaagctaatggttcaaatgaaatgataacatacgaagagttgtattttcgatttttccacgcggcaacaaacagttatgcttgtcagatagaatctgcgtcgagtccttacaggagtggtatgtttgtatataagtttttaaggctttctgattcgagtttgttcaaagttttggattgggattcgcttgtcatattcccaaaaaaagtatcgtttaagatggttgggcacgagaaatatcttagcttgcgtcaaatccaacgtagaccacatttgcaatttgttggctatgacaacggggataacacgacggagtatgagatatctacctttggtgatggctatgttcgcataaaatcactctccaataataaattttggaggcgcagtcctaattggatttgggctgattctgatgatgagtcaggaaacaataagaacacgctctttcggccaattagagtcgctgataacgtggtggcctttcaaaacatgggaaacaataaattttgcaagagccttaccaccgaaggcaagaaaaattgtctgaatgcagctgtgcccaacatcaccattgattcgaaactggaaatactagagagggtccttgaaagaagtatctacaacatcaatttccgccaagatgagagtagagtctacgatctcaaagtcatggatttggtccccaaggctactgccgctaactacaccaatgaagagaacaccttagccctcaacttctcgtacaagattacaaaatccagtaccttcagtggcaatgcttcccttaagttaggagtcaaaacaacctttgaaactgcagttattccactcatcgcgaaggggagtgttgaaatttcaggtgaagttacaatcggacttcagtgggggaatacaacatctattgaaaccgtaaccgaaactacctatactgctagagtgcctgctatgactagggtgacagtcactcttatagcaactcaaggaaagtgtgatgttcccttctcttatgttcaacgcgattctctttacaaagggggtattagagtcgcgaaaatggatgatggaatgtacaaagggatcaatatgttcgattttcggtttgatagccattatgaaaagctggttgtaccatgattattgaagatttatgtcaccattcgagtcctaagctggaagatatgtactcatcattatttatattaaaaattatacacatttaaaataataatcaactcctataaatatacatgtaagatattaccaataaataatactagttgtcattatatgtataaaaaataatattatccttagtcatgcatcaaatagtttatacataattcataatcatcatgtatctagtttttttatgccaatttataatctacaataactgaaagattgtttatgtatctagcatttgaataaagagtaaatactattataaaatttgtgttttacaaaaattatagatagaaccttctcgttttttaaataaaaaatcagaccctttctttcctaagctcaattttcattaattttttttttaaaatataaccaacctgaagttaatttttagcacaaaaatataaccactttgatcatgacacctttaggtattaggttattattaaattttatttttataaaaattgagctcaggatattattggattttattttggagagagagagagagtaaacggttgagatgaacaaataatggtagggttatgtgtttagggttatatgataaccctaatttgaattaaagagagagcgaaatagagtatcgatttaaaaccgtcggcaattttatcgacagttttaaagggttgctttaaagtgtggcgatgattttaaacccatagtcaattttaatctcatcgttcctaaaaaattcaatttttgtgctgacgagaatagtattttttgtagtggtactgaaggcaccatatagctttttgatcatatctagatatccaaggaacatacattcaatgccctaattgcctataacttttattgcttgatgtgaagataagttgtacaaccaaacactctcaaattatatccaccatacagtgatcggtggacaattccctaacgtacgattcatcttagaacaatgccaaaacatttcgaatagaaaagatttgatgaaagaaacactcctttgcttcatatggctaccactttatcatcatcatacacattctacaagctttgttgtctcaccccaaatttaatagtactactataaaaaaacaactatttttagtgataactttttagtcacaatataaattttttgtaactaaatgtgatttttagttacaactaaaagttacttgtgacta

SEQ ID NO: 162680 - DNA, 2311 bp, Cannabis sativa
gggcataaaacccaacacctttaaatatgaatatgtcccggccttttgtttcatatgtggcattataggaaactctaaatagttttgcccaaagttttttggtctcccattgaaatatggggtgaagccatatggggtaggaatacgtgctcaacctcgtcacaaaaaccgttagatcagtgctagatggctgagaacagggtctaatgatgaagcttttgatggcgacagcactaccggaggtaatcaacaagcttgtgtgattggcagtatccctacacttacgaatgttagtcatcaaaatcttgtccaaataaggaaagagattaatatggcagctggtgacgtgagtaagatattaagatttgatattgtggaggattctacagctggtgggtttgactctaattttgaaagaaactattgatatggataatgttcatattcatggtcaattgattttgttggatggtaagaggaggcgtacctcgggtagggatgttattggtccatatattaataggccacctaatgtgtttggtggatgtgaggcccattatgatggggttggtaatggtgagtgccatatggaagactcggttgctttttaagatggagtctccgtttaaaaaaaaatggctttacggtgggcactggtatccaggcccaccatgcattatgagtcttttaagttagaattatcgtgggcttgggaacccatgaacttcacaatttcttttggacctttttgtccacaagaaacctgattttatttttctttgtgaaacgattagtaggaaagatgtgttggaacgtctttgggttcaattggatttcgatggtgtttttatagttgagcctaggggtcgaagtggtggagtggctttgttatggcatcataaggatgaggttaacttgtgagctactctcataatcatattgatcttataattcaaaatggtggttctttgagttagcgtcttactgggttatatggggaaccaaatataactaacatgaaacatggacccaaatttgtaaattataggatgattgtcttataccttggtgtattattggtgacttgaataatgtcacttctaatgaggataagaagggtggttatccatacccaagctggttgattgaaggctttaatcaaatgctattgggctgttctctgcatgacctacctcttacaggttacccatacacttgggaaagagggaaaggtggtgcgaactggactgaggttcaattggatcgagctttggttagtgatagttggctgactattttaaattctgcttaactatttaatttggaagtcttggtttcagaccatttccccattcttctaaatccccagctataaaatttgtatccgaaattaagcattttttctttgaaaatgcttggctttgtgagccactatgctttcaagttatccaagacaattgggaaatgtgtgctaattgtgatgttatggtgaaagtataagcttgtggtgataagttaaatagttggggtcgtgattacactgagaacttttaggagagaattagtagttgtaagaaagaaattaagaggcttaagcttctttgtgacaccattctactatccagtatgttgaagcaaaaaagaatttggctaaaatttacattcaaaaagaagtattctggtgccagtgatcaaagaaattatggcttcatgaaggcaatcaaaatagtaagatttttcatgccaaaacaacttttagtaacaaaaataatactattcaaaagcttcagaattccatgggtgtttgggttgattgggactcgaatctatccaaggtggtgtctgaatattttaatgacttgttttcctcgagatcttctcattggcaacctgttgtggattgtattcatcccaatatttctcagcagcataatgttgaattattagcccctgttttggataatgaagttaagaaggctctttatcaaatgcaccctgataaattcccagggccagatggtatgaccttggatttctatcaatagtgttagagtattcttggtaaatatgtgattcagttagtgaaggaattctttgcgtctgtttcacttccttctgggcttaataatacaaacatcgtgttgatccctaaaaagaaatgccctgttaacatgggtgatctgagaccgatatcactttgtaatattatatataaggttatttcaaaagtcctagccaatagtgtgacagtcagtagtcccgtgatttgtaaggggaaacaccaggtaagctgtgcaatcccacatcgcct

SEQ ID NO: 162681 - DNA, 2013 bp, Cannabis sativa
  modified_base (235)..(260): a, c, t, g, unknown or other
cttccaccctcaatcatggaaaagttcttttcgccaactctcaatcgtgaataaaaatttcaatagaaaatttttaagccttctcctgatcaatcggagcgattgaaatatgctaaataattttggggatattttatttttattttgagatattttgttatatagttacaatttatttagaataaaactattatttttgaatagaaaacataaaaaaaaaagtcacccaataatnnnnnnnnnnnnnnnnnnnnnnnnnnatagccacattttatatagaataactataaatatttactggtgtaatactgaaaaaaaaaattatgttctcaaaaaaattacatacattaataaatttcaatatttgttgaagtcaataaaataacaaatgttgatcatattttacaagttattagttactaattaattaaaattggatatttattagtttttttttttttttttggaaaagttctcaaccaccaaacaccacaaaaaaaaaaaattataagcattctactaagttgggggtgaggatatttattagttttccctctcactattttgtactcaatcagagaaaatcttaaaataatatgcatcttattttttgagaagaatactttaatagttttgttgtatattaaaaattgtaaaattgataattttatgtagtattgttaaacttaaatgattagttatctctaattttcttgtgattttttcgtatatatttaagttaatagtgaaactagttatcttttgaactaaaagttaaattaaaaaagtcaaatcaattaaattactatttggattttattttttctcatttaattggattgaataagatgatatttttttttttgtaaaatctaattattatttatattagatttgaagtatgtaaacaaattaaataaaaaatttatatataatctacaatacaataataattagataataaataaatatatattatgattgatccataataattacataaatttcatagtgtaatactatcaattaagtcttcctccttaaatctctaaagcaaaaacaattttaatttaattatttgattatcaaaaggtatacaattgtaatgagacaatatgtatttataaagttagggagaagacttagctacataattctcgttggactagacctacttatcaaatgtttcgattaattagaaaactccatacttctacttcaattaaccttttacacacacagatgttacacacattgactattgattactaatattatgtactaacataacaaagagctatccaatcaacccatattttattaaaactaataaaaattaatgtaagttcaaataaaaaaatctaacaatttcttccagctacattaatattaatacataaaaagtctaaatagtatttatatttggatttgaagtacaaaaaaatttaatctaaccagattagtataaacatttagtagctaaaaacattacaattattgcaataaatttcgcgaagcgcaatgtagttccctattatacttacataagtaagtcttttattttaaggtaataaaatacgtattaattaacatcgataatttgacaattttttattttaaaactttaattaaaaatacataaaatttcaaaataaaaaaacctaaatatttaagtgacaataattttttttagcaattgacaataaatttaataaaaaaaaaaagggtcatctatttaggcccattctgatgggcctctaaaatctaaatatgttgaggcttggcactataactagtctaatgacactacaaatttaatcttataaataagtttatttacagtgccttactaatattagtgggacattgtagacatgattgactctagacataggcagattaggtccacgcatagagcctgctcattttaagggtctaaataaaaaaaatatatatttaaaaaatatacatatttttttaataattttaaaaaatatcatttatcattatagt

SEQ ID NO: 162682 - DNA, 2742 bp, Cannabis sativa
tttttttttttttttttatcttaggaatgaattatttttcagctgacgttttatttgtttagaaacttcttgtaagagaagaaattctcttatggaaagtttgtttgttttttttttttttttatagaaattttgactattattattttccttaatgagttcgattgtgtcttgataagattagatcaaactcactgtttatggcaggtatcaagaccaaatacatgatcggatacgtttttggcaagttttcttttctggtctgatttgttgcaacagaatctgtctttgatgctacaaatcattaggattttttaggaaagttttgtatagctgtagattcgactttgtgatttaattttctacaattatttttacaatctgctggttctggtcatgtttctgcaaaactgttttctgcagtaacagaattacattctgctgctgcagacgtttacaattttatatttctgtaatatttattgatatttgcaaaaactcaatttttcataatgtatagatggattatggagtatggagtatggaatttgaattttttgatgacaatttattttgacacttctaatttttttattatcatattcatgcattcatgatttttatgaacaatgaatataagtttgacaaatgatttatttggttttggattatatttcacatatggttttctttttctataaagaatttgggtgataagaaaaagttgactggctcaaacccacagacttgtaaactcgcaaacccaaaaccatttcacgggctggctagtctgagtacaattttttgaactcgaaattcgcaaactcaaaacacgacaaattggcctgatgttcagccctaccaattttagtcctccaacgtatgagtatgagcgattgtcaggaaccatgagggccaagtaattgctacgtatgtcaaaacttattgatcaaggttgttttagatatgatgaaatagtagaaaaagctagccgtctttcatgcctttaattggatttttcaatttccattatagatcactcatattgaaacagatgttctacgtgtctcaacatttataagcatcttatttagatcctcttttcttagaattgttatttctcattgtaaagagaaacgttaagcaagttttttatagtttatattaatagaacatactcttgagttagatgtagacactcattagatgggagaaaagaaatatttccttgtaagatattttttttttttattaaagtaaatcgtaaatgattgttgattataatataaaggaaactttaaaaaaaaaaaaaaaaacaagaatcatgcataataagacttgtattctctaatcaaaattatacgcagtagtggatttcaaacagaaactgatcaattatatatagtggctattacaagaccagtatttatatcattatatcatgatgtatgcatgaataattaagaacaaataataatattaatgcatatatatatgacttaatttcattcatccttaaattacaaatacgtagaagttttaaatatttatttataaatggttatatatatcaccatctcgatcatcatgactacagtactggatctctgccttatttagttgttgggtttggcttcaacagcttcacctgcatatgagcagcacctggcgcaccctcttccatagtaattgctcctacagcaaccgtagtagcaacgaccaccgccaccgccacgccctctgcggccacgccctccgccattgctgtaagggccaccaccgttatcgtaactcccctgccctccaccgttattataactgccttggccaggatatcctccatatttaccatcctctaccccctttacatttgcatccacaactgcatgcatggagtatacatatactataagtaagacttttcatatataaatctagatcacaaactgctataagcacaagcatcataataatatgagtggtatggtacaatttaatatgaaggtgaacgaagtacattgttttatgtattattacttatacaatattattaaaggtaaacaagataaaatgctagaacgatttaatatgaaggtgaactacattgtttttaaatatatatacgtatcaatattaatatcattagactccacgatataaaaacagctagctgactcttgtatatatatatatatatataattcataataattattatatataaaaaaagcagacctttgttttgttgagtggaagtttgagcaaggtctgtagctgcaacatctgaagagatgagaagagctacaaatgcaagcaaaagagccagcaataagaaatatctcgaactcattgatttttgtttactcttaattaatggagaagagtaatgtgaaaaaccaaactctttctgtattcctatttatatagctaggttacaaacaaacaagtcatgttaatggataagagagcaattaattttcaggatttggccctacaattgtagttgggagttggtgaaataatttatgagaaatgctaaactactagtgtgtcaaaaaaaatctgatgtctccaaaatgatgtggtatattcttgtcttcaccaattgtttcaagacacattttagatatattaatttagtttagaatttgttaacgaatttattatctattctatatagagtgtgcttatataacagaattcttagtttataagaaattgaatttttatttatattaaaaa

SEQ ID NO: 162683 - DNA, 3493 bp, Cannabis sativa
taatagacttaaaatgatcgaaaactgtctttttcatgaatttaatgaattattattaaaactgttccaactgttgttgaatttataatcaccaaaaccaatactattagagctgtttgtttaattcatggtcaccaaacttttacaataatagttttaaaaattatgaacaaaaattgggtttaagtaaaacattattgcattagtttttgtgtttgaaattcttagcatgttttttttaattacttggccaatttaattactttgcttttaattttgttcatggtaaccaaacataaaaatgtaacaaaaaagtgtgttttttttattttatttttatttttacaggttttttattgagaggatgaactccatgaccgaaaatcgagcaaaagaacacggtagaaactcgaatgtagctgcaaatggagatttttctgcacaagttctaacaagtaatggtgaattagaaggtaaagactcataatttttcatattttgttacataatgtgacatttaaagcgcgattcattgaagatagcttattcttaggtagttcaactcctaagtccgaaagccctaagggcggtttttcttctccattatctggagaagagaagagaaaaatattgtctgaatcaaaatttcaacgatcactaaaaagtcctattttatcaggtaagtattcgatcttccaagctctcactaactctttttgacgacattttttaaaaaaaaatgtacaattgatgtgagaatatttgacaatttgtagacccttcaacaactttaacacacgtcggtaattacaagtttcatgaggtgtttcaacttaaacaagggcgatacatggatctacctccttcgaaaatctcggagatgatgaaatctaatagcttagatgttggtttactcatttgtgatgttctaaactatcatgaatgtctttttcatcaactcttctttgattcatctttaatgcattttcagtatcttttgttgcagaatgctccaactcaatcgctcttaagcgttgtcaatagtattttggatgaaagtgtagagcgaaacaatagcgaaataccccatgtaaggatactacaaaattcgagatataactaacttaactgtcacattagttaagttaatttcttaagcttgtctcagatgggagacaggtcgatcttgagattgagtgaaccttaaaaatatataatattttcaaaaactattaaaaaaatacttttttttggactcctgcactcaagtttagcccgccttagcctaaaagaataccaagattgattgcttggctagattaggagaaatttacgcactgaacttgtctctgaaccccaagataaatttctatgccttgtttgttgtgttagttgtgatctttgagacgaattttaccaaatttgttgcagcgtgtggcgtgtttgttgagaaaggttgtgcaagaaatcgaaaggcgaatatcaactcaagcagaacatttgagaactgtaatatataatgtttaaggcatacagttaagttttttttctaatgaaaagatgatttcttttagaatgttttgtattaatttcataagggttttgttgtttgcagcaaaacaatctttttaaggctcgcgaagagaagtaccaatctcgaattagagttcttgaagctcttgcaattggtactaatgaagaaaccgaggtatgatatgatatgattatgatataattatgatatgatatgtttcatactattttcttcgatttaaaacttctccttatgacagaatgagaagaataatcgcgaagagaagaagaaagaagaagacgagagcctaattcggttgacaaaagaaaaggatcaaagcaatgttgaaattttagcattaaagcaagaactagaaatgaccaaaaaccattgtttggatttggaaaaagaagctaagaattgttcatttgagcttgaagaaaaacttaaaacacttgagaaactctatgaagattcgaagaacaaagtgatcgagttagagtcattttcggaaactaaaagccagagttggaataagaaagaacacatttaccaaagatttatggaaattcagtttggtgcatttcaggtattaattgtgttatgttttttacattttaataagccttgttaattaacattataaattaattatgtcattatgtgaattttcaggacttgagattgtcttcaaattccattaagcaagaaattataaaagcaaaagaaaactatacagaggaaattaataactttggttggtttattttaacttaagaaacttcttttgttaattacattatttttcatacatttaaatacttttgttctaatgattttgaaaactttcttattcaggttttaagcttaaaacattagctaatgcagctcagaattatcactcagttcttgctgaaaaccgaaaaatattcaatgaacttcaagaattaaagggtacatgattttatgtcacttaattatctttagtttgttgtaattttgtatttgaaatttcttattctttctcctttttttgcaggaaacattagggtttattgtcgaataaggccatttctaccgggacaaaaggagcgaaagacgattatagaacatatcgatgaaaatggggaattaatagttgcaaatccatctaaaccgggcaaagatggccatagattgttcaagtttaacaaggttttcgggcaagcctcaactcaaggtttttcgtctaaactctttcctttcgttttaaaatagaatgttttcgtttgaaaaagcttaacatctctaattcattctttttttggcagaggatgtattttctgacacgcaaccattgattcgatcagttttagacggttataatgtatgcatatttgcctatggtcaaaccggttcggggaagacatacactatggtatttgctcttatttttcaagatatcatacttaaaaaaacatacatttttgttctaagttcttttttttttgcttcttagactggtcctaatgcatcatcaaaagagaattggggtgtgaactatcgagctttaagcgatcttttcagcatatctcagacaagaaaaagctcaatttcatatgaaatcggtgttcaaatgattgaaatttacaatgaacaagtgaaggatttgctatcaaatgacaattctcaaaagaaatatcctttttcttactcttacaagttttgaccttagtgttatcttaagtataacataacatttgtttcccttaatttgcacacacttgggattgtgactcattatcaacccaatggattagctgttccagatgctagtatgcacccagtaaaatcaacctcagatgttatagaactcatggaaatcgggctaaagaatcgatctgttagttttacagcactaaacgaaagaagtagccgatcgcataggttagtaaaaattaaagggaaatttacatggta

SEQ ID NO: 162684 - DNA, 1730 bp, Cannabis sativa
  modified_base (1677)..(1692): a, c, t, g, unknown or other
caaaacgtgtcctccaagatgagtgtttggaatggtaaattcttttctaaagcttgtaaagaaacgtttatcaaagcggtcatccaagcaatcccctcttttgcaatgttctgttttaagcttcctaagaccagctgccatgctattcagcgcttaatctctaagttatggtggggttatgcttttaatgaaaaaaaatccactggaagaagtggtttatcatatctaattcaaaattcttcggtggtcttggttttaggtctctaaccaaccataaccatgcccttctcgccaagcaggcttggaaaatttggactaaccctacctctctcctccatttgcttcttaaatccaggtatttcaaaaattctgattttcttcacgccccaaaaggttacaatacctccattacctggagaagtcttcttcattgaagagaccttatgagaaaaggccttttttggaagattggcactagtaaaaatattccaatcacagccccaaaatgaattcccaatatcacacatcccacttttctccacgagcttgatcctatttaatacactgtctctttcttcctgaatccaaatagcacatggaatcaggaaaattttttgtattatcttccagagtaccaagtaaaagctatcctccaaactcctcttgaccctaacactcaggatactctcatttgggggcaccacaactctggtatccttacagttaaatcagcctaccaccttgcttgttccattaataacgcgaattctccttccacctccaaccctaaagccttgcagcattggtggaaaagtttatggaaccttaaaattcctccaaaagtcaagcattttacctagaaagccttcaatcatatacttccatgtgctttcaatcttttccacaaaaaagctctcaatgacccttattgccatttttgtagaggtagaatggaaactgtcactcatgcacttttagaatgccccagagctcgttctcattggaagcacttttctctcaaagatttttacatatcaactcaaaacagagacattaaggatgtttatattcatggttttgatactttgagcaatgacgactttattttttttatttgtatcctttggcttatttggaattcaaggaataatactcttgttaataataatttggctactaatgaaaatgtgaaggactttgttatcagattcttgcaggattataactaagctcagaagcttaatgaagtggccaacaccaattcagttcaaactcatcactccacaaaaaacaggcccagttttgccccttgtatccccaacgactacatttgtttgtgtgtggatgcatccttggaccaaaaatcgtgtaaaacaggtttgggaatggttttgaagaaaggccatacgcaagtcatatcatctgcttccatccagaaatctggagctccttcaccgatctttgtagaagctcaagcgctcctgaaagggctcacatagtgtcagaactcccatttccagccattgctagttctatcggattgtcttcaactcacaaatagaattaatagcaagtggcaagacaactcggcactctcaagtctggtgctgatgattaggcagtccctctgtaatctctgtttaggggttctagctaaacatttaattataaatatannnnnnnnnnnnnnnncaaagcttataatataatgcgtaataaataattataaa

SEQ ID NO: 162685 - DNA, 1834 bp, Cannabis sativa
aataaataaatataataatatagttaagtataaaattactaataataataacttaataaaatcacgtaattaatggacttaataaatttaaataaatgtcgtttcaaaccaccaaatataatagctttataaaatacagtatgtgcatataaattaataagtaattaataaaattatcaaatctaataaaatctcttaaaataaggctcaaaataaaaaattaagaatacttaacttaattatcatgtaataaaataattcattaatacctatatatataaactattatatgtttttaaatctttacaattattagtcgataaaataattaaatttaaatatattaaattaatatgaacattaaatatgaaataaatgataattaaaaaatactaaatatatatgtggaaagaaataatatattttgcatactataagactatgcttaaaattaaattaaaaacccaaaaggcaaactaaatctcgccaaagtgcattaaatgtttgcaaatttatttaataaaataaattttattaatatcatatattaaatgaaaattgaaattaatactgacatcaatcacgccaagaaactcgttcagccatctaattcaaattttgcaattaactttagtttcaagaatttcttcgatctgagatgtttgccggctacggagtaagtcatcggaataaccgctaatataataataaatatcgcccacccctcagccgtcaccaatattatgcttccaccatagtacctccttatcgatttgcactgaaactctgttgttatgagttggaaagagcctcagcaggggaaacagaaatatgaggaactgaacaaaaggagatatagagtgattttttcgttataaaataatattatataagaaacaattgtaaaatctaagacaaaatgtaatacaaaaaattcgaacaaatttctggaaagagaacactcaaaaagtatcactgcttaaaaaataattaaatcctaaatacataaaaacaagaaacaggtcttgtaaaaacatagttgataatacaaaaacaaactcaaaggagagattgagagaagatagtgagatcaaataaaaggtgaaattagacttatcttgcggttactggctggaaatgataaatcatgatcggagtcaaaatcttttgttgcttcgtcgaccccatactattatcttgaaacaccctcgtttctttattcctatattgttatgtagttatacatatgtactttctggtttcggttaataggaataataatactactcttgttgatcctcttcagttgctgcaaactgaggtggtggccatcggcagtggaaggaatattaatatcgtcggtggtgatgacgtcaggtcttctgatctggacgactgatgtaggaagtcttcttatttagtgataattatattgtaaaagtatattaaattataaaatttgataatttactagtgtttatataattttgtttattagtaattaactattttacaataatttttacttaaaaaataaattaatttcttacaaagataaaatcttgagaaaaagatcattgataaatctataaaaaaacttatgatataatttcaaaaaccggtaccatcaccgtaccttacttgtatatttttgctacaaatatttaaattcgttgttattaccgtatctcaattatagtcaccaattccacttttagttgtaactaatcttacaaataagtttgctttgtacataaaataaataagtcaattagttaactactcattttttacaaataagtaaattattttattataaattcatcacttgtgt

SEQ ID NO: 162686 - DNA, 1823 bp, Cannabis sativa
  modified_base (1779)..(1798): a, c, t, g, unknown or other
aaatattcccataactatgtatcatgcactttataagattcatcattcattaataatattgtgtagatatatatatatatagctaaagtgttaaagtttctaatatattgtgtaataaagcatttcattccatgcaaaaataataattattataataaataataataaaggccaatatcgttgaatgatatcatttacaaacttttcaactttttgaccttctacggccggctcaaacagctaattaagtccccattttatttttctacgtttgtaataataaaattatgaaaataaaattgttaattatgggaaattaggatataattgatgaacaattttttttataaatgattatggttttaacatttaagtagtggtcctatctaataatgcattatatatctagtaaccaaaaataaataaattaaaaaaggcaatataggtaccaagtactaggtagtacttcacacaaaagcatgcaactactacagcttctagaaattattgaatatatatgtagtgtttgttgttaaagtttttgtcaaggcattaaataatattaataatgcatgttagatataaatttatataaatactttgtttaaagcaatttgtatataagaattactccaaagaaataatatataaagttgtaaactattagtcaaagtaaaaaagattctgttacaccaaagatgcacaaggcagacaaagacaattcatgattaaaatatttaactgcaaatataataaagtagaactctcttacttttatgtaaactcattttacaaaattcaacaaaagttttagcatctactatgtatatgtatattatatataggaaaaaacaaaataataataattaagaaaaaaagcatgttaaacaaaaataatgacaatgttaatattattgagtggtatctatcaaattttatatatcaatttggaagacaatagtgataaaaatcttttggaattaattgccatatgtatatatattattatccatacttgtgttttaacttttaagaaagtatggctctttttagatattgacaaattactacttaaaacaaaatttccatttggatatgtgtatcatatagttggtcggtcgatatatacataggaccactattaggtggatttgggttttcacatttcaagacagaaaattgtatgtgaatctcgtgacatatgccaatatgtaattaaattatggttcttgcttttgtgtcacatatttaggctaagaattgtcataataatataggtgagaaattcaaacgaacaaaaaaaaaaaaaaattgttagggctaattagtttttgctaatattacatacaaagttgatgagttgagcgtctttgccaaatgaataattgccttagttattttagtttagtttagttatagcatattagttggttcatgcaaacactaataaattattttcaatcccacatagtcggcagcattgcagctatggacaatttgattcaattataaggtttgtttggtaatatttaaaatattaagtttgatgacatgtgtggtattaagaataccttaatttgaaggaaattatttcatatacaaaagttaaaataaaattaataataataacacagattatatttagcgctggattacataaggaaacttatgtaaaaataataataattgaagtttttcttttatgttatctttactaaaaaaaaaattaggggaattatcttatatacttttttaaaatttttttttttcaaatttacnnnnnnnnnnnnnnnnnnnnttgcagcgctagttgcaataagggt

SEQ ID NO: 162687 - DNA, 1344 bp, Cannabis sativa
tttctcgaaacatgtaatgtacctgaatttggccggacttgatcttacgacatgttccgagatcaataatcggaaatttaccatatttggccttcatagtaaaagggccttcagaaggtctttttataccaaacttggttaaatctccatacactaacttactaagccacaccactaaagattccaccattttaaagggtaaataccgagccaaaaacacccctaaattaagtatctcctttgacacaaaatgaacctacatacattccataataaataaaaatatcatttactcacgatacaattattattaagtcaataaatttctaaatttaatttaatacaaggcaactatcctcataaagttttccacattaaaaatcaaaatttgtgttcaaaatctgtacattttatagctcaaacaatagagcttattcgatcatcactgaaagtttttttcaactcaaacgagtattgaggaaaactagtcactaccttaagacagagcatcaagtaaagtacaaattaaacatatctcatcatgatctaagcatatattgtaaattggctttaaaaatatttataaaattaatgagataactagacagagtactaatgtttttttttcttaacaatgaaagggatcacctatctcttcctcacttttttagtagccttgacaaacttagtgaccacttaccagttataggggtcttatatagttcatccagcagctttaattgggtcgccgatatacactttatgagtaggggtgttcacataattcgtaatctgtagttctaaactttaaccaatctggactaaagactgaaccaaatgaatccagtatgaatgatttggttattccagatcgtttaaaatttttttagtttagtcataattttagatatttcagttcaaaccaaatcaattcgtataattattttatatatgcttaatatatattttttttggacaaaaattcatgtttgggaacaatattgttatgataataatattttatattacttatgtaatataaacttatcaaaagtaaaaaaaattcaaaaaaaaaaatgaagaatttttgtacaaaagatttagaacaactcccaaatataaactagagtaatttgcggcaaaatctccctaactatcaatttacttgcaaaaaaccatccaacctcatattttggtgagaaaaccctccaaagtactgttccgtttacatttttaaggtgccgtagctcttaatttcgcccacgtggcaatgacaagtcactaaaaaattatcctatgtggccatattttacaaaataaataaaactttaagagtaatttgcg

SEQ ID NO: 162688 - DNA, 3546 bp, Cannabis sativa
  modified_base (3502)..(3518): a, c, t, g, unknown or other
aatctccataccaaacaccccattggatagtttaggtaggagacactttgaataattaagtgaaataatcaaaattaactacatgattgaattaacgaagaggagaaacgtcataacgttttcctccatgacgtttgtaatagaaattaacatcttaaatatgttgaactacataataatgctggcctccatttggtaccatactcagtccaaattcatctcccatgtcatataatttaagacttttgagggttctcaagtgtttgatcccaagtggtatttccttcagccttgtactctctccaatcgtaaactcttcaaggtaaggcaatgcccactcatctatacttattgaattcaatctggacaaccctcttatgcttagtaccttcaagttttgaaacccgccattcttgaaccgcagctgctcgccatcataggcctcgtacagctcgagcttgatcaatgagactagatattgaatgtcctctagtggatcatctgtcaactttgagaaccgtagagttaatctttctagtgtttgaagtcgaggaatgcagcctggcaacttgtcaagacaaccttccaagtgtagtgaccgaagaagtgagggaaatgagagtgttcccaagtcaagaatctcatctgaactcaaagaaaacagctgcaagttttcgagttggtacatggtatcaaatgaagtacataaagctcttgaggtttcctttgtcaactttgtaatgcccaacttctttaactgactgaactttctaagctctttcattagtccaacatcattatttgcctctatatgatagagttttctcagtccatcccaatggccaaacccttcgtttatcttaactcctcgtactgtattcaaaagggtatctcttcttttgccatagtagtatgctagaatgtattttagctcacgaagattgtttatttcggttggcagctcacatactagagagtacttcaaatccaaagtctgaagcctttgcagcttacctattgactttggaagcatcataattgttgtgtttctcacacttagataagttagaaatatcagatttccaacttcttcaggaacaaaaactcgattaccgcagccttcaagatccaaaagtttcaagagcttgtacctgtcatttgcataccatttagtactattgaaaggatcaatggactcaccaaccatgtatggaaagcgagggcgtatgtgtgagtcagtgaagttatcttcattggactcttctggctgcttactgcgaacaaaaccagactttgtatcacataccaattggatagcttcgtgcattagattctgaactcgacaccatcttggtttcccattaatagtactattggcatctggtacctgaatcaagcttaaactcacaagctcattcaagtggtcatttcccatatcttcactttcaacaaatccttcagcaaccaattgccttactaaccttttccaactgaccaaatagtccttggggtaaacaccaaagtagagaaagcaagcttcaatactcaaaggaagatagccaaacttaggcagtaaactctctgatatatccttcagaagaagattcaacttcaacattgaagaatttttttcaagaaactgtttccagccaaggaaggttttgtttttagttgacaaaaatctaccaacagccaccagagcagctggtaagccttcgcatctttggaggatttcatgagacagtttctccatctctggtgggaaaaatgtgatttgttgggacacatttttgctgaatagttcaaaggccattgttggctcaagaggctgcatctccatgactcgaacaaagaaaaattgtggccaccaaacatccaaattcttgtaaacccgagttgtgattattattgtacagcctcgtttggtttctggtaaaacttttttcaaatgctcacagaaactaacattccaaacatcatcaaacacaaacatatacctttcctcttccaacaagtgttgtaacaactcaccttgatgatgttgatcatgatgattgttcaaatcattgccaagtcctaatggatcagaatctgtagttgcctgatggaactgtcttaccattgaagctatgaccttttggttactgaatgtttgagagactgtaacccaagctttgcagctgaagtggtcactgatttgagtcttgttataaactaacttggccagagttgtttttccaagtcctcccatgcctactatgaaaatcactttgtgcttgaattcattgtctaataaccaaccttccaattcagcttcataagattcaaaaccaacaacttcaggaggatcactagtacttgctccttcattgattagtcccaaatcattacaccaatgagtacttgtttccataattaggttactcttttcttattgtatagaagatagaaaaataaacttatctgctcacaattatctcataattatttatctatacttttttgccttagttgtgtgctttgtcttgtgattattgattacaatcaattattaattgaactttgcagtttagagtactattgcctctaaagaaaacttagtcaagtcgttttttatgtactaatttaatatgttttaatttagaaaagtaatattgtccttcaattggcttttccaggcaggagccacttgaccaacatggaggctctattcagactgtaaccatctaactatgtatatctaaattaaagaggctgtcatagtcttttacctaaccaaaaataatgtctttattttcagtaaaagacagaaaagacttcacatcacattcacatgcatggtatggttgaaatttattttatagccacccaatgcactgattcctctgtggcatggcaaagacaatttatgccatttatcttagtggaaatgactgataggtgtttttttttccaagaaccaatccagtatagctatcatctattcaataatgttagtgggaattttgataagttggtgggtggaaaaacagccttttcgttaatttcttcactagtgggagagagaacttatcaaatatcaatattcagcaggaatttaataagttaagaaaatattattgtctagtatttatgtgagacatattatctagtgtgatgatagaacttttttttttactagtattatttagcataaaaaattttcctttaatttttttttggaaaatgacttttctaaataaaatttaaaggatccaaacgactttcacttaagatatctaaaagattattttgtcataaattttcaaaacaatctatattgtacatacaaagtcacaattttttttcacaatccaaatgttttgctgtcattggtttttacacaatttacaagtaaaatgggaaaatatttctttaaaaaaataaaaatatcaaaaagcattagtgatgtctaccactatccttactggtcgaattaattattggctaattaggatttttnnnnnnnnnnnnnnnnnatgtaccaaatcatgctctctgaacttt

SEQ ID NO: 162689 - DNA, 4552 bp, Cannabis sativa
  modified_base (3223)..(3226): a, c, t, g, unknown or other
  modified_base (4522)..(4525): a, c, t, g, unknown or other
ttacctcactcttaaccatctttaaaatagttgtcgaattcataaccgcgcatgagctaaaccgaaagctatcatgaatgccactgcaataaggcgataactctgaaccgaaaagttaaatttcttgcttaagctactaagttgggttcctccacagcttgattttgaggtgtatcgtatttcaaggtccttgctacatcgaagaaatgcttaacagcttcttcgggtgttccaacaaggacaccgtgtcctagattgagtatgtgtccttgtggtcctgcacatcttacaaccctgacaaagaaagaaacaaaccagaattggaatattaatactcggtcgggtcaagcctttatcgattaacttagtatgtaaatctatgcttcattgccatgttgttagcattgttcagagaaaatttctgagttttttcaatgttactcttaagtgtagaatatgaaagttggatttgagaattttctgttgcaaacctttgaatttcttcagtaagggcaggaagaggagagaataagcaagcggggtcgacatttccttgaacgctaatcccgctacccagtcgttttcttccatctgccatgtcaactgtccagtccaaaccgatgacatcaacaccggttcctttcatccgttcaagaagacccccatttccgttgatgtataatacaagtggtatttcgggacatttgcttcttgttaatctaacaatctgcaagaattttaggaaatgaacaaaaagaagaaaaagatatcaaacacacaatagaacacgtaattgtttcaagttccttacatatctaactaacatattacagttagtaagatcactaaagactggaatcaaaacaaacaactttacctcttcaatataaggttttgaccatttctcccacatctcaggtgtcagttgtccgccccacgaatcaaatatttgtatgcaatgagccccggactctacttggaagacaatgtattccgatattgcttgtgtcaaatgagacaagagagccctcaatacatgtggtgctgtatggcacattttctttatggttgtatatgtccgagttgtacccccttccactatatacgtcgctattgtccaaggtgctccaacgaagcccaaaaccgcagcatgattaccgacctgttataaatacaaaaataaatacttgtatagccgatttccttctaaagagcacgtagaacataagaaatcacctcatttcgtaatatttgcagggattcccgaacaaaagaaagcttttccaaatcaatgggatgtaatgatttcaaaccctcttcagaagtaattggtgattggataacaggacccctgatatcttctatgtcaaatgggacaccgaatgcaggtaaaggggtaagtatgtccgagaaaataatcactccatcaggacggaaagcttcccaaggctgcaaagaaatttccacaatgagatcggttgtctctgatctctctctgaaggacgggtatttctctgcaagctttctataaatagccatataccttcccgcttgtcgcatcatccatgctggaggccgacttacaggctctcctcttgcagccttaaccaagagaggatctgataacacataagacataaacaaaacgagactgttaaaaataacatgcagttagacgaaattggcacatctaatcatttggtatcatatcaagactctcaccacagctcagtaggggcatcctaaaagctaatgtgaatcaactttctgctaattttatataaacactcaggcatcccagcagaatattccattattatctccgagtaagaaactgtagcgtgaatgagctacaaaacaagattgagtttcgatagttgtttgataaatcattggttaagtgcacctatgtgagaaggagatataagtttactagtgtacctattttctagtgtgctttttcggttgagagtgctgtaaccgtttgtgtgtatgagaggatgaatagagaattagttagctgagaaaggtaacaaaaggtttagtcggaaaaggagagaccaggctctctaattattggaggcatttcctttgtaattctcatcatcgaaacagtaatagaatttctgcttggagtgttcaatcgcttcggcttttttatcatctgtttttctctgcaatattggcctggttttatgagataagctagcttgttgtatcggtgttcaacctgttacaactcactagtctaacaaaatggaaaagaagcctacataagccgactcactcaatcgccctataaccaaagtttttggagcgtctaagtagtaatggttttgtttagttatatccaaccatgaataaaaattatacaaagacattttatccttttttttcggaaaaaaaaaaacataaaatagaaaggtctaggaagtttacttagtctagccattctttgatctcaacaacctttactcacttctccaaccaaattaaattttaccaagcctcaaaatccatacaaaccacaaaacatttcagggaaagacttccatggacaaggttacacattcttctaagtctttacactcttactatttggcattttcacaaacatcaaatatgcttgcctaattgatgaatctccaactttgcttcaacaaaattttcctaagatggtatcaaatctcaatcatatcctctcaaactccacacacttctagttcaatgcaatcattcaaaaccatatgtttacaaataattatcttggttgaagttactaaaaatttgtattagcatttctaactctaattccattaaaagaaatcccatttagattatcacctaactatgcctttcatacaattcaaaatgaagtctttgtcaccaatatggagaataaccataataacccaacccaacaataatatattacatacataatcacacacacacacacatatatatatagagagagagagagagatgtttagggaagaaacctgaagaagatgacgagcatgataccgagaatttcttggtttgagaagaaactaaaaaccctctgagactagtagaattgagatgaatctgtgaaaacaaggtcatagatttccatcctaaagaattacaagcactgcaaaaaacaaaatcaaagagtcaaaacccacaaattaaaatcacctaaagaagctcaacaagaaaaggagagagagagagagannnngagagagagagagagagaactagcctggctggagtggagaagctcattttttggataatatttttctcaggagagggacaactatcaacactttcttctttcctttatccctttgggaaatttaagtgtagaaacatcataattaaaaaaaaaaaaaaaaaaatcccctctaatgtgaacattacaaaataatgctaatctttacaattgtgacaaaaaatacctctcagataacttcacttctctgtctctttcttttcccacttcttcttttcactaaaaaaaagacaagatacaaagaacaatcagataatgcaaaaatcaacacatcaatagaatttgaaaacaatcagtatttgtcataaacatcacttgatagataaaaaagaggaccaatgacttcgaaataatagtgataaactgctcctataaccctttgtgaaagtgattcattcacaaacctaagtacttgtcagttgcaacattataatcattggcataggcatcctaattagtggtctgcaagaaataataggattgctgatacaaagtatcgggtcttcgagtcagtgtcaaactccaacagaatcactacaaattttcattcacttcattcatattccatttgtcaaatgactttacatatttataggtatttcataagtctaccaacataggtaatattatttataattaagctcttaaccaaataagtatagcaaacaaaaaacagagagaatgatgaacgagtgcttcttcaaaagaccaaaaaatcaaaaattataatgtgtgaggaaagcaacatacagatttttacatttaatctttctagaaaaatcaaaaaacaaaacttttcaatataaatatacatcattccaaattatagtgagagtaattggatttggattaaactgttcttcttcaatataagtaactatatactaatcttttgatgttaaattgttattcccctcttcacagttcacataatatatatatatatatatcgttcgaaagctttaattttgaaaatctggtttttgcattttgaaaattaatgaaatggagaaaatgaagaatttggtgttaccttgggcatggctggctgtcgcggcagaataagaatgagtaagtgaaaaggagagaccacctgagactggccgggtaaaggtggagcagcccggcggtggcggtggatttgggacaaaattgaagagagagagagagagagagagagagctattatgataacattgataagatgttttatcatcaatgatatatatatatatatannnnaggtgattgttacgtgccaagccacgt

SEQ ID NO: 162690 - DNA, 3530 bp, Cannabis sativa
atatatatatatatgatcaagtcacaaactgttacttctacatatcttgattctcaagtgtcactgcagacttatggaccctttctcttttcaaaaaaaagtctaataagccaacataaaaagcaaattcacagtcaagcaaaatgttagtacctctggcaaagctcagagtaaaaactcggccttctgtgttttgcagataagcttattcagattgtactcaactttcattattgcttttattttgggaaaatgcagcacagttaactaaaattattcaacgaagctcatagttctatacttctagaacttttcatttccttttagaggccagaccactaatgataaatctactaaagaatataaatgttctggtctagatccaaactttttattaggtcagtaaaagccaaaaacatgtttttgacaaaacatttctcaagaacatgaagataaacaagagttacacttccacaatggttaaaattgtagtaaataaaggaagctgttaatataccattaagatatggaaaaattggtcctacctcattgattatgagagcttgcccatttttgacaatgtattgaacatcctgccggtagaattctttagccttcagtgcattcattacaaatctacaaatttcaaacatcactaccagacaaaaactgaaatgaaagcagcggaaaatgctcattggctatgacaagagtacacaagcattcaaaccaatatatggcttcattagacacataaacaaatcaacaaatccagaacatagagaaatgaaaacaacaaaaatcaaaatgtatgtgatgcttcttcacctggcccaaggatcattttcatcccaaaggtcatgtgtgtcgagagccatttcagcaagctctattccttcctcggtcaactccactgaattatctttgagttccacattgtaatgctgtttcaattattgtacaagggaaaaagacacttcaccattttaactaatttacataaaagtatattaaaaatacacaaataaaaatacaataaaaaaaagtcttactgagtaaaaaagcaaaatagattggacttacaaggccttttataagcaactgggccactttagcagcaactggatagcgcgcagcatctttactagcctacgaaagaaacaaaagaataccctaccgtcaaatgtactcctaacgtcctacctagatttacaattgtttaacaaatcatttatttcacagaagtaactagtaatatttacagcctcgtaaattacctcaccacttattaatagaggattccttccatcatcaataaggactgaatcaacttcatccactattgcaaaatgaaatggctttggcctgtttattcacaatatgttgctaattccacaaagaagcaataatatgaaactttagaagatgatgaaattaaacataccatctcattacaactttttcaatgcttgcagcaaggttgtctcgtagataatcaaaaccaagttcctgaaataattcagaatgacagatttattagaagaagaaatgaggaaataaaccagcagaatatttgaaacaatacctgcaacaaacactaaatcagaagatgaaattagaactaaatgacatactgaattgttggtgtatgttatgtcgcaattatagtttgatctcctctgttcaggtgtcattcccctctatattgcaaaaaagacataaacaagtttaagcatgtgtggtactggtatctaaacagcatttcaaaccttcttcccttgcatatgcttttaaaaatagaaaaaacaaaaataaatgagtacttgaaaaaaaaaaattacaatgcaagtgggtggttaaaagtttaaaaaaaccacacaattatacaatacaataaagtacaaccaaaaatctcaatctctcaagctcaaccaatctgagaaggaaacatctttgaattccttagttccgggaacccaaatagcagcactcatttaaactttatcctaatatttcttccacactcttctccatttcttctttagttgcataaaaattatgttgggctcatttcaaaactcaaagctaacttctggacagaacaacttgaaaaaattaacgtacagtaattacctgaataaggcccaccgaaagacctaagaagcgatgaacacggcccatccactcagcatctctttgagcaagataatcatttacagttaccactataaacaataagtaaaagcaagaccaattaaattttgcattcaccaaaaaaacaaaactttaaatgaaacaaatcataccatgaacaccttcaccagtaagagcattaagatacgctgctaaagtcgaaaccaatgtctttccctctccagttttcatctcagcaatggaaccgtcatgaagcaccgccccgccaatgatctggagctcggattcacattaaatcattagcactaacaagatcacgaaactacagtaatcatgatttcacttataataatcttgtgcatgaggaagagaaagagaagaagacctggacgtcaaaatgtcgcattccaagctttctcctagcagcttcacgaacaacagcaaatgcttctggaaagaacaatgtttgaacaaacaaccatatcattatcaaaagctttggtaaactaacataacattgacaaataacaaagaagtattagatagtagaaagcttccaaaccggcttgaatatctgccacagtttgaccctctcgtagtctttgccggaactcaacagttttagcagtaagctataaacgaaaaaaaaaaacaaatcttcaaaaagttaactctgacagagagctcagataaatgggaagcattaaaaacaacgaacctgttcatcggtgagtctctgaatttgcggctcaagggcattaacagatttcacaaggcggtaataatcccgaacaacccaatagtttaaactcgtaacgtcactccaagtcttcgtaagagaccccaaattctcctgtgccaaaatcaacaccagaaatgacgacaaaccccacacaagcataacgtcgaacaggtggcgatggcgatcaagggaggacataccttgagagacgcgacaacgggagtggatgcagaagcagttaggaaacgaagccgtctccggggaaaggaagatggaagaaatagggggttggagtagaagagtgggcgttgagggggcagtagtagtagctttgggttcgagttttggagggcagacattgatgacatagccatggagtgagcagtttgttggttagggtcgtgtgtgtggtttagtcgaccaattaaggtcaagtcaggctcttctcttcttcttcttctgctctggtactgagttaaacttcagtggagtcttcgcggtcatccatgttgttgtaacgttgagtgagcttgtttttcaattttcttctttttttctttattattatttttattttatttttgagatttttacacttggtgtccttttttgtccttttttttacttttttgtc

SEQ ID NO: 162691 - DNA, 2083 bp, Cannabis sativa
tttgagagttacactaaacctaaaccccaatagcccaaattgatctggatcacaacgttgatctttgcatccaaattctgttaaaattgtgattgagagtttcatgccagaagaagactcgactcttgagttcaatgcatagattgatttgtttatcaccctcacttgtcgtctttgtgaattttgtgctcaacttccccaaccaaacccagcgacgattatcttggctcctttgtttctactatcaagtatgtatcgattaacttttttgtattttgattgggttttctaagtttgttgttacacgtcgcatttgatggttctactttgaataaaatttggattttttgattgtgtgatgtaatattgttggtatatttaggcattttcagttattttgcctttaggtttccatgttaggaacttctaggattcgtcattttgcaacaaaagtgctagcaaaattttcccatgcccaaaaactttctggtttttttttttttttatttttactccattcctcctctttgttgttcttcactttctatcaagaatgaatgaccccttaaggttattatttctagatggtaggtttaattgggacaacttcaagaagtttatgggggagtacttccctgctccctttctatattaggtaggtttggtagctgactgtttagttatttcttctttttatagaaaccatttcttagaagatccaacaagatgaggttgaaattgaagaggaatttttggagcaagaggaagctccgaaactagttcttaatgaccgtccatgggagatggaccaacatgtgaataagtttaggatatataataatttaaggaagtatgagacctagtgaggaattgaaagttttctgagactgtactggaatttactctctgttcacggggagaggccttgtaagagcacggataggggcttcggcatttggagctaggcccgtgtagaaatgatgcacaccttcccttctggtgttactttgctaatttctgtgtcgtcgctagagtggcaccattctaattcatccctcaggtataccatcttttgttaggatggtatgtcctttctgctcaacacaacaaatctgcaccaacactagtggagatcttgtacttctacgagattaaatccaaacccatgaggggtcataaggaaaacatgggtttctacaggctggagtgccattccaagagtgtagcctaccccattagttccacaaagtatacacatgacttctgagactactgaaactacacttctggcttcatactgaagagagtcaccatactcagcatggactttaatactacaagtaagtgtttcttcttttcctggatttcacctctcattttctcctttggttatatactaatgtgcctttcatctttcctaggttgccttccccaatcgcctctgacttcggagctataaaggagaatcaacttctataagtctttaccatctagggaattacatgtagctcaactagtgaccatagagaaccttgaaaaggttggtctcatcgctcctcatcaaaaaattgatcaaatgtcgacgaaggagaccatttaggaatgactctaacgggatcctgacgaggtgaaagaggatattatggccattactactgaagaggccttaaaacttttaaaggtcgatgaacagtggctcgttgattggaagagagaatttctagaagacttgagtgagtttgaagagctcactatccacttcagggatgtagtcccaaatgagggtgctctaggagtgagtacttcaggtaatgctgagacaccctttcgtataattagggctctttccatagcaaatttaaagaacactaaccaagggggattttacccatatttagtttagatcaaaataaatatccttgcaacaatttcacagataaagtagattacatagtaaggaggccaaaccatttcattccaccagtgtatcaccacattatagtggacattcttagcaaagtcaatttcccagggttcttcaagcatgagactaatttaggtcgagaggatattgccctttttg

SEQ ID NO: 162692 - DNA, 2942 bp, Cannabis sativa
aaagcacgtaaaatattagggtcaaaaagagaaaaaaaagtctgcacacacaattagaaaatgtgattttgaagttgtactaaaactcaatatcaatctattagaaatgcaaacagcaaaaatagctattataccaacaattcattacctgaccaagcattgcagcctctgcttcaatacctccgactccccaaccagcaactcccagcccatcaatcatggttgtatgggaatcagttccaacaacactgtctgggtagagtaggccatcagtgttgaagacgacacgtgcaaggtattcaaggttaacctgaattacaccaagttatctctgagtcaagtctaaaaacagctaatcaaatagagcatgaaaattatcatgttacctcaagtttactcttcagacaaaagatatggtaaaaagaaaaaataaaatgcagaagcgagtgaaacaacaaatatatattgttgtaagttacaaaaagaaaaaactgtatgccaggtttttagaagcttatcatctaaagtactttacctgatgcacgataccggaaccaggtggaacaacaagcatgttctggaaagcggtcgacccccatttgagaaaagcaaatctctccttgtttctctggaactcaagctccatattggcctgcactgcattttccgatcttgcaacatcaacttgaactgaatgatcaatgacgagatccacaggaacctgaatgaatggataaggtggaacatgatatagtatgaaaaaagaagagcatataacaaatcaaaatgacaaacgagaggtgacatgtttagccaatggttcaactgccataaataataagatgagtttctaatttacaaataattcgtttaaatggcatataatgtgcatggagatatttaagaaaataaaagagctacaatttcataccaaagggttgatcttgttcgaatcactgccaagtttattcatggcatcacgcatacatgcaaggtcaaccacagctggaacaccggtaaaatcctggaaatataagaaaatcaaggacagcattagtgggggagaaaacaaacgtagaaaaaaaaaagattcagtgctctaatccgtgatccaagccatgaagaagaaacgacaaaggttaaagtatgttgaagtattgaattcatactatacctgcaagaggacacgggcaggcttaaaaggaatttcgacttgcttcggtgcactattctcccaatcaatgattttctcaacatcttcctttttgacttggaagttgtcacagtttcgaatagctgattcaagaagaattctaatagagtagggcagcttatctgtcagttttcatgtcacaattaaactaatgttagaaaacattttagatgataaaaggagaactcaacatatttcaggaataagtgttaagacttattaccaatccttggatcgttcaaagaaggaagactgtagaactttccgaattcaccacccccaggcttgggaagactggtcaggtttgccttgaaaggattttcagaagctgatacagagaagatgaaaatcataacataaatttttcagctcaataactcttgactgatattctcttcaaggaacatcataacaagtcatttccattaactgattataaatattacgcgattcacaagctgagtttaccaaaatttgcaatccatacagctataactgaagaattttataaacatatatatacacataccattgcatatgtctgaaaaaacaaatttcgtttccaatttaaaatattaaattaaaaatctatgccaaatgaatagtagaacagctagctttgggatcagaactcagaacaggacatagtaagattcaaaaatacgaaatcgtagtaatatttaaatatacatatatacagattcataaacaatcatatctaaggtcaaaatatatacgtaaatgaaagacggtcaactgtacaaaaagtcaatatccgagaaacaatgaatgggagatagagtacccatggtagcaattttgcgctgaaattgttcaatcacaggagcgacagccctgatctgagagcggagagtgtaaggagaacgccaatgaacgccgtggctccagcgaggaagtgaacgaaacgcagatgaggagctaagcgatcggtgaacagaggaagtagaagaaggtttgggaatcgaggacgaaaaggctcgagagaaaagcccggtagccctagaagctctgatgagcgaagaggatgaggatgaggccattatatacataacaatgattcacacattcatacacaaaacaacaagaacagattcagagataacgattactggattgattgatcgattgctttgatcaagaagataagagagaaaaagaaggaagcagtaatggaggagaagcgaaggaagaggagctcagcaaaaaaacggcctttttgtttttatatttcggtgttttttttttactgaatgagtcgcagaggcgtgtggtgatggtaagtgagtttaagctgaaattggggtcctagggctgcgtgccctttctcttcggcttctagagagtcgattattatttttttctttttcttttggcttggcttttcgatggaagatggaaaatgggattaagcggtggatggagactggagaggagagcttctttggacaaaactcctctgaggtgagttgcagctgcttataaggtgtggtagccaatcaagggttactatggtgccctaggcttgttttgtcgggcccataaaggcccaccctatcaatccccgtaatgctaatgtaatatgaaatttaatgctaatgtaatgtcaattattggtgtctaatgtcaaccataactttgccaataaaaaattgttagtgtccgtacttaaaataattttacttattattaatttatatgataatttttt

SEQ ID NO: 162693 - DNA, 3034 bp, Cannabis sativa
tatgtgcccgatgtgggactttcttcaaaatagtatatccggcggtttctgatcatctggagcagtcgtcacccctgcattccctacctttcgacccgcctcatgtctcaactgacaaatgccttctcgtggacgagtcttacctgaacgggagatatggctgtgctatgatttccctttccagaaactcctcggattggtggatttgctcctctgctggttcttgtcagtcgactttggaagctgaaatgcatgctgttttattgggtcttcaatgggcgatcaagaatcagtgggatgatttctcaatcctgtccgactctagtgtcttggtggaggctctggctgcgagaaagtcccctgaatggaaggctactgccactttctctgatattttgcaattgttatcttctttttcttgttgtcatgtactttttactaaaagaaatgttttaagctttgttgattctatggctaagtccatgcgcctttgtgatggtggctgacaggatgttaaaggggagggattgccccttgtgaatcccgaactgttatgggttgttaattgaacagagattcttttcaaaaaaagcacaatagtaattgtaaaaaagtgtgatgttacaaaatggggttaggagatagtaattttactaatggaaaaactatgattatttttgaaaaatagaattattttcactaaaagaataaaatagcttaattttacaaaatagatttaggagagagaaattttactaaatgagcacaaaagtttaggaactagtagagttattttcactaaatgggtaaaatagtttaattttagaaaattaatttacgagagaggaattttactaattgccaacaaaagtttagtgactaatggaaatatataagaggaaaatttgacttattatgcatttattgggccgaaatcgtttccctaaacctaagctattcaatattggtagaataggtcattttttcttaaaatctcattctcattctacctctcatatttgaacgaccctctctctccctctttccccattctctctcgctttctctaaacacgtatatggaggagcacacaatcgaaccaccgtcacgactcacgaaccaccttgatctcgcgaccacacgacccacacgacccacggaccactgaggaggggtagaatggagttttaggaaaaaaataacctattgtaccaatattaattagcttacgtttggtaaaatattttttgctcaataaatacataattagtcaaattttccatataagagatagtaatttcactaaaattaaaaaaaaaaaaaaaattatttttagaaacagatttaggagataattatttaactaaacaaagataggattatttttgaaaaaaaagttattttcactaaaagagtaaaaaaaaaagtagttttataaaaatttacttttacaaaatgggattaagaggagagaggaatttcactaaatgagcacataagtttagcgacaaatggaaatataagattatttttgaaaaatagagttattttcactaaatgaataaaaaaatgtttttaagtttagaaaatggaagagataggaatttcactaaatacattaaaaagttaatttttagaaatggatttaggagataagaatttaactaatagaaagataggattatttttgaaaaatagtggtattttcactaaaagagtaaaaaagtgtaattttacaaaagattacttttacaaaatggggttaagagatgagaatttaactaagggaaagataggattatttttgaaaaataaagttatattcactaaatagttgaaaagtttacttacaaaatgaggtaagagaacagaattcggggtatattgaaaaatatctcttttatttatcaattaaccaaatgtacttctaattttatatttaattgaaacatacctctttttatatgtatcgtacccaaaataccctgacacaaatgagtcacatagagagtatattgatgtgacagggataaaatcagtaaagtgttttaaaaaataggcaaaaatgataggttttaaaaaagatggtgaaaataaaagaggataatataaaaaatgtatagagtataatttcctcacagaatttactaagagaggaatttcactacatgagtacaaaaatttagggagtaatggaaatataagattatttttaaaaaatagatttatttccacttaattattaaaaaatatttaagtttagaaaatggatataagagataggaatttcactaaatgagtaacaaagtttatttttagaaatggattgggagataaggatttaactaatagaaagataggattattttgaaaaatagtgttattttcactaaaagagctaaaaagtgtaattttgcaaaagtttactttaacaaaatggggtgaagagaaaaattaggattgtttttttaaaaatagttattttcactaaatagtaagaaaattatttttacaaaatagatttacgggataggaattcaactattgatatgattattttttaaaaatagagttacttacactaaatgagtaaaaaaagcttaaatttacaaaatagggtttggaaacagattaaaagatttattttttagaaacagatttaagagataatgatttaactaaaactaataaaaagataaaattatttttgaaaaatagtattattttcactaaaagagtaaaaaagtgtaattttacaaaaattcttttacaaaatggggttaagaatagcgactaatggaaatataaattatttttgaaaaataaatttattttcaataaataagtaaaaaaatgtttaaatttaaaaaatagatatttcgagtaaaaaagtttattttaagaaatggatttaggagattaattatagcgatatttttcttttaaagaaaaataattaataggtatgattatttaagggttatataaaaatggttagtttgtacttatgagggccgtgcaagtcacttgaaac

SEQ ID NO: 162694 - DNA, 3422 bp, Cannabis sativa
ctctctctctctctctctcctgaagctcacaggagttctgtagtgttggtgatgattcttgcctcatattatgggatgcgcgaactggttctagtcctgctgtgaaggttagcttctaatgtttgtgtactttttctcatttattagttggtattctgctcccagtttataatgcaatgtggaaaataggtataatgtatcatagacttggactgaatttgagtttgtctgtccagggtaacttgatttgtatcgaatcatgtcctaggaagagtccaaaactatagctagttaatagtttgatgaaaattgaggagtaaattaggtgtgatttaatttggttatcatttgttaccaattaccatatcaatgagcatgttgcttctaattggtaggttgagaaagcacatgatgctgatcttcactgtgttgattggagtccccacgatgataatcttattctaacagggtatgttcatgtgtcacgtttctttgcattctgatgttttgataacctcttgagtttgattatgttctcaatgtttctctgaatgttatatggtataatatctcttcagatcagctgataattcagtacgcatgtttgatcggcggaatctaacttctggtggagttggagcacctattcataaatttgagggtcacaaagctgctgttctttgtgtacaggtattaattatactgtatattttgtttgttctgttttcttacattttgcaggaagggctaatgtttatcgttatgtgctcaacatttttaaattccagtggtctccggatagatcatctgtttttggaagttctgcagaggatggtctcttgaacatttgggattatgagaaggtatgcaatctacgcttgtgatttcaagtctttggtttgtatcatagatagagtaggtctgaatttttatttttactaatatgggtataatataaaatatctttgcatatttaaccctgctttaatttttcttttttttttcttgtctgttctaattggagtgtgttgtatgaatatttatatatataagtttatcacttgaggctagctcaagtggccatagtgggtgtgtgtgtcttggagttcctgggttcgaatcccaagtaaaatatgattgtaatatataaacgcttaaataaaatatatatatataagtttattttatttttcaatcacaggatcaaataactattttccttatgtcattctggtccacactcatttaaccttatggaggaggaaaacatttgtgccatatgaattatattttttttaacaatttccaccgcatagtgttaattttacatcaattgatcaagtaatagataagtaatatggtatatttaatcaaatggtattccatattttaaaatattgataatatacaaattgtcaaatattatggaaaatgactgttatttggttaagagatctcaggctatacagttttcaatttaatgatatagtgaattacaacaatttgtcaagttggaatttaacgtttgagtttttaatcgaagtaaattacagttattataattatcgcatcaattttcttactatgcaagctttctaaagtatatgttcctaaaggaacacatagattcctgtccatgcaattgatcacggactcgctactaactcttacctctgtactgtaaatgacaattattgcaggttgggaagaaggttgagcgaacgccaaagaatccagcttctcctccggggttgtttttccagcatgcagggcacaggtttgctctttcttcaattcttgtcaacctgtgttttgaattttattagtcactttcttttcttaagatatatatggtcccaactgtataatttcctttgatttgattcagggacaaaattgttgattttcactggaatgcatctgatccatggactattgttagtgtgtctgatgactgtgataccaccggtggaggaggaacattgcaggtactgacatgtttgttaccttgtaattctgtgttgtcaagtattaaacttataaaataaaaataaatatgcacatggtaaacaaacactgcagtttttgatagtgttttaaaaatttataatgcctttgctttgtcattcacagatatggcgaatgagtgatctcctatacaggcctgaagaggaagttttggctgagcttgagaagttcaagtcccatgttgtctcgtgcacttcaaaggcttgagaccgaaaatgttgtatcgtaatagagaccgaattgagagcagagagctttctatgaattgattatgtatgcatttaactaatattattcatagaggtagagggaaatctttttaggtgcgatgtgatagataatttagtttcttttaatgggggagatgaattttccaacttagagagcttagtagttttatatgtatggttcaccaaattcaggttctgttgagacattttgtttggagatttaatcttaagttataaaggatgtttgaatatgtattaagcaatctttctctttgtagctaaagaaccaaatatagagttgccaattgcatcactgaactcaggtctctcaaaagggaaagcaaagtattatgcatgggggccccaacgtttcatttttccatttagaatgacatacatgtagatttgtgctacctcattttgaaaaagtggtcctattctattctcgatctctagggaataaaatttatctcctgtttctacaaaaaggaaatacattcgtattgaatttcctttgatgtactttaatcgtgtaatatacttttgatgtgttattatggctcccataatctaatggttatggtgataaacaaaaatttactcctttatattttctactttagttagcataagaatttactctcctactttatattttctactttagatagcataagaatttgtttttttttttttgccgtagatattcttacttcataactatcatcctaatgactccttatgaatcagttctgaagatgagtttagagtgtgtatgcaagtagtgctgaaaatggggttaaaatttttaactctgcacgaaaaaatatgagtttaggcataatatgagaccatactacaaattgacacggtaaaaaaaatatatgcttaagtacaacatagtacgacaaatacgaaagacataacacgtaagtagggacagagccacatgtacccttacaggggtcgtggcccccctaaattttagaacttagttatgttatgtacttattagacatatatatactagatagatgttacgtgacaagtcacgtttgttaatttttattttaattttttttaatatcataattttaaaattaataatattcaatgtagtgataatcattaaaatttgaaagcataatagtgatttaaataaaa

SEQ ID NO: 162695 - DNA, 1480 bp, Cannabis sativa
ggcataaaacccaacagaagccactatagccaaagtgttggaaatagacatgatacatttcgacaagaaaccagttataatcagaccgtggtatcccgacttgaacacagtgaagctggtgtgaaaagtcccactatggattcgtcttcacgatcttgggcttcagtattggggaaaaatagcttaagtgcgttagttagtacgattggaaaactgattatggtggaccaacatactaaggaatgcacccaagttcaattgacaaggataccggtggacatggacatcatggatgatccacctcatacaatcacctgaatgacaacattgtcaattagtggagcagaatgttttctatgaatggctcccaattaaaagcaagaattgttcaggatatgggcatatcatggcagactgtcataaaggagggaatgagaagaaaggcaaacattcagatgatgctacagcggctaaaacacaagtgaaagctcttgtttcaactactgatcgtattttttgaaggtaggttcaagcattttgactgatgaaaagaagataaatgtagggacttgagatacagagtggcttattcccaaaagataagttacggcaaggcagagcaacttagggaaaaggaatatagatgaagacactaaatcaaataaatcagggaccatatactgtgtgttgcaggagattgacggtggtttgagaaaggagatggaggaatatgaagaagggggaacatgtattgcaattatttgatgatggataattgtaatattgctagttggaacgtttgaggtattaataagttgaaaaataagacattgttttagatttctacagtatgagtaaaattgtagttgaggctttacttgaaacaaagcttcagtgtaataagatagtagaggtgatagaaaataatttcaagaattaggattccctttactagtcataaccgaggaggcagattgttggttctttggaggaggaattttgctagagtgattgttatagctgagcggcctcaatttgttcattgttatgtgaagctaacttgtcaaagggaagctttttatgttacttttatctatggtttaataccatagatgagaggagaaagttgtggaaggatctcttgaagctttgttttcttgccaaaccgtgacttatactaggagatttcaatgtagggttctgtcttcatgatcgaataggaggtaagcagatcactatggctgatattaccgattcttcatcgtgggaagtttaggttcaagtggatgctatcaagagaataggctcgaactaaacatggactaacaatcaagatggtttccttaaaagtttttccaggatagagcacactttggcaaaaaaacactactacaaaaaccccctttagaggcagtttttaagccctttcagcgtcggttttcgcaaaattcgctaccgacgctaatcagggcgacgctaa

SEQ ID NO: 162696 - DNA, 1816 bp, Cannabis sativa
cttgttgccctcttcagcatgatccatccaaataatgttttcttcatcattcttgattgctatttttagttgtataatatctcatgctgttccttgtttttcatcaaggattgcgggaaattgttgctcttccttataatttaatgctacagggctgatatggtttgtaattgtataggtttgtgatatacttgaagagaatgccttgatgtcaaatagagcaaatggagaaagtgaatcatgggttgttgcatctaggttgcgggatcatcttctatctccaaaagagaggaagaaccctgttttgtggagaaaggtattattctcttcttattggacatattatagctttgacaatttacttgtattctcaaataacagatccttacaaatatggcaatagttttttagctatactttagacgaacccctattgcatcttggaagattatgtgcgcacagttgtgtctttgtttaatatcatgttgaagaaattgctcattttcgtggaaccagaattcaagggattaattttttttttcttctgttagaccccatattaatagggtgaggttgagtatagcaaataagagagatattacttattgtattgaagagtgttttagtggagaatagaataggataagtaggtgagtaagagaatagagggattatgcaagaatttagaggctatttctctgcatcatggagagtcctaggcctctcaaatgcctaggaaaattgtctccgtaattctctttctgctgtaccaatttatacttaagttctctctattttccttgcaattgttcttgtattagctactgttcttgtactggaggatcgggtcatatcatcttcacatatgtgttttcttatagataagatgcttttcttttttttttttcctttttcgaaagaagatcttacactcttttatactctcattacactcttttatactctctattacactcttttatattctcatttctcaaaatgcatgacatgtagacattgtgttattttgaaaatattattactcattaaacatgtcattcattcatgtagtcaaacgatagtaaaataaagtgcatttaccatttctcaaaacaatactgttaaaaatctagcttgaacatttacatagtaaaacttattctcaagccaattatagagttgagcattctccttttaaacttttatcatttgcattcacatcctgtagttttgaagtttgtagttgttcatttcactacatttaccctttttaggtctcgtcttgtttggtttaaagtcactaccttagagggttcttgggtagttaggtcttgttctagagagttgatatttgttcttactttctcaattttgagcatatttaatatctttgtgaaccattacttgcatctaactcagagacaaacctggtttgaagctgacactagcagacctggagtttggctttttttttagttagtgattttgttcctctaattgaattgtataatttagtggtaggccagaaatccaatagatgatgagtcactattgtaacctcgataatgtttgcaggtagaggagttaattcaggaagattctcgcttagatcgctatccaaagctggtgaaaggtgaatcaaaagtggtgtgggagtggcaaggttggtatattttatttctgtagaagagtatatttccacatttgaactgtcacctccctataacagcttcatgtttaatctacaattttccattcatcttatacagttgaaggctctttgagctcaaagaatattagaaaaaagagcgagacg

SEQ ID NO: 162697 - DNA, 622 bp, Cannabis sativa
tatatatatatattttaaataaaaatcaatgaaattggattcccttattcttttctttactttttaacggaaagggtaaaaagtaaaggactcactctagggctgaagtgttgaaactgtcataggactatttaggttaaaaaaagtggattatgactatacagtaagagaggacaaagaaaaatggttaatttgtagcaatgttgagtgagtctacttgtttttctgtttttagtttcgtaagttaggggaccatgctcactagtcactcttataagtaactaagtctactaataataaaggatcaatggttttggggttcaagtcgaggacttggcttcagtgtttttgtctcacccttttggactttgcaggcatggggcttgctctgaatttacaccatttattagttgttgtcagcgaaggagtggttttactattgtctacaatatgaaaatgccaatatgtacatataatacagatatagtagggtctgcagaacctgtgagaactcctatcctattcactattaactcctatggatgtcttcatttttaatatataattcttgcttctcaattttattttatttttttttgacaaagtgattaaaatcactcat

SEQ ID NO: 162698 - DNA, 828 bp, Cannabis sativa
catctcagagggggaataaccatcgccagcccaagtgaactttcctccacggccacctttcttaggcgatccattgattccagtgcccgatttcctgtccttcttcacctccgatttaccatttcccttggaaccttttcctgcgctcttcattttcttctctttttgagtactgagtagtgttgtggtgatgtgatgtgatttgggtttaagaatcggtgctgttatatagtaggaaaacttgggggctaaagtgtaatttcgtaatgtagctacgtggtgtagtataattggattgaagaacaatggataagaacaagcattattaaatgattttttattgtgggatcttacggtggtaactgggtctgtctgttgtttgtttcgtttcatcaaaaataaataaataaataaaaaactgggtctgtgttggtgacgtgtctttatcgagcatttgagagagagagatatggtttattcaaattggttatggttttgtgatctggtcagatcaggtgcatcttgtccgtgataactttacagtctcagcagataagatgagcatacattatttaaaaatcatccaaaccaaatataactaaaaaataaaaatccattttttaaaaaattaaaataattaaaagtgtctttagtaatatttttttaattaattttttatttttaaaattagaaaaataaaattattttttaaatcatgttctgtttttaaatttaattttttaattgaaaattaaaattttaaaaattttaaaaacaaaaaaaaaaatcattttcaaaaaatttttaaatagtttttttattaatatt

SEQ ID NO: 162699 - DNA, 1930 bp, Cannabis sativa
actcttgttggactttgttaagcattattatttgtggcatgaacaggttttcatcaacttacaacaatattttcctgtaaaaaagtgactggcccgatgctggtccgatgtgggacccaatgctagcctggtgttatgaaaaaaatcaatacaagtattggacaagtattgggccaatatcgagctaaaagaagtttatgcaaaatcaattccttcaagtcaacaaataaaggcgcatcacctccgatgatggtcctcacaaatacttcctcattaggtcgaggacataatacaaagcacactgtcaactacaaataaaaaatgaactaatataagattgaaattaaaatgaaataaatatgaccaattcaaaagcgtaaaaaacttatatttctagcaaataattttattacttcctccttgtcgagtttcaccttgttcttactttcccagttgaccattctaggacagcaatgcgacttccttattgcaaattcattagccagctctaatatgggctcatatgcccaatattacaacattgcggtatagccgtatgctgagtactttacctcattttgacaagtccccctttcaatcttcttattcatatagtttttcacttctttgtagtttattacaagtttttatcaacttgttgaaagaaatctttctccacgggtactcatagaataattgtagattgtcaaccattgttatcacaaaatgaagaaccacggtcttctcctctttaccaatgagaacgtccataacaaataaggccatcaccaatttttgtgcaaccttaaaaaactttgcgtagttggccaaatgtgatggattgatcaccattgaagtactccacaatcaactgattggaatttgcttcctcttctatttcttgctctgtaggttcgagtaacaagttcaacctagtcaccaaggcaaactcggttcggctgaatctatattttttctttgcaatatagaagtggagttcatcttccttctcagatttaatattgtgcatgaacaactgatggatcaatgcacccaaaaaagttaagtggctccctctcaacaaattatttaaaagagggattccttcaccctctcaaataattggtattccgcaaattttactttaatctttggatagtaaaaactagcgccacaccaagtgatacgatctatgtaatgttctgaaattagaattaataaggcgtggatgtcttgtattatgaaaaaaaatacaagttagaccattggtagcaaagtatcgacccaacatcgggcccaccatcatcctccatcgaattagaaattacattcaaagcatgaacaatcacaatggtcccctatcagaccaattatcgggcacctattcgtcccatatcgggtctaagttaaaattccaaacttgaatgaggtatcgtgcctaccatcattctcaatcagacctatatcgggcctaagactaccaaaattataatatacatcgggcttagcatcgtcctctatcgagcctaagttaaaaacaccaatattatgaggtatatcagacctacatcggaccctacattggtcctatcaggtctcataaaaacacaaaaagtagacagggcactacaatcaaccctacatcggatctttattggacctacatcttcaacctaaattccatcccaacaacatgatacatcaggcctatattaggcctgcatcgaaccaatctaaaaaaccagattcttccccaaagcacagatccaaccagtcccttctctcttgctctctgaacggactaaggagctcaacccaccacccaccactcgcgtccccctcagtcccttctctctctagctctttaaatagacccaacaaggtcgacccaccacgaccacgacaatgtcgtcaaaggtaagatttattc

SEQ ID NO: 162700 - DNA, 2496 bp, Cannabis sativa
tctggcttgtggcgccgggggcctttgctccttggagtgatgagcgtctgccctctctctctctttccttgagatcttcaagcttgtggtcgccgaccacggtggatgactgcctctgcttaggtctctcaagtccgagaggttggtggtcgtgggtagctccggtctctttgctagatggaaggcgacagtggtgggtttctttgggcattctcccttccgattttggggacggcaagatgcggtggtcctactcaggcgaaaacttaaactttggagagttgttgctctttcccttctatcagatctttgtgttcattggttttctttttaggcgtcctggctccggtgcacaatggctcgtggttagctttcggagtattgttgatgtagaggtgaggactcgggttttacccaaagggatgtgcttcccttgtcctagcgccctcaccgttcagaacccctttggatggcagagtgtggactggtttttttggaagatggcagcgttcctatgcctttggtctgcttgtcttggaccctcgtgtgacctcctttgcgttaggggaaagtcttttgaagtcattttatgttttgttttgatttggtttgttcatcttattttgtttagttttgtcggtgctatgcaccctatgtcctgtgtggtgttgtcctctgtggcattggctttaggccagtttttggggttttgtccccttcgatgctcctgcgtgagccaagagcttattgctcttttcgttatcggcgtggttggctggcatttgagtcatatcctagtgagagttgtgcagatcctccaccaaacttgtagggcttcgacctttgtttaaccatattgaagttccccctttcaaaaaaaaaaagtaatgatgtgaccaaatattatttttaaagtttgagagaagagatagaaataagaataagaaaaagagagtagagtaagagaaagaaaaaaaggaagagagagaagtagaaataagggtcttgaaacaacacccaaataaataaaaacattattaatatttaaccaagttatttttaacaattatatcaaaaataatatgtgaagtgtaaaattcccattatcaaaagagatttttacataaatatatgttttttatttatttttatttttacgtgtactactttattttatttttttaacattcattatcatcctaagaattccatcaaggggcaggctctagcagattttattgcagagtgtattggaataaatgacgattcggacgagctaattcttgaactgcagctttggaaagtctatgttgacagagcatcaaatgaaaaggtatcggagtggggataatcttaatttccccgcaaggacatcaactccaaagcgctcttcactttgaattcacaacctccagcaatgaagtagagcatgaagcaatgattgtctgcccgccattaacaaaggaagtgggggcccagaatattaaaatacatagtgattcctaactcattgtgaatcagatttccagagagtaccatgccaaaggcgaacaaatggttgctttacacctttgtaggatgagacatataatacttagcacatttattcaaacattgatttattcttacttgctgagcctaatactaatactagtaaagttactagtattcagataggttatcttcaattgtgaaccattttagatagttttagtctcatccatttagagatcttctttactagatctctagttagtggctttgtaaatggatccaataacttttcacttgatctcacataggatattgaaatgactcctcttcgaatcaactcactcacatatccatgtttaagactaatacccattatatactctactatacgctccgataattgttgcttgtctatcacaatatatcaaaattgtaaatacattctctttgataattggtatctcaacaaaaagacctcttaaccattcaacttcctttctagtggcagctacagctatgaactctgcttctattgtggtttgtttcttggacccccaacaaatcaaccttccaccaagggtaaatacccaactcgttgtggaaaaattatccccaatgttggctatccaacttgcatcagtgtacccttccaaaattgaagaaaatttggagtaatgaaagcataggttttttggttttctttagataacctaaaactctccatattttaggtagttttagtcttatcccttgaccaaagtggattttaaccctaggcaccttatggggctttctttcctggagattcagtcagaatgggtactttagaacttttacacgttcttaagtataaaaccaagggaaatttgaatttattatatgcatacatttggtgtgaattaaatttttaaacacaaccttactaaaattaaaaaaggggacttctatttgcaccccataaaattataaatacaccctattagtaaaaaaaaatataaattt

SEQ ID NO: 162701 - DNA, 1895 bp, Cannabis sativa
  modified_base (720)..(722): a, c, t, g, unknown or other
aaaaaaaaaaatagaaaaaacagaaagcacgaagaagttcaggcaattataaaacttgaatataaaatgacaaacccatcatcagaaatttgtaaaattccaccaaataaattaggaaaggagaaaagcttaccgattatcggggcgttcatcgtatatatgtacgaggtttgagagtcaaagcttaggctttatgatgcgaatggaggcggagtgaatttggaattgagaatgaagatatgcgaaacaaaatctgaagaagaaagggaatcaaaaacactttgttctgagtctgagttggatttcagagaccagctctggttctccttcagtcacactcagtcactggcttctcttttccctcttctttttcacagaagctctggccccgaatttgaagcccataaagtaatcgaacaacaagtccagcccgattttatatatgttcgtacgaaaaaaaataaaaaataaaacaaactaacaattttacaaatactattttggactctgtattttacaaaaattatagattagatcatctattttgttaaataacaaaatgggccttgtattttccaaaatggtaaaaatagaatcttgagcttaattttgacaattttttttaatataatcaatttgaagacaattcctaacacgaacagatatagaaaatgtaaacagttttatcataatacatttagatcggattattattaaatnnnattttgacaaaaaatcagttcaaagtcttatttgtactattttagaaaatacatggtctattttgttatttaacaaaattttgttatttaacaaaatagagagtccaattagtaacttttgcaaaacacaatatccaaaatagaattgaccctaatttttattttggcttaggatttttgttccaaaattttaatattattacaatctttgaattttttagtatgttaaaaatagtctttcaactatttataatattataagctagttattctgtttggttttattacacgtagtaaataaaataataatgtcaacaccgcatgtgtaattaatttttaaaacatatttcaaaagttttaatttagttttacatcatttttttaatgattaattaatttttaatttaatgatcttttaaaaaatacaattttctttaattttaaattattcacatcacttggtgatgacatgataattgcctaaacaatctctttattattccatttatttcagttgtcatgtatgataaaacttaatagaagaaccactttataatactttgagttgataattacctaatcagtctctttattattccattcatttcagttgtcatgataaaacttaatagaaaaaccactttataatactttgagttgttctgagtactatttttaacaagttaagaaaaatccaagaacacaataatatattagtcataattcatgttattttttaagttaccaaaacttattattttctacttaaaaagtaaatattatatacacatttcacaaatcacatgtattaaatatatcttcatataaatatattttttgttagatactaattaaattgacattaaacaattatattatatcaaatacataaatatttttttttatatttaataataaggataatgacattataaaatagttacaaatatcttaaaattgaagtcgtgaataagaagtactttatatatatatactagatgaaagttacgtggcgagccacgtaaatattaattttattaaagttctagtaatttttgattaaggattcagtaattaattgtaaatcattttttaaacgatttgttttataaaagtaaacttgttaagaatgtcgtatataaacatatgatatacacattgttttcaataata

SEQ ID NO: 162702 - DNA, 2405 bp, Cannabis sativa
atttagtcataacaaattgtaattgttattaatacctttagtcacaaaccttttagtcacagcataacaatgatgatttacaattacttacaattttttttattttagtcataagttttgttgtgattaaaattaagattttttgtagtgatatctcaatcatattactatttttaagctaattgctcgttttcattattttgaaactcgagttttaccttattttcagatttgatgcaaccattgaaagcttcaatgcaataagcgcagcctcgcattgctgcagcgatttcaaggtattgattccatggatgtcgaaagttaaatcggccatgtgcaggttcccacctagcaaaattagcctaaaaaacaaagaaagaaaaaagatccaaactttaattacctaagttgaaaattttgatcaaatcattagaaaaagcatgtgtaactaatttgttaccatagtatcttctgcagcttttgaactcagtacacatttgtaacttttctcagattctttattgttgttaccactaaagtaatcagctatacaacctgaaaaaaatagctaaaagggttagacaaatgaaattttcatgtttggttagtgagaaaagtttgtatcttttttcttttcttaccatcaagtgagtcaccaagtttgtccatgttcctattgatgagtgtatggagttcttggccagcccaaatgggacaaacagtcataattacaagaatacacaatgaagttccaatgattatggttgataatctttgatgagctaaatcgaatagcttatcaactcgataacccgaaatcgaaacaaagctgaaagtgaggatgaagatcatagttccataatcaaatcttgattttactgatggaataaatctagagaaagttgctgcagaagctgagaaaagaaaacaaaaacaaaaaggttacaaattagtaaccagaaaaacaaggcaaaatttagtatctttatcttattacatacctaaaataaatacagaaactcccactatgaaaggctcaactttatctcctgaatgtctagcaatccaatgaactccaatggctacaaatccagctaaaaaagtcccacaaattctgttcaaacacttacaaagtgttgcacctgaaattacacaacaataaaaaattcaatctttgtagtaaagattcaaactttatcaagttttctttataaagattcaaactttattaagtttagacaaaagggtttaccaactgtattttcgaaaactacaacaactgtcataactgcccacatagcagttcctccaacaccatcataaagaggcctcatataatagaagaaagaaacagcagtaagagctataccaactttcaagcaatggataacttttcttggatcattgcagcctattttccaagcattatggaagaatttcgcaggtttcgaaaatatccatatgattagacctttcagaccaagaaaaattttgctgagaaggcctttttctggtgccaaaactttggttgagtcatcattgattcttatactccattggacttgaccacttacttccttctctatagccatttcagttgagtttgataagataacactttgtagtgaagtgttatggttgattaaggtgagaaaataatgtgttgttgttcaagtatatatatacaaagtttttttttttgtctaaattaaaaaataatgtagagagcaaatcatagaaaggttttaattaaaaaaaacatgttatggtgtatggtgagagtaaaggctataaagggtattttttattgtgcttaatttttttaataaggttaggtaaggtttaggacatgagtggcctaaaatagtcaccttctctacattagatttcattgcttaatttacatgaaaaactttaatgtgttgtgtccattcatagggcatatacccttctaaaaagtttcaatcttttgtttattcatgaaaaatcaattttattaatttccttttgttgtcattttgactaagatgcattttttgatggagtaatgctaattgactaagtgattaatgcaaattgtactaaattactgtgtgtaatggcgaagctagaccgaaatttaatagggaaccaacacatgtaaaaatataaaaattatttatttttattttttaatttttaaaaaaattagaagttgctataacaccctttggccctcttatcttcgtcattgtatgtagtgttagttagtgatcttaggcaccattggtgctcttttgcactactctttcaaacgaaaggtgcattttaagctgtattggacacaaaaattgtttttttttcttaatgaaagtttctgtaacgttcccgcttcaaactttcattgggtccttatacccacggaa

SEQ ID NO: 162703 - DNA, 3607 bp, Cannabis sativa
  modified_base (2495)..(2495): a, c, t, g, unknown or other
tgttattattaattatatattattttacctttaaccaagagggtacgttgcttctgtaacctgttgccaatatgattgcatcaaatttctctgttgttccatccacgaattccactctatgtcgttttagccgctttatacctggaaatacctaaaatatatatgttcaatattattaaaaaaaatgaaaaaggaattataaattccattaataataatgagtaaacagaaaaagttgttatttatgtacatgtactaaaaaataaagtatatgggttataatgtatgtcactatatatatattaaactataaacagctagatgaaactattgaaaaacataatcatgattatttgatatcttttttattttttctttctttcaaatatttgaaaaatcaaaaaacgatactctactaaagcgagtggctgtgccactataaatttatattatataacacacaggaaatcttagaaattacaatcgcaatcatatcatttgattcttgtaccacataatatgatcaatcaacaaaaaagttatatatatatatatatagaggagtagtactagtactactatatagttgtctaattcacgagaaaccctccaacaaaattatataattattataaaatgaaaaaaaaagaaaaaagaaaagtggaataatgtagtagtagtagtagtagtacttgaatgtctccacttttgatcatggcaagtgtgccaacgtctaaaactggggtctttccggacaagttcttgagctctaagggacccaaaggagggcggtccaatccgaagagagaggtgtcgcctaatatgagcctcgacacgattagaaggaagcgatcgacaagtcgtatgggcaaccacttgagcaaccacatggacaccccgaaagtggattttcccagcatctctcgtggtaggatgtgtaccttcattattcatttaccatcccatttaattaattaaattaaattacataaactagtatttcttaccaatgttattatatacgcttgcttcggaatctcaagaaaaaaaaaagaaagatgaaagatatttgtttttgccaaaaatagggttttatgtggaatcattcattgtgctttgattgtgtgtttgagtatatatatgtaaacgttttgaaacttggaaccaattgaaatatgggcttttcttttttttctttccttttttttcctacctacctactttataacactctattactaatactactactgctgctgctgcttataacttttgttgccatgaaaattaataatttgaagcaaaactaataaactgtttgtttccacgtttttctatataataactggttgaacttagaacataataataagtataccaaggtaattaataattaagagaatagagaaaatgatggagtagagtaaaaggtataagtaatcttactttgtccctaacgacaagagcaggagaagcattataattgcatagatccaaacagacctccatcccagaattgccacaaccaaccaccaaaactctcttccctcgaaattcatggccactcttatacaagctggtgtgccttatgggcccaccaaactccccaatccctttaatctccggctcaagcgcctccgcattctccccagtagcaactatcacccaccggcacacgtactcgctctcgctcgtcctcactcgccacaaccccactgtattgtcgtactccgccgatgacaccgtttgattgaaacgcggcctaatatggaacctctccgcgtactcctccaagtactgtacgaactgtcgtttggatggataggttgggaaatcagatggaaacgacatgaatggaagctcacaaaagtgttttggcaaatggagactaagtctgtcgtaagtcttcaactgccaaagggaagctatgcagttggatctttcaagcacaacgctgggcacccctttttctttcaggcatgccgccaccgctagacccgatggccccgctcccacgatcaccggacccgccacataaacacagcaacatctcctcctcctcatgcttttcaaatcatcctctaccataataacaggatcatgggcttgtttcccttctatttctcttaagtacaactccatgtaataataatgccgccacactgataataagaagagatccaattccaaatccaacacctacctacctacctacctacctaccctgatttctttttccttctttctcttctctcttatttacaaatttttataagatgatgatgatgatgatgaatcaaggttaagtttttttttttgtgtgtgtgtgtgagagagaaagtagtagttgtactccttaaattctggagtggatattatccacatgcgagaatgagtaaatacttttttttttaatctccgttttgttcaatgagagaggtttatgtggaagatgagtaacaactatgaggggttatagagagagagagagaganaagaagaagaagaagaagagagagcgatggtgatatatgctttgcctatttaaattacttctgtttctcattcaagaatttatacagaattaacccgaatagggtcacgagaaagtgtttatgatatgtaagttcgttaaaaaaaattctaacttttctgaacaaaagttacaactaaaaatacatataattttaaaatgaaaattaagagtactatttgtgcttatttatttcttttaataattagattatattatataaattggaacacaaaataattctaaaaggatggcattttaatttggtgattactagagagaagttagaaacgtgattaagttgttgttttgagagaatttctcgaaaggacttcgtttcagtaacaaaatcagaataactattatctgttaataattagaagattatattaaattattttataattattgttgttatacccgtcaaaaaccaccaaataataataataattgtaaagcaatagtaaatttataatgttcaaatcaacaagttgggccgggtggagtatgaattgtaaccaagatgtcatccactttagtttggagattttttgtaatgatttaaaagtatcttaaaagcacctaagtagtaaccaaaccaacaataacagtgatttccttttcctatttaacaataaataaatatatatatatataaatttattttgatgttgtccatcaataagtttaaaaaagaaacgctataattaagcgtggttaaaaaaaatattcaaaaattttatttatatatttatttatttatttcaaaattttagatgctagcaatcattaaaattatttgataaacatacacattgaataagagatcattgattatagtctgaatagtgtaagtttgggaatatttaaactcatcatttacataacaatgtgttatacatatggacatcaaaaaaaggcctattttagcgggcccgaccatattattgatctatcttagtaggcccaaatcgccgtgaatttcaataggggtaagttgaaaaatgcctcttttattaatcaattaactaaatttgcctctaattttatatttatttgaaacatacctctttt

SEQ ID NO: 162704 - DNA, 2742 bp, Cannabis sativa
  modified_base (1934)..(1954): a, c, t, g, unknown or other
  modified_base (2010)..(2013): a, c, t, g, unknown or other
acctgggtgtcttgcagacaactagtaagatcaataaaatatgaagattgcaaagtcataatgtcattgacaggataatgaacattcagcatttcacctgtcctgggacatgacaagcaattactcttcattccgtcaataagaaatatctcagcgaacagcttctgaactgatagaaactgcatcactaaagggttgttttcaggctgagatatcatctggaacaaaatgaagaaagcatcttcactaaagacgaaatataaacatgtctataatttacattagataaagaaaaagtccacagcaagacctttagaggatcttgttcaaggtccacaaagagcagctgtatttctgagttcaaacttgactgaacatgctcagcaagtcctcttatgtgtaccaaatatatcatatcttctatgatcattactctcaaatgttggaaaatgctagactcctgcattttttttttcagaatctagatgtaagaaagtagtacaaccaaaaaagttttcagaataaaaagaaatccagacaagagagaaaattacatgataaggatgatgagattaattttcaaacgataccaacaataccctaagtaattcatgtaaatagcagagctgaaactgcaaatgtaacctatggaattaaactagtgaagaagatacaaatacaaataatttaatttaatagaattgaactatgacacaatgattacagatagctatattgttgttgttacaaagaattgtttagccatacagtagcaatgcagtacagtagttcagatcagcatagtccaccaatacaacatttacaaataattaaacgaaaagaaaataccttttgacaaagtttgagaagtgcacataatcgttcttgcagttcaggcatctttcccccatagtctaccatgatgactggtctcattccagtgcataatgcaagaacatctgcccaaaaataatttcacagatcaacataaatcattagagcgaatcagtctttttattcatacacactttcttgaatttgaataaactaaagagtcatttaacgaaattaacttgacagttttctcatttttgtattccttatcataaagtaacatctcattctttatcaataactaattaataccaacgaactaaacatgagtctaacatttgaacttcttactccactttcagtacattttactctagatcaacattgtacactatcaaatgatcagaatagatggatataagatcctacaatgtgctcacttatatatgactttcctatttcaatattttcagttgttaattttctccatacacaaaaaaaaatcccaaatacgaaaaaagctaaactcaattaagcataacagagattcgttatcttgacaaaaaaaaaaaacatagatttgttagacacttagagcatattgttgaacccaaaaagaaagaatgactagattatagacacccagaatagaaaaactatgacaccctggaagaaaataaaagctgaaattggaaaagaagaaaaaccaagagaagatattgactgagaaagtgaaaagagaaagagacccatatggagtcgagttcttgctgaaggtttgaggcgccatttgataagagaaagagaagaatccaagagcttgagagcctcgtccaactgagaaacttctgttgagaatgggaattcgcctttgtgtcgttgtgccttctccatttcaggattacaagcaatgattactaccaaagctggaagtagaaacattagaagtgcgaagtatcacactgacaggaaatgagaattggcaagtgttaatgtatttatgttgttggatccacccccatgggctgggcttgaaccgatttgggtactaagcccaaagttaatttcaaaaagtatttttatgggattatttcacaaannnnnnnnnnnnnnnnnnnnnttacaaaaatacagttgtacggaattttaaccattttttacgattttttttatttnnnntacagaaaatacggtctttttatgctctacttttgttaattttttgtatatgtatgtttttttttattgttgtttggatgttatttttctgttacttttgtgtagctttcttgttgttttcgtgttatttctataaaaaagaaaacgtaaaaatatattaaaaaaaaatcttcaaacataaaaatatgtattttatgtaattattcctattttggtattttgggaaattatagtaaatagtcccaaattataggactatgttagtaaatgtcctcattttaaaagtgtctatgtatgccatgcaaactaccaaactctgtacccgactagttaatagaactgatggcctagtacgtgacttctggtggggttatgagaaggggaatcgcgggatccaccttaaggccttggataagctctgcctccctaaatccagagggggtcttggctttaggcaggggcgaccctaggcataggcgagctaggcttgtgcctagggcccactcttttcaggggcccaaaataaaaaaaaaataaaaaaattcattaggcttttattaaagtaaaattaagtgtattgtaaacaataaatagtcatagcttagtgggttgaggtgtatgacatgttataaaatgtcatgggttcgaatcccataacactcttttttaaatttttttatatatatttctgagggccccaaaatttaattcgctttaggctcatatatt

SEQ ID NO: 162705 - DNA, 1597 bp, Cannabis sativa
aaagccactgtcccatgtcgagttggtgctataccccattatgtcatttagggaatttaattgagacatgtcttgggtgttgtatagcaaccaaatagtattgttattctcaaccatgcacctttttatttagtagtactactttatagcgatattcatatctctagatagctacgtgtgtataaatacatatatattggtggtctttatttgagttattgcatactgatcagaaaccatatgaggcggtcggcgatctcccatttactatattggaatgattaatttgatttgcattatatatttgagaggcatcctatgtgtgttacaagaatattctttcctttttctttcttttttgtgaaatttggacctcttcaaagaacgaccaggttgtgtaataatttgctcagtagtaaaatattactgtataaatatatccaattagaactagatcaaacagaatttcgacgctcaataaaagaacagagaaacaaaatgtatgtttcaatttcagatacgtcaagtaaatggcaaccacactttacgtaattgaataaactataaataataaaacagattactagtttacatgtatttgatagaatatagctaattaattagtttgacacagtatattatttattgatcataatgtgatgtacataaagtaacactattacaatttggatcttaagtttttttgcaataaataaaaagcagaaataaaatgttttatctcgtttattgttgggcgcataacctatatcttcagttatatttaaaaaagatgatgataaagaccgtaagaataaaaaaaaattaaagacctatctcttgagtaattaccaaataactaataaaacataggcctatacgaatcagaatgtttcatagtgtattaaaacaatctaattgtgacacttcaattaatttgagtattttaaaaaacaaaaactgcataaatggttaattttttaataaatgaaatattagttaacagtgtcaaatttatattggtttaacacagtatgacacataactttttaacaagagatcttgattcaagctgatacatgcatatacttatgtcttcggttattggataatagcccaagacatgtatatgtatatatatttttggagaaagttgaaatttttcattttctctcttcattcatggtctttctcatccaagactctaataaccaccgaaatcaaaccgccatttcctccataactatttctctttattttttttctaaaatattataattttcatacggaaaaatataaatatatatagcataaaaattgatttatttcaacctttaataagctaaataaattatttctattttagggttttgtgagtgtttatataaaaaataaacaccaacaattatcaatagacaagattcattgccataactaaaatcccaaattggacagagtacaacatgcataagaaattacccatacgatgtcacgagtaaaaacaaagccaacaaggtcccaccttgcgtgtacattctggggtatgtgaggctccctcgcgtgtacgacctgggagagtaacaccccccccccccccccc

SEQ ID NO: 162706 - DNA, 2521 bp, Cannabis sativa
gggggtatttgcttccttaaaccataataataaacaaatttggtctgtcaacaaaactctgaagctcctctctttcagatgggatgatgcatttaagttactggatgagatgctcaagaatagggaatcaaacattcatcaagtgattggacaaatgattaagggagattatgatgatggttctaactggcagatggtggagtatgtctttgacaaactcaactcagaaggatgtgggcttgggataaggttctataatacacttctagaagctctttggtggatgggtcagaaggaacgagctgcacgagtgctcaatgaagcaacaaaaaggggattgtttcctgaacttttccgtaaaaacaaactagtatggtctattgatgtgcacaggtattaagggaacttctctcttccaagtcatcttccttccacttgaaacttataaatgttgatgctatataaattgcaggttgtgggaaggcggtgcctgtgcagcactttcagtttggctaaatgatatttatgagatgttcttgactgggaaggatcttcctcatgttgcaactgttgttgtggtgtaagtcactttccttctatgaaacttttttattctttgtttttttttttcttaagtcctgttgtatttgcttatgaagttactgcttcttgcccttgattgaccaaggattaataagctgagctgggcttgacaacaacctcgttgggacaataatgcttactttattatttatttagctctttttattgccgacatttatgacttcccctcaaaattaatattaccttgtctattaccatatctaattttaataaagttttggccattattagcatcaatcttttttagctgactggaactcaagtctttgagaaatctacatggaatatgattggactggtcatgtataaccaaagttgatggtatttgttgccacaaaaaaaaaacaaaaaaaaggagttgatggtatttgtagctctttatttcattgtgtaatcatgaccctttttggaaaagcccattgcatctcatgcagtatttttgaaattttagatgatttgcttggtgggcttcagcttagagtcaagacatttgaatgtcttcaatatgtaatctacattatgtttttaggtacataaaatatcaaactgattttttattgaatgatttgcacaatcctcatctcacatcctccgaaccactttctaatgctaatgtgccttgttttgattgttcagacgagggaagatggagcaaagcccaagtgcacaagaatcaccaattgcgaaagctgcctatacttttttgcaggaaaacatttcctcatcctttggttttccgggatggaacaagggtagaattgtctgccagcgggctcagcttaaacaaacactcgcaagcatagaatcatcatcagacgagtccaagaaccataaaataatcactttgagtaacggtttccctcttcctggaacaagaacatctatcagtagtaatgttaagagtcatcatcatgataatgccaattctgatgcagcagcaattgatacaagaacagaacttttgacaatcacagtttaacaaggaaaagaaaaaaggacagggctcaaaatgctctgcctcttcccatttttgacctcaattgcaatacctaaggatcattttcaacttggtgatgaagaatgaaaccagggtcaaattcgttcgaataatgcctggaaaaacagttcagttggcctcagatcaacaatgaaccgcgtcgttctcaaaacacagttgggagtcctttgatgtaacggtttgtaatttttgtagctttcaatcattaatttttcacattgtaaattatactcttgaacttttttctgttgatcattttgtagaagctaatgtgggtcagttttgaagctatcttacatgctttatataatacaccaacctaaaaagaaacagaagaaaaaaaaaactatcaagataattactataaattgtaaccctgtctcgattgtgattgttagtttcttttataactaataacataagaatttactcttcacaggttggagattgcatattatttcagcggatatttttgcaaaaatgttgtgttcaaaaattattgttacacttttttttatgacatattattacacttattaagcctacatgttgtgtattaagtttagtgagataataaaattataatttagaaaagttatttcaacagattagctttttttaataaaaatcataagatttattaattaataaatttgttgacgtatttcagaggaacattcctctaactgaaacacacgacctgtagagaaacaagagtctcttgctaagcaatgagccaactcattttcagatcgttttacagaacgcaaatcactaaaagacaaaagcaaatttcgaacatcttgaacaataagaccaaactgtgaaggcataaaaatatcgctctgaatcgcttggacacacaccaagctatctgtt

SEQ ID NO: 162707 - DNA, 1260 bp, Cannabis sativa
attagttgttttattttagtttaagtaaaattataaaacatgcaggaaaaaaatgggggaaaatacagatttaaaatcgtcgcctataatagggtataggcgacggttttaaatcgtgccctatactataggtgacgacacatatagtatagggcacagttataaactgtcgcctatacccagttataggcgacgattttaaaccgtcgagaaatctacattagcgacagttttgaaccgtcgccaattctacctattttacaatagttgtataggcgacggttatagaatctgacgggaatactttaaacgattgtttaaaaagtcgagaaaatccatttttgtagtagtggatgctgattggacctgctgcccagatgaaagaaagtcagttgcagactattgtgtatttttaagtgatgctttgatctcttggtcgtcaaagaaataattaattgttgctagaagcatcactgagtctgaatatgaagcacttgttcaattggtagcagaaatttcatgactacaagaactgctgaatgaactcaaaatcaagtgttcctctatacctatcatctggtttactatgcttgaacaaagcacatcgaacataatgttcactttgtgagaaacaaagttctggagaagaaattggaaatcaaattatgatcagatagttgacaacttgactaaaggtctcacctcaactcggtttcaagtcctcatcaacaaactcaatgtgattcaattaccttatcgtttgaggggtggtattagagaaattgaatccaacccctagtcgacagagatgagtgagctgactaaagagtgtagcaataccgaatgagggaattccaagattgattgtgcaatgattaccttttccaacaaactttccattatgaatatttttttgggtattatatcaacacgtgtactacttttattggcccatattttcattctgtattttgcctttctcctatttaatgaaatgctactacactcactcgttggagctagcttagttttccaaacattaatttattccttaatttctcctctccaaaagaattgaaacgttactatatattttttacatttcaatactaattcttacgtttgttggtatccattaatatatataaaacaatttcatggtggtatatatatatgagcattgctattgggcaccagtggtacctagcaccttctagatgtgtcgacttgcaattggttagcgatactccataaaaatta

SEQ ID NO: 162708 - DNA, 876 bp, Cannabis sativa
gtccgcccctaataaccaaaattgctgtagtgaagtaccaatacatattttcgattagaaaaaataccaatacttatttattttttattattaataaaatttgataatgataaactattatcaacataaaatttgaaggcaaacagccgtaagaaaggcaaacacttctactaagtgagaagagaacacaagcatcgccaactctcttctttgtttatataatatataattacatattacttgtattataaattaattcaagaggaaaattaaaaaaaaaaaactccctaacattaatcattagtctaatcgtattaatctctatgaaaataaatatttgctcttacgtacatccttaaaagtttatatatttaatttttatttttcaaagatacgatttgaagcattactcttcccaactatatattattagtcaatttaggtgttcctacaacattatctaatatctataatttttgaagctcgcaacacgctttcaaccaaatattatatattacttgcacttgcaacgcattattcttcattgttaatattcaataataatttaaaataaaataagacagcagtttcgccacttgaaaaaataattagatttgggattttagattttcctatataattattaatattattattattttttattgaagtgaaagtaaagttttggacatgttcgaacttggcaacaaattaatgtctctggtttaggaactcttatacgtacctgacacatgaccacatgcagcctgttattggtttaggttattattttttttatttaaaaattaatttaaatatacaaataaaaaaaaaaaaaaaaaaaaggaaaattccaaaaagggaaaaatattacaa

SEQ ID NO: 162709 - DNA, 3802 bp, Cannabis sativa
aataattactgattagccaattttatattatatgggctttgaggtgttaagttaatgaacatggagaaagaagcgcaattcatatcattcaaatctcaatatgattgaccaaaaggtctctgtggttctctatctctctcttttttgggttggaaataaggtgatatattgatgaatgatactaaattaattttgactgacccatgtcaaaatgagtaattattttctaataaagacccaaaatctttaggtttcaaaaagagaaaaaaataaaggcacaaataaataaaaaaccaaaaatctcaaatggtgattttttttttctggtgaaaaccaaatggtgaagtttggtctctagaatgatgtagtgattaaaagagtaggcttagaattatctagatcatcattcgttcgacctatacagtactactctaaaatatctgatcgaatgacaaaatgaccaaattgtccatggtttcgacgtaataatcagttttaattgagagtcttgcaatgaagtacaactttccattaaaaactatttagtggtaagcattcatttacttacgaaaaataggctccactatatgtgaacttgcttctaatataaaaaatatatacaaataaaaactaatacttatatattcaactcatttaattattttaattttaaaataggggcgattcttctttgtaattgtatgtaacttccttcaattcaacttgtgaacataaacgagggatttaaaaactattttatttatttaagtgaccaacttgattgaaacactttattttttttgttctttagaaacaaagtaacattattagaggaacgagtcaaaatggctggcttaaactgcggggtaatattggaatattataaatttcaatggcaaaaccaggaaatttctggacatattcagtccagaaagtacacccatataatttttgaataaaaattgagttaactatctcttaaaaaaaataaaaaataaataaaactaaaaagcttgattggtataaatattttatatgtttgtttatttaaaaaaataaaaaaagataaatgaataaagaaataaagaaaaaagaaatgtgaagcacacgttagcctatatatagccaccatatgcctcagttattcctcctccaattttcaccattcttcgttccctctaaaaacttttctctctgtcttcaaacttcttttcttccaagaaagaaactctttgagacatttttactcttgatttttggccattttaggcttggtaagcaatctttctggttcaatggcttctgcatttttctttcttcatcattcttcatagcttttttaataaaattttcgcttcttggtaatcatgaagaacacacaccaataatatttcatagtattatcacaatagttttattattgctatttgagcacttttgagtcccaaccatcaatttacttgaatagtttctcctattctttttgttccttattataatatattggcaaatttaatgacttgtatatgtttatggttcgaaactttgccaaaatccatatagcttttgctggtgactttatgcatttttttcgtgtcataatttaagttccaatgttaataagtaataactaataaagtaaatcacaaacagagcttttgggacaaaggtttggtccatccatattatatatactttattaatggaccaccttcaatcttatactagtggttgtggtttgtccattaatacacctaatcaatccctcataaaattggcctcatattatccaccattatagtctttcttcctctctctctctctctctctctctctctctctgttttggcgtttattgatagagattgaataaatgaaatttctatataagcttggcttagttaagcctattgcatagtcatttgctcacaccttttcttttgtttctgaagggttttatttttttcctctcttacaaaaaatggaatttgatgaccgatttctccaagttcaaaggccaaaatttgattgtcttctgtttggtaaagctactctctttatacatttttgacttaaaaatataatagataaaagctctgtcattatatataatatgaagctgactaaataataattggacaattgcagatctagatgacaccctttaccccctaagtgcaggtcttgccaatgaatgtcgcaaaaatattgaaggtaatcaattatttaaatattcaattttaaagataaagatgctttcatttagtatgtagaaaaaagaaatagtggtcatctaattgaattttttcgtgcagactatatggctgaaaagcttggtatagacagaagcaaaattggtcaattgggtaatcttctttacaagaactatggcaccacaatggctggtttaagggtacgccttcaaatttatcatttaggtttaatcataatttataattgtttaattttcaattatttattttttgaggaggacatggattaaaaaattctttggttttaccttttgcaggcaattggctatgactttgactatgatgaatatcacaggtaacaaaattattttattcaattcattttcttcttctttctttcatctttcttcaatgattacatatttaccttagtttaacaattattttgtcatatataacagttttgttcatggaagactaccctatgacaaccttaaacctgaccccattttaaggcaccttttgcttaccatgccttatcgcaaaattgtaagtaaatattctttaaattgtaaacaaacaaaattgttgttttctctttttttcttttgttaaaatgtcttctcatgagtattttttttcttttttattttagatttttacaaacgcagacaaggtccatgcagctaaagcactgaagaggcttggattagaagactgttttgaaggaattatatgctttgagaccttgaatccaattcataagaacacagtttctgatgatgaagatgatattgaatttgtgagattagacaaaactaataacactagtaataatgatgatcatgatgttaatcacaccacgactagtacaacaagctctgttatatttgacataattaagcattttgatcaaccaaaccccaccacttctggtctaccaaagtcaccaattgtatgcaaaccatccgaatctgctatagaaaaggctctcaagattgccaatcttgatccccaaagaacagtaagatcatcatattacaacacttaataacaacataaataacagttcatgtcatcatcatattatggccacagtacttaattatttatattattcgattttcatccagatgttttttgaagatagtgttcgaaacgtccaagctggaaaaagagttggcctccacacagttctggtgagaaatttgataccaattttcgtaacactctattaattgtgataatgttttattattattaatttattattatatactaatttttttttaatgtaaattgaataaccagattggcacttcccaaagagttaaaggagcagattatgcattagagagtattcataacataagagaagctttgccagagctttgggaggttgacataaaatcagctgaagttgtttattcaggaaaagtcactgtagagacctctgtcacagcttaattaattagttaattaattgagatattactattatgtatgagcatgatgttgatgcttttgtttttattattatattagtgtataataaaataaaccaaaaaaaaaaacaaaaaaattaaata

SEQ ID NO: 162710 - DNA, 2293 bp, Cannabis sativa
  modified_base (1321)..(1321): a, c, t, g, unknown or other
caagaaaattaaaccaaagtcccaaccaaaaaagaatacaataacaaaaaaaccttgaacaagttaagagagaatgtgatatttattgtattgatctaattattcatgttgtagagtgtgttattattttattatttttatattttgtaaagtggaacttattattaattcattttggagatagctaaataatttgttgataataaatatcaaactctatgttttatcaaaacctactcgtaattcagtttgttgttttcaaataattgactattctcgagaatatatggatataaggtaattatttatgttatacactccaacgaattatttttttttgagaaaaagcgtttatatcataaattcaaatcaagttagacctcacggtcattacaaaatagattttccggaatggaagagaccgggagagacccaaaaacctaatgggtaaaggtccatctagccacattatgtgcggcaaagttacaagttctactaacataagaaaaacaacaactactaaaggagggagaagacttagtacaaaatgagatatagttctccattgcccaacgagatcccttcccattgatagcgtcgacaaccactctcgagtcattctccacaataacatacttggagccgatatccaaagctactgatacagctaagcagcaagccgcagcttctccacaaagcgcatccaagaaattctcccgagctgtctgaactctaatcactctaccaagatgattccttactaatcactctaatcactctaaccactccaacaaattaaattcttaatatttattgtttactaattaattttatttaaataaaaatttagtaaatttttttatttttttcttaaatcccaaaaattataggccctaaacacgagtctaatgtgactatacctaagactgaccctacaaccaacaatacctcagagattatcaaagttctctctaaaacaaaatttagctaatgtataggtcactgtatttcctttacacaaaatttacaagaatcaacattacataacgaaataaaatattataccatcttcactaatcactatcgccccaacccttatgaatttcttggatcacattagaacaattgctttccaaacaaataacattgataccattataatagcactatttttatttcatacaataatatatcctttcatacattttgtgtttgataacacttttttaattagttttttattttttaatttaaaaggtgaaaatattttttaaaaacatattttataaagctgttttcactttttaattttttaattganaatcaaaattttaaaaattttaaaaacaaaaaaaaaatcactttcaaatttttttaaataattctcttttcttaatgaatattttgaactccgatctcaagttgaaccttgtaacccgaactcgggtcctgtccccagtcctagattcaaaccatgacctcggtccaaacccagatctaaacccgacttaaataaaattaaaaaataataatgaaaataaaagttattgaacacaattttattttctgtttttattaaaattaaaaaaaaaaaacaaaagtgattataaaatatatttttaatttttaaaaacacaaattttacttttatttttataattaaaaattttaaaaaataaaagagttaccaaataccctcgtaatatattatttcctaaatttttcaccacattattttttatttcttataataaatggggcaattgaatgaaatttcattgtgtgcatattttttatgcaacatgccaacatgtaaatacttatcacgttttattttaaatatattttgttattaggtaccaaccatcactaataaccaagtggctttgttgaagtatcctaatatatgattagaatttaaagactaatggcccaacccaacccaattatttttacaaaactctgcttttataatgaaagtctaacatgtatagcaatacaaacttgatccatatgagcttttgtgggttaactcattttatttagggattattttacaaatactcgaaaaataacaaaagatttacaaaaattttaaatattttaatgatttttataattttatttattaaaaatacggtcttttgatttattttgatattgtatttttgttaatttgttgttattcgtatgctatttttttatagggaaacttacaaaaatactatttttttaccaaatgttttcaaaaatactgggacacggcaaactttacatttttactgtccaagcc

SEQ ID NO: 162711 - DNA, 1804 bp, Cannabis sativa
tcattcatctcttgttttctctctgtatctaacactcttctacgtcgtcagctccgtcttcttccccataatatgatcttcaatttgcacaaaaactagctattattaataataagtattaataattaatactttaccaaaaattaatcaagttacggatttgggttttgtatcatcaagaccatttatttatattaataattttatactttatcatataatcatcattgttatattatcatattattgtatttattattattagtcctttattacatcaaattataataatttgagattattcaaatttttgagattttttatatttatttcaaatatttattttgtttttattagcattatatttttgcatggtttggataccttttatagcatttgcgctatttttatggcttgtccctaattgtctaaatagatttgtagtatgaacaataattaagacaaaagttttatatttggtattcgtggcttctgcaaaacgacttttgaaatttgacagataagtgtttcaagtctagatattattatctgaattattttacaatctttattcacattatatatttttcattaaattgtgtggtaatagaattttattgttattttgtaagtcgattttgtggagggcctactgttacagagatttgctggtaagtttttaaatatagtttattggagagttgtcatctttttactattaaaattttcttttattagtttcaatatcatcgttaagggttaatacctttatcttttttgttttgtagatagtttctggagcattttgatatgttaataaggtggcgtgtagtgttcgatgctacgagttgaagctctagttattttggtatgctgtttgaaaatgttatagctttattgtctaaatttttggggcagtttgtctcatattgctcgcttacgtactttagcagttcatagtttgacaagcatacccttcggttagacgagctatcctggttcgaggaatttcttgcacggtttgcaaatatctgtcgtaaattcatgagtgattctaatcactacgccaaaaaaacaaattataataattatgaaaattcaataaaaaaatttcttttaatttacataactagactttggattcaataatgttacaaaagatattacaataattttttttccagaaatgacatgaaaagaagctaaaattctggtgagcacaaacaattatctgattgagcataaagcatctctaatcggtggccctaatcgtaattaaagatattatttttgtaacctatgcatacatgcaataaataataaaaatctcaatactatagaagacttaaattcaaaaagggggtggtgtgattgacttttcttcacaattaagtcattactgacaaatatatcttgtcataataattgaatatataagaacattgaaatgtaagagcaggtgtgaaaaataatatatggagtgtggagatgtgtggtgatttcttcctatcatatcataataatttaaatgtaagactgtgtttggtaaaaagagaagagtcgagtgtttggtaaaaagaaaagagaagagtcgaaagagagggatgaacgtaaagagaaggagggataggtcaatggttaaaccttttgacagaaagagaagaggaaaagaaaggaagggttaaaatttacaatccctcctaaaatggagagattagaaaagacaatatatataaggctaattaggattttggcctcctgaactttgacatgtaccaaatcatgccccctgaactattgagat

SEQ ID NO: 162712 - DNA, 1079 bp, Cannabis sativa
  modified_base (1024)..(1030): a, c, t, g, unknown or other
cctttctagtgtctttcttattcaagatactctccaaactatttcgcttttttcggatagtggcagcaatattgaaaaagaacttagaacatttattaccattaattcttaatagtccgagcaaatatttgggagaaaaaaaaaaatctatttacatacatggacattttatttatttatttactttgataaactatagcccaattagtatttctttcaaaccaaaattttacaacctatattcatcaccataaacaaaaatatggcatgtaattcacaatctaattgcaatcacattcacagactaagaaggaaccaatattcttaatcctctatattgtgatttttacaacttgtaaatttgtagctgtattttttatattgctttttacttgctgtacacatctctctacagtttgtaatttttgattccagtaacaatcatttttattcatatccagatttgatacacgtacagtagctgccatcaacttcttcttaaacttggaaagtttagcaagggagatccatctcaatgaattacatttaattacacatggacattgcttattactatataaaagtttacgagaaaatcatacacgtatatttgaaagttttttaaattgaaattaacattttttaatgaatattatctattgataattactaaataaattaaaaatatatatactaattaaaatgcatatacaattaaatttttgggatggctacaatatgcagtctaatgatagtaatatagcttgttttacaaaataatttaaacagacaaataatatttttttagttaaatataaatttgtagagtataactatactcaattgctttggccatatacaagcataataaatggtataattatctctaattgtatctaaatccaattaagtcaatctaaagatatgatcaaccctaaatcctagctatactcactataaaaaacagttatacatttagtgataactttttagtcataatataatttttttatgattaaatgtnnnnnnnagtcacaacaaaatattacttattgctaacacatagtatttaaatacaa

SEQ ID NO: 162713 - DNA, 4768 bp, Cannabis sativa
  modified_base (3337)..(3348): a, c, t, g, unknown or other
aaaaaaaaaaaaaaattgtaaagcataaacattaaaaagaaaaacatttgatgtgacataacattgtgaatgtgaagtaagtgattaaaaataattccaataatttagagttattataatatatagtactaattatgaagaagaagaaagtatattcaataccgttaagatcctttgttataataataagacagtgaattttgataaaagaaaaaaatcatgattttatgactattcccttggacggtgcaaaccatatctaaaaaaaatttaccaaaatattaattaaagatatatataaaaaataaataaatgatatactacaaatctgtactgtgattattccgttgaagaatcaacataataaatattaattaattaaagaccgttatgagtttaattattatgatatgaataaataggatttactttaatttaattaatttatatattaattattaggatatgttttaatttcactttttgccaaggaacaaggctgaatctaagatgattaattatataattaaaaagaataaaattaggcaacgaataaaagttagatttacaaggtgaataattttctccaaaataattatgaacaagcacatggttatgtatgaaattagagttaattatcaaacatgaaaataattaataaatttgagaagttatataatatagtcgttggaccaaaaatttggccgttacacaattatgatcaaaaattaaaacagttgaattattcattactggttttgcacgctgctaaataatactactatttcttcaactacaagaaataaatagaatatttttatttatttatttagttaaaaattgtagcaaaaatagagccataattgatttgggtgcatataatagacgttgtggtaccaatataagttttttttaatattaattattatttttaattttttacgtggcaatgtggcataataattataatgttacccattcacaaactattttcctttatgtttcttcaacatcactcactacactctttaaaagttaattgagatttttcccttttattcactcctgtcccaaaacaaacaccatcaaaccactttttggcccacaaaaatatatatataaatatatatatataaacacacatattataattaattgattttattttgtattgtgttatataattagcacatgacatgacaccactccaatccaagtcatattactaatacaaattcacttaaaaatgtatatggtcattttagtgatatatattttacttttattatttgagtttatattaagtttgattagttttaataaaatataagttgattagatcgtttttttttattgttttagtcaatattttaagtgattaatagttaatgagcttaatatttgtgtgtatgaagtctaattgaagcaaaagtatgaacttttctagttaattgaaatttttgaagagcagactcagtccaactaaaattatccataattctataaatacatatatattatcttattacaattgtatacttttgataatcagataaataaaattgctttcaatttatagatctaggaaagaagacctaattaatagtattacactataaaattacagtaattactgtgaaataatcaaatatatatacataattattatctattattattatattctatattatataaaaattttgtattttgattatttaatattttaacaactactacaataggaaatatatttgtttatttattgataataggtatattaatttataatcactaaatctaaattctaatgattaacattaaatatatctaaaaaaaatacagtacaattaattaataaatatttttatttataattaattttgtaccatatatattattacttagaagaactaaaaaatttgacgcctaatttttatatcacttattgtatttgtaaaactatatgagaaagtacaacttatatattatcataggtcaattttgatatgaaagagccatattacaacaaattaagaatataccacttttaattaccaggtaataatttttatatgatgtagtaattgtatatataaaaatattctatacacaggaaagggtttatctttgtacatattactatgccgataactatattaactatatgttagtttgaatattaataatcaaactgtatatattagttcagattttattacatgaaactaattttaaaccccatttggatttggaaggacccactaatatagatgaatataactataattatatatatataaatatatatataaggtgtatatagtatttggtgagtggaagaagatgacatatataataataatgacaatgaaataaggaacaaacagatatcgttgtttatatatataaatatatatctatcataatctaaattaatgtgtctaataaagcaaataaaaatatttccatggctccatgtgttctgaaaaagtacgtaataatcaaaacgtacgtggtcatatatagtatatagagacagtaatgatcaatataattttccatgctattaatcatatcttggcatttttctaaattataataatgtttgtaacggttcataaactataaaacgtctttgttgaaacttattaattaaagccattaattatatatattaagacatgaagaatagacaacattattggaagtgcatgcaatgcaatgcaaaacaacaataaattattttagactttagtgagtgtcggtgcttaattatttagcccatgaattattgatgaaaacccatcttcattaatcaaacagacaagtcaaaaaatatatatattttttataaattatttaaaaatacaaatgacattttcataaaatgaaatggctacaaattattaagatcagatatatacacaccaaagatattatatggtcgtgcatataatttaagagggttcaaaaatcaaataatattgtccggttgttattttctatttatttatttattttggaagaatattttttatttatttaaatatcccatttttggataatattttgtttagtacatagatgatgaggcagctttgttgtcctgagttcatcattatctaaaaggggtattttgaaaaataccacttttattaattaattaatcaaatttacttttaattttatatttaattgaaatataactctttttatatgtattgtacccaaaataccctgatataagagagtcacatggagagtatcttgaagtgacaggggtaaaattggtacaatgtttaaaaaaagaagtaaaaatgatagactttaaaannnnnnnnnnnnataaaagaagacaatataaaaatgatatagagtgtaatttactctatcgtggtatctaaaatttgataaaatatacttaattttagaataatgatcatttatttttttcttttgaattttatatttttttcactattttttaaaatatttataatttctatatacagtttactgataagtagcttaaagaaaatctatttggttaagatttagtttcaaaagaaaattatatagttgaataaaaatactaatcaaatagaaaactatagaacttataaacattatttttgtacattatttgttcaatgtgtgatattaacttaatttttgtgtatacttggtgagttggtgtgcatacttcactattctaatgttttttttttaccaaaagtcataaaagaataaaattatttcgttaaaatattaatgcatatacatgtagctcaataaaactacaacaattgaacttatactaataataacatgctatctaaataatacatcttaataaaaaatgaaaaaaataaataataatacagcctatggtgtagtccaggtttatcaccttaacaacaagaggaaattacattatatgggcctagacctcaaattattgttacaaggcccataaatgacgacccattgcagtgcaaaaaacaaataaaagttcacacaaaacaccttattctttttttttttttttttttctttttatgattttttatatatttttactgacttttgttgtatcagtttttttacatgtatagcatagtctaatgtcactgcaatgtagaaataatttgttgagaaaaaccaaaaaagaacaattcgtattttttgtaaaaaaaaaaaaaaaaagccttttgtcattatcggctatttagaaaatagggaagtttacgtgaactactattttttgtaaattttttaaacttttacgtttattttttctatatatatttttacggtactatttttacgtttatatatattttttaaacagtacaaaaataacaagaaaacaacatttaaacaacaacaacaaaacaacacaaaataaataataaagaaataacaaaaaaccaataacaaaataacaatattacaatacaaaaatatattaaaagagcatcttttatgtaaataaaattttaaaaactgttaaaatatctaaaatttcatacaaccatatttttgtaatttttatattttttttaaaaaaataatgggataattatcccacccacatattgaaattttaaatttatttacttttatagtgtggacggatttttttttaaaaacactattttttctaaaaaagaatattgtgcaagttttatactgtgtactgtgttaagtttccactattgttttacggttattttttagttattctactgttgtttttaattgt

SEQ ID NO: 162714 - DNA, 5735 bp, Cannabis sativa
taaatatttcaattttctctaaattatataagtataaaactgatctattcatcaaaatagtataatagtattattatttcttttttacaattatacaccaaaccaaaaatgttgtgaatttattagttatattatatttgtaagaatatctatttgctaaaaagaataaaataaaaataccattgctttcaacgtacgttaaactacattctttagttaatgtgatcatttgtcaatatatatatgctaccttttgtttagttagtgataaattcaaagctatggattatcatttcaaaggcagtagtagtagtgatcatcatgatcaacaaatagggaatgggatgcgctcaagaagctttcgcaatgaagattacagcaacagaagggcttttttaaggagttaccctcttcaatggggtactgaagaagaagaagaaggaggaaatgaacaacatattgctaaggaagatcatcacaagataaattacaacaatattaagaagaagaagaagaagaagaccataaagagaatcatcatagcaatgattcattggggtaatgacaaggctttggtgttaaagagggtcaaaactagggttactatttatgttattgcttgtatccctattgtctttaagccctcaactactgctcttatttctgcttaaaagtctaaatatatgatattggattcaaattttatgtcttcttttttatttatttattttttgtttttcacttgaattgttggaactttagttaaaatttaacataatatatgaatagtgaagtgtgtgatattgcattgaattacatgggataggaatactttcttggaagtgcataaaagttgcaactatgaaatttgggtttggaccctatataaggtttatcccgttttgtgtgtatgagtgaggactcatacaatagactgctacacgcgcgtgccaccaccgtccgcctaacaaagttgacgggtgtggtgtcacttaattttttatagaaaaaaattgtttaataaaataaatatttatatattaattaattaattatttttaacacgttttatgaagcagtaaacgtaattcgttttaactgctgatccacgatcctccaacgatcgaagtaatgttcttttgatccttttttttttaccaacttaacatcatcttaagtcgtatcttaccaacggcagaacacatctcttcaacacaaaaaaaaaaaaaaatctcttctcttcaaaaatcgttacaatttctcagagcaaataatgtttggggtgttacagagtgatattgttcgatgcaaagcgattcgtatacaaaggtttatcttggggatgccgtagttgatagattttcgtgcacactttgagcagagtcgcaacatttcttaaagagagcgacatagttcgcgactcagccaaaattatcaatccatgaattcgttcgcagactatgtcgctctgtttaagacgtttttaactttttacccatgatcctcccgcaatcaaagtaacgttctttttgattgacctaacatctttttaagtcgtaacctaccaacagtagaacacatctcttcaacacaaaaaaaaatctcttctcttcgaaaacctttacgatttctcaaagcaaataatgtttggggtgttattgagggatatcgttcagtgcagaatgattcgtataaagatgatattttatacagggaacattattgttgatagactgtcatgcacactttgagtaaagtcgcaaaatatcttaaagagagcgacataatttgcgattcagccagaattatttgttaaaataaataaatatttatttattttaacacgttttatggaagcagtatacgtaatccattttaactgttgatccacgatcctccaacaatcgaactaacgttcttctggctattctttttgatcgacataatatcattttaatttgtatcttactaatggcaaaacacatctcttcaacacaaaaaaatctcttctcttcaaaaactgttacgactttagaggaaataatgtttggggtgtcacaaagtgatatcgttcggtgcaaagtgattcgtgtacataggttttatcctggggacgtcgtggttgatagattgtcgtgcacactttgagcagagtcacgaaatttcttaaagagagcgacatagtccacgagtcagccaaaattatcaatcgataaattcgttcgcagactatgtcggtttaagtcgttttaacttttaacccacgatcctcctgcgatcaaagtaacattcttttaactgatctttttgattgacttaacatctttttaagtcgtatcctaccaacggcagaacacatctcttcaacacaaaaaattctcttctcttcaaaaaccttacgatttctcagagcaaataatgtttggggtgttatagattgatatcgtttagtgcagagcgattcgtataaagagagtgttttatcctaggaacgttgttgttgatagactgtagtgcataccttgagcaaagtcgtaaaatgtcttaaagagagcaagatagtctgcgactcagccttaattatcaatcggtaaatttgttcgccgactatgtcgttctttttaagacatttcgcaactctacctgaagtgtccctgacaatcgatgtgttatcctgcgactcagctccttaaaccgagctggcagtgtggtatccctttttgttacgaaaaaaatatttaataaaataaatatttgtttatatttatttttttaatacattttttggaagcagtaaatgtgatttgtattaattgttgatgacccacgatcgaagtaacgttaatctgactgttcttttttattgacttaacatctatataagtcgtgtcataccaatggaagaacacatcccttcaacgcaaaaaatatcttctcttcaacgatttctcataacaaataatttttggaatgttacaaagcattatcatttggtgcaaagcgattcgcatacagtggttgttttatttgaggaatatcgtggttggtagattgtcgtgcacactttaggtagagtcataaaacatcttaaagagagtgacatattctatgaacaaattttaccgattgataatttggttgagtcgcggactatgtcgctccctttaagatgtttcacgactctactcgaagtgtggatgacagtttatcaaccacgacattcccagaataaaacaacctctgtacacaaaatcaatctgctccgaacgatatcactctttaacaccccaaacattattttctctaaaattgatatcactctataacaccccaaagattatttactttgagaaatcgttaaggttttcgaagagaagaggttttttttgttgttgaagagatgtgttctgctgttggtaggatgcaacttagaaagatcttaagtcgataaaaaagaacggtcagaagaacattataagtgataacattcagtgtagaaaaaatcgtatacagaggttattttatcctaggaatgttgtggttgatagactgttgtgcacactttgggcagagtcgcgaaacgtcttaaagagagcaacatagtctgcgactaagccagaattatcaattggtgaatttgtttgcaaaatatgtcgctttctttaagacatttcgcgactctgtccgaagtgtgcacgagagtctatcaaccacgacgtccctagaaaaaaaagcaactattgtatacgaatcgctctgcgccgaatgatatcactctataacgttcttttgactgttctttttgatcgacttaacatctttctaagtcgtatcctaccaacagcaaaacacatatcttcaacacaaaaaatctcttctcttcaaaaatctttacgaattctcggagcaaataatgtttgggtattttagagtgatatcgatttcagagcaaataatatttagggtgttacagagtgatatcgtgtgatgcggagccgaacaattcgtatatagaggttttttatcctgggaacattgtggttgatagactgtcgtccacactttgggcagagtcgcaaaacgtcttaaagagagcgacatagtctgcgaacgcggattatgtcgccctctttatgatcttttgcgactctggccaggataaaacaaccactgtatacgaattgctttgcacagaatgatatccctctgtaacaccccaaaaattatttgctataagaaatcattgaatagaatatattttctgtgttgaagagatgtgttccgccattaataggatacgacttaaatagatgttaagttgatcaaaaagaacaatcaaaaaacgtttcttccatcatgggtcatcaacaattaaaacggatcacgtttactgttttttcataaaataacttttttctataaaaaatatggataccacacaaccagctcgatcaaacgacgatgtgcattgtggtttggtatgtgagtcttcacccataaacacaaaaatgggtgaccgttagggctcaaatccaaatctcatagttgcaccttatatacactttcaatgaagtattcctatcacatattggagtcaatacactaacacacatttcactactcatatattttgtaaaattttaactagagttccaaccattcaagtgaaaaataataattacatataggaattgagaaagtaattaggatcatgaaatttgaatcggtactcgcttgtacttgtaagttgtagtaatatatactaatcttttggtctctctttacatatatcaaaatcaaaataacttagttgtatatatattaaaggaggtactttcaaataaatattgtatagaatttactttcatgtatattgtatattgtagcaatattctttttttttttttttttgataacatattgtagcaatattcttactaaaaaggatttttgacaaaacattctatctcttcttttttttttcataatatttttttttataaataaatttaaacaaagtactcaactcaatactctctttcagcaaaaaaaaaaaaaaaaaaaaaaactcaacacccaacattctctcaaaaattattaaaagtaataacataattctgataagaggattgctattagtatcaggtgtttaacactataccaatatatataatacattgtgagtagttaacgattttttatattatttattaaattaaaatgtgtgagattcaatattaaattatattaataataatttgatattagtacttatcaccataaggcgcttagcaatttttttttgtaattattaccatttaagataacatgatattatgatattttgagacaatgaattaaagataaccatccatcattctgttattttaccaaacaaaaaaattgcatcatgattcatgactggttgttctttgaagactaattaataatgccaattaattattgatattaagttttattttgctggagtattgatattaggtttttactatatatgacatgtaccattttcaaccatataagaagactccttattacaagtggcaaaggagacaaaattctttcctaccagtttgaaaacagtatcatcattaggtatacaaggcatgatgcctttatgtttgtagctggttggtttgaagcaattaatttagggttaatttcacaaatgcacaaaaataataaaaaaaaaaataacaaaaatacggtttcac

SEQ ID NO: 162715 - DNA, 2327 bp, Cannabis sativa
aaaaaaaaaaaaaaaacctcaattctaaggtagtcatccaattattcaaaataaagaaatataaaagtttgtaaggtcttttgggtcacattccgttaattccatgtaaccaatttcttccaaaagagtaaaataaagtaatgtactattgacagttttattagttttgtttatggaaaaaaaaaattgaaatatatgatatatttttttaaaaaaaaaacatttaaaatacatgtccaacacaaatattgcatctgaggcttatcctgttgttatattacacccaataaaattccaaaatatggtgtggtgtcaacccactttcttatggttggccatagattttttattttcattacgcttttcgtcaggaacctttggtatttgtttgtaagttgtaacgtttatctttgcccattttatcttttcattttgattttcaaaagccactatattcttgttcacataattgaatgaaaaaaaaaaacttttgtttcttgtaattgtagatacgacaccgatttttaaattataccaacaatgaagaaaagactagatgaatgcaatgtaaggcggtgcagataatagtcattgtcctttctaaaaaaatttaaacgaaaagataatcgtttgaatattttacaattttcaaattcaaaagttttttatttttccttcattttacacgctaaactccaaatcaaacaaaaccaatacattaaaaataattataaaataaataaccgagtgctatgttgttgctacttgctacctattgagtattgacgccattggtctagttatatttataaaacaaagatttgtactccacatcattttattctcaatcatagaagaaaagaacattataaaagggactgtattacaatatagtttacccatctttcaaggcaaatataatgagctgtataccatatatttagaaattgatacaattaggtttctttgacatatttggattgacaacgtctttaccaactaacaacacaacaccaactagcttgactattacggagaatatgaatagggctcttaaaataaagggtcaaaggaatataaattattttagggacatattttgtacgatgttgtgtcataatttgtgtttgtatgaagacatattgtgctttcattagctttaggacatggatggcatggcatggcccataaattacaagaacgttttgatggcttcgtacaacacagacatgattaaggattgtggtttattgatatcccttctttattattattattattattattattattatttgaaacccaaaaaattcagttacaaaatagggtaaggtattgttctttaccactctatttactaggtgagtagtgggaaaatgtgcctgcaattcagtaagacacgtgccttgtttgggctacattaatgcagatattaaattgagagtaattgtactgtgcagaattttgtttaatgcagatggtagagttaagaatgtagaagaattttagtaggtgtgtttggaaataattgtgtaattattaggttagtgattatattgtatagtaactacattgcattttacaatacaatatgtatttagatatcaagttgtaattacatgtgaatttttattatcatgttttttttttaaagagatagtaaatttattaaaacaaattagctaaaacaatagcttgcaaatatgtagggatacgcccctaccataattatgacttgaatataaacaagcatgcctagtcaaaaaattggcggccttgttcgtagatcgtttaacaaaaaagagaaaatcatttcttaaatcattgagaagagaaatacaattagcaacaagtagaccaaatggggaatacatagttactttgttataaatagcattgacaagcacttgaaaattagattctaacacaactagagggaaatcagtagtttttacccagcttagaacctctttgagaccaatagctttagccatagcaggatcagctaaaaactgttgcgccatagcagaagcaaaaagtactcgaccctcattatctctagccaaccacccaaaaccaaatctcttctcagcagcaaaaattgaagcgtccacattgatatttgacagaatagcatagtagaaattgaaagggaaaagccttttactacagaatagtaattcaaccttaaaaattaattgtgttaagtaaatcacatgcacgtgaaaaacagtaaagtggaagaagcaacctgggaactcgagacggatatgcagcagaaatatccggagttgttcaggtaaatttcaggatgaaatttctataag

SEQ ID NO: 162716 - DNA, 3115 bp, Cannabis sativa
  modified_base (369)..(375): a, c, t, g, unknown or other
cggcggttgcgtgggagtcgggagcccggctgacgagaactgtgatttgaggttacagagaagattgagaagaagtagcctaattttgaactcaaacactcaccgcaagggtaagcgtctccgatcagagagcgcagctgatcaaaatcgctgtgacgatgaccctcagagcaaggcgatcgaaaacaagatagctgaagaaactttagtgccttacaagaatgatcttgttaaaaatcttataattatcgatgatgaagacgaagatggtgagattgagaattcttggcgcggtaagttcttcaatttttttttatttaaaaaagtgaaaaatagaaattcaatacgtatttatatatatatatatannnnnnnatatatttatatatatacataaatgtttggtctttatggactttgttttgaaggtcaaaaatgtgctgaccgaaaatatcagggacaagattctaatctcaaaaaaagtaatgaatatgatgacgatgagataatgataatatcaaccaaggaagaccctaatggagtttataagtttgatataactttggtaatgttctcgtctatctatatgatagtaaatgttaatcttttttatgcataaatcttgtcttctgattttgtcctttcaaagtatattatagattgatttagaagacaagaatttgtctaaaggtggaagcagtgaatccgagttcaaaaaggaactactggatattctaagatgtccctacgatccacagcaacataaggctctctgggatgaagtagtaactcataaaaaatcttatttggatctatataaaggtcacttggtttagtttttctgttttgattgatttgaatggatgataagaacttgcttttattttatacattctatcataatttgatttcatgaaattattcaaaggctgctcctacatgaaaaaggtgacttttttttttaatgcagattttgcagatcagattattcaggccaaagcagatgatcgcaaaacactaaatttactacgcgggtttttctactggttgaaggttagttttccatttctggtcttagcttgagttgtggtgttgttttcttagtgaaaggaatggtattattctgtctagcttgatgtcatttacaaatttcacaatgaagattgaaattctgtgagtccatatgtggtatattcttcaaagttgaatggttttcttaacttagacgacttgtaatccaaatttagaaattatactaatctatctgctagatcaatttcactttcaggagaactttggtttcatattgaatgttattatttagtttctaaaaaaatgttaatttgcagaatttgccccatggaatgatagctccatggaaagatccatcattttctgaagctctgtctcaaccataattggaaactaaggctgcatatgacatttgtctaatgatgaaggaagcatggttcagtacagattgatctaattttttagtaattttatgtctcaaatatttgatcaattttcttgtgaatccctgtttttctattattataattgtaattacatggagttcaaattttgagaagagaaacattggaaatccattttttgttttgtttaatttcctgggtgttttgaatagtgtacaaaacagaggagtaagttttggagtgttattatagagatatagcttaatggatgattaatgtatggaatgaatgaagtgtatgcaaaattatttacaatgttataaatagttttttctacataagattaaaccctttgaatcatattgtttcgaaagatgagcagaatgttacaattgatagaagtagtgctaacctcttctcgaatggacactcttaaagcaagaactatatatatataacatattactcctcctgaggttggatttcattattattaaacagaattcgaggctttcccatgctaaagttgagaactcgagcattcatattgtacttaatctctccatcatataacatttttcttatataatgctctatgtctgaaccaatcaagcgaagagtgtactcagtcaatggtgcatcctgatgattaatttgttagcatcatgatattaactcaataattttatatatataaaaagatttatttacctcatagtgatcaacaagctcctggaagtaagaatagactttattacacgtatcagagttccacacaaactcattggtgggatcaagaataagggtgagcttatccatctgggtttgatcgaattcacatgtaacagggtctatataagctgcatagatcctcacatgtcgagtcacactactcaaccattgcccaccatattctctgctcatgttcttgcttttcacattcacttgagtctccactggtcttagtggtgttccctgttgttgtttcactctatcttgattattattcaactcttgttctggtgattcctgggctttttgtgctgaaatggagaaactccttctcttcttcattctcaattctcttctacctatgttgtaacccaagttcgttgtcgaaactttagctgacgataccatcatgaaagaggatgctgctgccatggctgaaaaaaccattccctccaatatctggggcatttttgtacggctgttattattctaaaggtccatgctttttctttttttcctttaaagttttctggataagatgagttgttctagtgaccaaccttttgagcggtgaagatagaaccaccaattgggttatgccagttctcagtcctgataatctttctatgccgtcgattcctgtccatcaaaatcttaaagattttagtacgggtgattttaaaacttttattaaaaattaatgcccatcgattctaaaaaataaataaataaataagttttattcccttaaacataaaataataatatcttttttaaaaagttaaacaaataaattgataataaataatattaaaatatatattttttaaaaaatattacctcataccagtgtacctagaattttattggagggtaggcattagggctcttcatccgatctaatccgcacttttttggtcaaacaacatccaatccgcactaagtgc

SEQ ID NO: 162717 - DNA, 1025 bp, Cannabis sativa
ttgttgttgttacatatagtcaaacaaacgactttgtaattaggagatttggaaggatcgaaagctaagacgatgtcccatacggaccaggtgaaagttccacgaggaaacgacagcggaggaagtgtcgtatagtgcttcgtagtgggattgtaaatgtagaagctttttcttcttgagtagaaagctgtggaacagaggagtaacccattacaggactgtatgattgtgattccgtaaaggtcgttgacaaaggtgagagacttaaaaggggccacaaaagaggaggaagaagggtcaaagtcaacgaaattgaattctgggctgttggcacatgatcttgaggtttgaagaaagaggccggaggcggcggtcggaaaagggctacggcggtgagaaaagatggggttggagatgagggaaagccagtgtttggatacggatttgaatttgaggagagactttatgggaaggcggaggagtatttggttgaggaggtcgtcgttgttgccaacttgttcggcggagtagtacgatgtggtgggtcttttggggaaagaaattctgagtttgaatgacatttgagttttctttgttacttgggtcagtagtaagttgttatgtatgttaactttgttgtaatctacaacacaacttaaacataattcagtcacaaacaattaaattagaaaatataaaattcaaaaaaaaaaaaaaaattaaatggaatatgcatttcacttgagcaagaataatagggacacttttacaatttgagttttttctcacttgctatctttcaatgtgtttctcaaaactcaatcttaactatctctcaaccttttacaagccttttcatatcttctttcaaaactaatttgaaaactctagttaaataggaagtcaaaataagtgattggctacttagagaacaagtctcaaccattgaaaactaaactattaataatcaataatcgtaagattgcaatgtaagctaatgttgatatagaagattgcaatgtaag

SEQ ID NO: 162718 - DNA, 1517 bp, Cannabis sativa
ttttaacatttctctaatatattaactaatcccattattttcaaaaataataataataatgaactgatcccaagaatgcctaatcgtccatgttggataattaaataaataaattccctaaaaatagtaataataacacacatgaataaaaatgatacgttaattaaatactaaacattcatttgtacatttttgtagtatagtagtattattttgctaaatatttatagatagatatatatgcatgaaagctagctagcactaataaaagaatctttatcttttcacaatataaaaggctttaatttattaaaattaattattatttattttattttattttatttttggtgaaagaaattaatgattatatttatatttgaaggtatggtaagagagaagagtgaaaaggagaggcgcaaagcattcgcatcaagaaatttctttatattaattgagacaacaatgtccaaaatgaaaagtactttttgttaggcatgtggggttcacttcaactcttttgttgtttttagaaaacaacctcaatttatagagagaaaattattagtaaacaaaaaaacacaatgagagggattaaaaattaatataatgacttaaaagtcaattccttttttttttttagataaaaacgtttaaagataaataaaataagagttagactttccggttattacataagatgttttctagtatagaagaaaactcaatcgtaccagttgcttttttaatgaaagcctaactcgctaaattacgagccgcaaaattataaagtttggaaataaatgaaaaattacaactaaacaaaagattagaaagatgtttacattgatgaatataattatcaataccccaatcgaaacagtttcctttcagagccttgataatcgtctcagaatcactttcactcaatcatgacaaaacagtgtttcatgatcaaaacaaccgtctccaaagctaaccgatatgccgcttctccagtaagccggtcagacaacgcaacgcacaaaacagcccatgtgtgatctttagccaaagccacagaacgcacatggaacatctgccaactttaacatcacaattaattttgatttagtcatttagaggatggggccaaacaggagacacaataaccattggcagatcaaataagtgattgtgaaatttccctaaaaataattgaaattaatgaagatatacaattttttaggtaattacatacaattttaaagtgaagaaagtactaaaatgttatcagttaaataatagaattctaaactaattgctgttctaatataaaaaataaatttagtaaatcctcttctataaagtttggactataaaaatttatcatttaatcgaaatttatattactatatataattaataatttatgaatttacacattagttagggcacatttagaaatactaagtaataattgtttattcaaactatacagtaacttttaaatgcactgaaaaaaaaaaaaaaaaaaa

SEQ ID NO: 162719 - DNA, 1997 bp, Cannabis sativa
attttaagggaaaattgggcaaaaaagcttattggttttgataacatgatttctactcagagttaagtttgtcattatagagacccaaaaacccaaagaggcagtagaaaatttgtatgcattcgaagtagggtaactcaaaatttgttcgaaaactaatcagtaataccgagatccattccacaacatttcctttagagatggaaagaaagaacagtcacatttcactctagtagtatctagtgtctagaatgctatcacagattaaaagaaaacaatttcgagtcttctgctctgcgctagtagtagtagtagtaacgaacgaaaagaaaaactatacaaaatcatacagtgtaccgattcttggctcctctgtcaagtttctttgcatcatcctgaaaatgaacgaaatgatttcattagtgaaataaattggattgtaattaaaacattgaaatccaattatatatagaaatacttacatgaaatatgaatcctatggtttccttgtaatcgaggaactccttccactgtctcccaatgctcacctgcatcataataatcgaaattgtctgagattatcaaagccatgttaaaaccgaattaaagaaatgaaacgaattcaacagctcagttacctgagcttcttcattggctgcattcttggtccaaatagatatcttctcctgtctagctctgacattcacaacagcaccgcaaatttcatcaccgtgatcgaattgctctccaatcattgccaacaactacaaagatagaacaagaaatcagatgggatcattttaaagcattctattaccaattcattataaaggatcataccgtatacagccaacaagtatctgactttcccttctgaaatgtcattgtccatttccctccattcgaacagataggatcctcccatttcggttcaatcttaaatttgaagcaatgaaagtctgcccctggagctaatttgcttgggtgatgtatgctattgtacatgctgaaatgaaagatatggaaatagataaaagccataacaaatcagaagctctgaactggaaaattctataaaagcataggaattaatggcacaaggtgatttaagcctaaatctaaaccctattactgtctcaatcttgaaaatcctagaaaaacagaggaattgatggcaaaaggtgaattagacctaaatctaaatttactagtgtttcaatcttgaggcctaagtccaagaaactaactaaacattcataaagattatttgattgaacacaaagagaacttcttaaactctcaactaagtatcaagaactcaaacaacaacaatgacaattatatatataagcattacaattaatcaaaatataaagaatcaacatttaaatacacgaacaccaaaactcaaaaaaaaaaagaaaaaacaatcaataatcaccaaactctcaacaagaacaagatccaacaacgaacaattatcataaacccaaaatcccaactttttagaagaaaagaaagacgtttacctccagaactcttcgacggtggagaaggtatagatcggacgaatagagctaccccaagcagcttgcttggacttggcggaagggttatcgaaccaaaaggtccaagaatgttcgagagggtgaggttgatggagtaagggggcgttggcagggttagaagagctggaatcgtcgtcggcgatgatctctccctcctcgagatcatcttcttcaactctagggtttgttgggattgtttgattttcctctaccaccatttttgggactttctttctttcttttttcttctaactttgctatctgaaatctctttcgggcccaacttcggtttatatgtgtagctaatgggcctagattattaatgggctgggccaccttgggagcatttatattgggaaatttacaaaaatactggaatttaggttaacttttacaaaaatactacacacggaaaagttttcaaaaata

SEQ ID NO: 162720 - DNA, 1351 bp, Cannabis sativa
tatctgatacaggtttagtagccataaacatataactagttatacaatattcaagcccataaaagatgaacgtaaacataactatgtagttcattgagaacaccacattgaaaaacaaccgagcaaccacacagaaagaaaattcactcgaccttatctagtcaaactaaatgatacaaaaaacctagtttagtttatcatacaatacataatctgctaaaacaaaagttaccaaatcagatgagcttaactaatgggcaaaagacaaaaccttcaactaaaaagctcaaaagtttaatctcttcaacttatattttgaagtgagaaccaccaccatcaatggttccaataggtaaagggtatgcttcatataaataaatattgactaatcgaaaacccaattaacaggaaatcactgctgtaagtaagagtataatttaaaaccctaaaaaacaaaatttgatgaaaataaagaaaagggttttattgtatgtagggagatgttttggaaagtacgaaccttgcgcttcagattgtaacggtgccattcagacttgtaatggaacttttgctcagaatcgtcgatgaattctttgttgcaagcgttgcaagctaaccccgacattatcagctaagctataagcttctgtctgtgttttcttctgaagatagtgaagaaaatagagaaacttggtggtatggattaggaagaagaagaagattagtgaaggaaaaatcaggttttgtaataacaacgagaccgacggctggtcggtgtaagattggactatttatatgtaatccacaaaatggttctgcgcaagcgctcgcgtcataagttttcttctttttttcgttttaagaaaattacctatttttttaatctttttacaaaaatacaatttataatatatcaatgttatattagggtaaattacgtcataaatacctaatgttttagattttatacacttaaatacttaatgtttatttttagaggcaaaaatatctaatgttataattctcttacactgttgctaccaattcagttaactcataaatatggacacgtgaagggctcaaatgcattacatttatttattttattttaaaatctaatattcttaatatcaaaaactaaatactacttgttttttaaaaaaaataagagaatagctgagtgaaccaatgcaatatatggaacatgattatcgaattaaagtaccaatatcatgtgaaaattgttatgcattttcacatgatattaagaatattaagaatattgagttttaaaataaaataaaaataaatgtaatgcatttgaactttccacgtgtccatatttatgagt

SEQ ID NO: 162721 - DNA, 2385 bp, Cannabis sativa
gatggccgctccggctgcctatgcagcaaattacgttgttggtggcagctccggctggaccaacggcggtgactatgttacttgggctgctgataagacattttcagtgggtgacactcttggtaagaactctctttttttcttattattttttttaaagaaaaaaaaataaattaaggatgctagccaccacaaataaaactttctttggaacgatttatttttcttcgaaatttataataaaataattttttttagattgtgaaactctttaattagcattacacaagatgcatcttttttttagtagtttttttaaagtagtttttttattaatccaacaaattttggttttaggtattaaattattgccaattttattttatttattgagcaataattaaactatggtcatcatataatgaaaaaaaaaggtaaattaagtaataattaatgaacatttgaattttgttctaattcttttctaatattacaccttagtgtacccaaatgtaatatattgtacagagaaaagtaaaaatctcaatttaattttatataaccttataattattatgggaaataaaagagaaaaatatagtgatgttaatgatttcacatttttcttcaaaaatagaaggtctcaaatttgtttctccggtataaaaaaaaaaatattacatatttttactttatgtcgtaatttgataaattaattatcaccccataaaaataattgaagtgagattaacagtctctataatattttatacatttaattttggacttgatatataataatattgaaagattccataaattctaatctttttttttttcttatataaaccaatgagttctctgacaaaaaatgtatatatttatatatattatctttcaaattatatattacatatgccaattttgacttaattaaaaaagttgggtatttattcatttaaatttttttatatgtgtattaatatattgtcataccttattatctcaataattaattatgtgattaaattattttctaacatttttcactaaataattaaacgtgacaactcacactatgtcataatttgttatatatatgtaaattttttattaaattattgtgttagttattttttggaccacccatgtagttgttggaaagattctttcgtaacaactcttaaatttgatacgtaattacctaaattattacttatactacgaaaggggactatataccaccccaataaaataaatattaatttttacaattaaattttttttcaagaaaaattacagccatatagctatagcttaaaacttttgttatattaaaacaaaatttgcttaaaaacaatatatgcttaagttttaagtaattttgccattataattactttggacaataaattcatcatatattgaataatgtcaaatgtgtcaaaagtaagacaattccactcatacccccaagtctatgaatgagtatacagatagacatgaaagtattctaatataatgaaccttatgtcaaattaatcaggaatatattcatttaatattctgtatcttgaaaaatatctttagtattttatatctttaataatacttagtattttgtatcttgaaattatacatatctaatattctaaaataaaatttaattaatacaattttattatttgaccaaatagttttcagttatattgaatttaataattaaattttactttagaattcataaaattaaaattgaaaatagtttgattgcattaataaaatttgatcaaataaatttaagtttatagtaccaaatatattttaaaatacataataccaaataagtattattaaaaatacaaaatatgaaacttatatttaaatgaaatacagagtatcgaatatatatgtaaacactcaacaaataatgagaacatatttaaattaaacaaacattttatatataataataattattatttgcattgaatcataagcatgaaaattgtttaacaatgaaagtaacatttgtgatatttcttatattgtatttgttaatttttttttttctaataaattactttgttattttattgaaaagtgttcaactacgacacaagccacaaagttgatgaagttgacgcaagtgattatgcttcatgtggtacctcaaatgtactaaaatcccatggtggaacaactgttaccattactcttgacaaagctggttcaaggtacttcatttgccctactgctggccactgtggtaatggcatgaagcttcaagttgatgtaaaggcttctggcactccatccactccatccactccatccactccttccactccatccactccttccactccatccactccttccact

SEQ ID NO: 162722 - DNA, 1503 bp, Cannabis sativa
aaaaaaaaaaaaaaacctttgtaagcctaatcaagtggattttacacacaataatatatcattaccatctcaaaagtaaatattattctccatacttcagcaaaatatataatacaaatattcaacgagaagtgttatcatcaacctcctattacaatctcttacttaatttttgtgtctgtaaacacatgcagaaattttttcttttttcaatttttttcatagcaatgtgttatagtcacaatattatctctcttgaaaaaattacaaaatagtttatagtgccaaaaataggtttgaagttttttgaacatgcgtggtaaactgaaatatcaagaattctgttttcggtattgtaaactattcggaatttttcaaaaatttacagggatgatattatatctacaacaaataccgctatgaaaaaaaatatatatatatatatttcagcatatgatttcgagcatgaaaattgataactaagaaattataattagcacttctcttaattaatatttaacgcaaaataaaattttgtacgcccccatgggaaaatagtgttttgattatgcatcaagaaatgtgtaaaaatgattgtgcattgaaaatatgaacataaatgatcaaattaagacaaaatttaattaacataaaatataatgtggcacttcagagttcttaacattgcatttatttttaattttaacttctcaatcaaaatttttatgaacatttgaataataaaatatttttaaatttaaatataaatatttagacagttcatttttttacatctaaacatatttttcatctttttaattgtacttattaataaatttattaaaatatatttaattttaaaaaaatattcaaatattcaactataaaaacataattaaagttaagaaattatgcattaattgtttccttttctttgcattagctgtgcaaattcattcttcaaattatttatgttattcatctttcgctctccaactaaattcatttgttttctctatatttgttcttatgatccttcctctaaggttaaataaattgagtgaatattcattattattatgctcttttcttataaaattattgattgcaaaatatgcaatgacatctctttggacatgaaactcacatggaaccatcacatggaaccatcttgttatttctatttttagtatatttaattgacaaaaatattttatattttttatacatatcttgtgtaagttgcatttatctttcatatatgtttttaattaactgattcatttaagatatatttggtgtctagttttttttttaaaaaaaaaaaataagtcaaatataaatggtttaataaaaataaaatcacatatttgtatccagtcgtgtattgatcttattcgggctatttgttgaatattttttttttttttgacaaagtgattaaaatcactcatgaatttacgacgcccacgtccgccaccggcgctggaacctcctcgaacc

SEQ ID NO: 162723 - DNA, 1562 bp, Cannabis sativa
tatagcaacctgtagagcaattatttactcatatgtttcattgatggaagaattagagcgattctttctaatttcttttggtctatggagatttgtttcccattaaataaataagttggagttttagtaacaaattggtggtttttggtcttactctaggtattcaatgaaacagcctggctctgggtcccatgtacatgtgagtttgtttcaggatggaaaaaatgtcttcatgggatcatctgcgtatggaatgtccaaagctggacaggaattcttggccggtgttctatctcatctccctcgacttttggcatttttagcaccaaatccaaataggttccaaaattaattttcataacttagtatgtatgcatgcaaatacaagtatttcattgtacttttaatagttgaacatgtttgttatgtagctatgatcggttacaatgcaatacatggaagggaggataccaatgttggggaagagagaacaaatatgttgcactgagagctgcatctccacctggatttccagatggtatggtgagtaactttgagattaatgcatttgatggatgtgctaatccacacataggcttggctgcaatacttgctgctggcattgatgggcttcggaaacatcttagcctcccaaatcctgttggtaagtttagttcctcataaccacatatctttataattatattcctcattttattaatctttgtacttgtttgtaaaaatagatacagacccttctagttttggtcaagaagtaaaaagattgcccaaatcattattagaatctgtagcagcattgaacgaagacaatgtcatcatgacaaacgtatttggtgtaaagcttctggttgccattaaagcaattcgcaaggtacttcaatctcattacaatattataatcaacttattgttagatgccatatactttttaataaatattatcacattgttacatcttagcctcttgaatcctgttggtaagtagtaagaaaaacgctggaatctctcttagaggaacaattttgttgatgaaagtcaggggcagacttgcatccttgtagttgataaaacgagtgtcacagatgtgtttggagaggctagtggagttaatcttagtgagaatgcttcgagtggggcagaaggtatggactttggtaaaagacatcatattgatttgggcagcttgaggtctgtggaaggctcgtatgggtcgggaaagggtagtgatgaccttcagcctaaggcggaggttcccactcagggtcaaggtactcacatcctcgattttcaatagggtcttattatcgagttgggtcctactcaattggctatccttggtgaggaagcggagtcgttcatctctgatgctagggcaccaagaatttttcaacttagacaggtggttcttggagctttcatgtaggattttactatgttgatataggtagtaccaattaatccatttaagctctcttcaactgtgttgtcccatacctacacagtctcagaattatcccacttgatcttccccaggcggtgtg

SEQ ID NO: 162724 - DNA, 2218 bp, Cannabis sativa
atgaatgagttcctcatacacttagaatgcatctaagttaactataattgtaatttataataagaaaacatatgaagcaaaatcaagcattaagagaagaataataaattaaaaaaagggaaaaggaataaggaataagtaccgaaagtggctgtggcgaaggtaggagtgccatccacaaaattcttgctaccagaaacaatagtcttatctttaccatctccaatcatcatcacattccacttgtgcttatccattaccacattctccaaataagtaccttgcttcacttttataatgaatttggtcagactcttcttcggcaccctttccaccgcctcgccaatcgtcttcacatcccctgttccgtcttgggccaccgtgatatgtacagtcatattgctcccgtcttgaagcagcctccggtcaccggcgcttacccaatccggaaattcgtcgttactcaatagcctccggtgaatcggaacgtggagcttggccaacacgctcaagattttggccacaatggccaaactgttactcgcaaactctgtcgaactctgcatttgggccttgaatttcggggccaaagtcgagttcagttcatcgagcgcatctaaacaagtctcctgatcagtaatggtggcactgagccaggtcttgatgtcgtcgatcttagacgaagacaagactctttcctcctttcctaactccatggacgagacagagtcgttgagccggtccaccgcgtcttctaaaacctccgtacatatattcaaagcagtcaccacacgggtgtcgtttacctgagaaatcagttcttttgggtacttcgataacttgatgagctcacccatggcgaccccaagagatagcttgaaaaggacttccgggtcagatgtattggaggatttaagcgaagataaacacgagctcgggtactgagtcacgctacagagagtgttaagtgaagcggcaggagtcaactcggcgccgggaaccggattaggtgacttcgttgaagaactattccggcgatgtataactgttccggcaacggcgccgacgacgatggctagtagaactacaatggagacgataataatgataatacgtttacgcgtctttctccggaatgcttgctcttcgagctcatctactttaccataacccttaaaggacttcattgaatccatagtttatttctctttttctctcttttgggtatctcaagatttggtattttgataaggtttttggttcttgttctgaattagatgaattgaagtagtaatacagagacgagtgaaggtgagttttgagtttggatttgggttttgaaatacgagaccaagtgttgggtgatgtgagtgtgatctcttaataaagcgatggccaaacatagattctctctcttcgatgcttctatggtattctttaaatactctcaataaattaatattctattctattatccaatcaataaacaacttgcatattccttttcgtaaatttcctaaaatttcaactactacatataaaaaattaacaaaacaacatacactcacacatacatacctgtctagtttacaaaccaaatgcttattattctttaatgtaataaataatactaaatattcttacatttataaaatatataaagaatatataaacagtaattactcttttttttgctaagaaacagtaattactctttttttgggttaagaaacagcaattactcttaaattaattaattttaaaattgaacaaataaggaaaagaaaattgtatataaataaaaaattcctaaataaatgcaaataattcacaatcatacgaatacaatatttcttgaattagacataatatgattattgattaatgaaataatttataaaataaatttgtaaaataattaataagataactattacattaaatgatgataaaaattgaatttaataataacttactataatcttctcaaaaaaaaaataaataatatcttactaatcggaaaaggtaatagcatatatgatgagctgaaatattaaaaagctaattagtaattttttttctgaattttgacatataccaaatcatgtccctgaattttcttggtcgttaaaaattcccttgaactattgagattgttaaatttaaggaattttgtctaatttcatttaattttactgtttcaagtactaaatcatgc

SEQ ID NO: 162725 - DNA, 2172 bp, Cannabis sativa
tttttttttttttttttagtttccatatgatatttttatagaattttgtaaaattgtaatgtctttagtttccatatgatatccacacattcttctttcctcatcttttcctttttttttttcttatttttttttttttttattttttgtagggacaagaacccaatcctttaaacctctctatttgaacaactcatgaaaagtcaattcaagaaatggccaaaaatcataatcatgaaaagaaccaattaccaccaactcaatcataatcatttggtataaatgtaagtgccgccggcctaatgagatagagcatcattattttggtacggaggagagcactgaaagagattacaattttaacaaaacaatacaaggaacacaattgccatacaatataaacacgaacccaacaggtggcttattatgacattttgatatagttgcttcatcaaaatttaaactctattagtagaattgacaatcatattaaaatttaaactcaagatagtcattaaaaatatgagaatgtgttattttcttgtgcatgcaaaaataagattaaaaacaaaatcacatgtaaactgttttaattcttctttaaattaatattaaataattgcatgtgccaaagaaataataataggcaactatattctcaaagctaaagaatataaattgttcaaattcatgaagatcatcttccataatttctctgaatattcctaaagtcttccatttatcataatgtctacaacattaaatatcaaatagagagtcaacaatctaaatcttccaaaaaaactcaatggacaataagtattagaagctatatgacatggttttttgtttgtaacactagaatataataatttagcctcatcttcatcatgatcaacactgccaccattaatggcaaacttgatctcattcatgttcttggagcagatattgcaccatccaccattttcattaaagcctagtttggtctccgactcatctctactcttaccctcctcgccttcggatggagtagagtgtagatcaatggacggctgtgattcaatcctgattgggagaagggtaacaaagagaaaagtgatgatgaaaacttgagctagtgtgtttgatgccatttttgcaaagggaattgataacacagagaaaggggaaaaataattgggttctaaattttgtaaatgtgaattatatttataattaagtacattttataagcccttatgaattatatgtacgattcgagttagcttccgactcaagctaatttgccttggtgggtacggtctttgacttctatagaatatgatgaatcagaggttaattaaatacttattatttgttttaactataataagtagttagtgagaaatggaatataataactatatataaacgaataattttttttagtcagccttaattgatataggtcaccggcccctaaattaatgcaagtactctctatcttgacttcttaaaaatgtcctaagttttctcactctttttttccactcttaatttagtatcctttacaaaaataagtataaaaaagttaaaatgggaggtttatatatgtcctaaaatattaaattttaggaaaatagaaaacaaatagtatattatatatatatactaagtaataattgcacatgtaatcaaaaaaaaaaaagtaataaatacacatatactacttaattatattcttagtttagtttattttgattatgtatattttttaaacaaaaactaaaaagattttttttaagtaattacaataagtaacaaaatcacaaatcatacactttctctattttattgttttaaaaaatatatattaaaagatagatagtttttaaataagtgcaatgaatttacaaaaaaaattacataagtaaaaaaataataaaaaaaaaaaaaaatctttatatatttatatattaaaaatggttatctaatagtaattcttggttttaacagtatattctctttttattttgttaaatttaactgcactttaactctaacgtttagtttataaaattatatacattctaaaatataaattaaacccttcaaaaccctaactctttcaagccatgaactacccaacaaaactactcttccaagccgtcgagtaggattatgtgctct

SEQ ID NO: 162726 - DNA, 2419 bp, Cannabis sativa
ttttatatataaataaaatatagaaaaaagaaaatttcgaaaagggattttattttttttttctatttttcaataagaaatattttaaaattccatatttttctaacatttcacccgtaaatgagtttgttggaaatatttttgtaaataaaatttagtttaattatgtataaaaaaagcactcctaatatttagagacaatacaagaaaccggatctcgatctggtacgcaaactcgcttaaacaggaccatcggtaaggaaaagtgggccttatcccaaaatctggcgaaggaaacccgcgaactgacgagggcccaggagcccaggtcttacacaaccactcttcttctcttctcgactcgaggtctttaaaaatcaaaataaaccaataaataaacaaaataaagcaacggaataaaaataaaaataaaaagaaaaataggagaagaggaaggaagattattttagattagactagtggagaagaggtaaggtataaaggaaggtgacatagccgacgctaccaaacgaagcaaatgcgacagacacttgtgaactggttggggtgctgggacccccaaactcccattcctcctcacttcttcttcttcttctcctcttcctagtcctaaccattaccattttaccaatatcccatttttcccatttcacccaaaacaaatttcataaacctcgctgaggaggagaggacccatgtctatggctgcagccgctgccactgctggagccttcaaggccaccacccccaccaacgagagcagtgccagtggtaacagcgcagacaacccaacggagaggaacacctactggtgccacgagtgcgatatgagtgtctctctctctccctcctctgactccgaacaaccccttctctgcccacaatgcttcggtgactttctcgagctcatggattcttcctctccacccaatcattcctttccacccccctttccgtcccttctcgaagacaactacctccaccgcctaatccatcacctaaccactcgttcttcctcctcagaagacttcgatgaagatgagtcctcctctgacccatctgcgcctctcccagcctcgaaatcttccattgacgcaatacccaccattagagtcgacgaatctcttctcaacgatgaccctcttttgctatgcgccgtctgcaaggaccagttcgagcttggcattgaggccaagaagcttccctgtaagcatctctaccatcctgactgcattcttccctggctcgctcaccataattcctgccccgtttgtcggttccggttgccggcagagcaagccaatcgggactcttttggatcctcggaaggggttttgaggttagaggacttgatgacgggagatgaggactggtttgattacgctagtactttgaggtatattgctaggaggcatgatcttctgttttccgctggcaatggtggtagcggtggcgttcagggctcgttctcttcacacccgatttcggatgtggagacagagatcgagactgagatggaaacggtatccggctgtccaattgcgggtagagctcgtataaatggcgaagatggtggattgggtctaattggggaggtcagtgaggaagatgctgccctttctgaagatttgaggtttgtgctgtctatttccttacatttcttttctgttggactaagttttcgattcgttatagttgttttgaatgtaaaatgatatgttcctgagttttggtagtttcattgggcatattaaaacattagaaattcattatattttaagatttctgggctagctatagtgtagcaagacaaatcatttaatctaaatataaatggtaaagttggcgttctttaattttttcgttctcatttcaatgatccacccatataatgttgaaacttagaataagattcacaacaatcttaaagaccaaaaagagagttgatgctggatttagttttagtggagctagacaattgataaagtttgacttgttcgccaaaagtgcctttaatattcagatctattaagttgctagtgcttatgtcataatattattttgaatatgaaatttagatagttatgatctactaacctattgtttatatgcaagtgacctacagatatttgttactttccatgctttttttagttttgtgccttaattgtctttgtcaaactacttgaaattgggttttggaatcttgtttaatgtctcagttaggattattaaagaatagggtgaattagatcatggaaaagtcttcaagaaaaacatttataagactgtgctttatcaaagaaattgatgtttatttcatttcctaggaatttaggtggcgtttggttggaggtaatgaaatggaatggaattgaaaggaaacaatttttattcc

SEQ ID NO: 162727 - DNA, 2454 bp, Cannabis sativa
ggcggcggccacaacttcggctgggaagttaaggagggccttggcgccacgcatactgaaggcagctctgtcataagccatagcagcctcttcagccgtcttgaaggtgccaagccatacccgtgcgccttggcgcgtagagtcgcgaatttcggctgcgtatttgccccatgggcggcgccggactcctctgtagtgcttcttcatggttatgtttcggacaggtagggagtgatggttgccatttccgcccccagcgccggtcggcgttgtcgatggagtagctgttgctgtagtagggtgccttctgggcataaccgacgtcgtgctgagggacatggacgcctcgtttaggacttgatatatgaccatgtcttgggaatcgttctcattgaaagggagctctagcatcatggttttggcatgagcaatttgcttcactgtttctctcgttatttgtatgatggttgtatagtgtttggatttttgagtaatatttgtatttgtaagtttgacaataaaggaaagtagaggagaaagggccaacaccaacgtggtgttgaaatttgaatggtttaaatttgttgggggagaggaaggtgatgggaaattggcaactccagtaaaaaatggaggcaattttatttatttatttggagcaattgggttagttggtgggtaggaaataagattttccccttgatttatttaacatttacatcttcttttgtgttaacctacggggatatggtagggtcacagcactggcataatacatattatacattattatcaatttggaaaattattcaggctgaaaataaagttctttcaacaaaagtcatcaatttcgaaattcactaactcgtatttagattgctaagttagtttctacaattatatacatatttttttcttgtaatttttaaatcatcttgttttgttaagactttacagtttacacctatatattaatattttggtatgtggacattctaccaggtaaaataaattgtagagaattgagccatatataagaatatgggctactccacactcattgctaatttattttgacatagaaccccatgattctcaacatggtattagaaccatatcccttgcggttttcaagattgatgagcaaaaaatagtcatcatcttaagggagaatgttgtggacattgtctcattgccaattggttttgagatagaacgtcataattctcaacaatgatataccagagatttcatgtccctttccccaagaaaaagaaagaaatataaaacaatgcgacgctaattgagcctaaagagaggcaattttgtgtaaagagggcatgacacctatagtgagttgcattcaagagaaattgcaattattttgaggcatttaatttaaaagataaattatgaaagatatatacaaagagagaccattagaatccaagatgtaaaaaggtctggctatcattacacgaagaatggccacctcatgtggagaaagtactaagattttgggatagtttttccctaaatgccacatatcataccccatttgtacgaagcactaaaatgaataaataatctaatatatatacacatatgtataacaaaaataaaaaatgaactactacttatcacctgtttctttttgtttttctcttttgtttttcttttttgaaaaatcgcaatttcattaatagggaaacatatataccaacaataacatcacacattattcaacattattatctttttatctagtcctaaagctctctttcaaccaacttatgccaattcattagcatttctttgtaaatataagagacgacaaaaaatgaagataaagagttgctcatatcttggattaattacttcgaatataggagacaaagactctatccacaactactttagaatgagactcaacatgctcaattagcaactcaaattatggcaatagactaatgctagaaagatgaattaaagtttccatcaaatagcacactacacactacaactattttcccagctccatacccactcaacttttattgtgctttgtattaatagttgcaccaatgttgagcttaaggcatctcctacactactacaatgtgagcccttgatcagctagtatatctctactctgacaatattaacaatgttgtggcccgagtgtatctatacgaacatgagggtctaatcaaagttcactacaaagactacgatgattcacatgctcgggttctgatttaaaaaatactgcaagaggatgctgaaatcccaatcgcaattgacgggtgcagatatgttaaggaagtagcaattccttccttgtcctaaatacctaattacaacacccaaggtaacttttattattaattaattattaatgtaaagtcattttttggcaagttagttgataaaatatttttcttttatggtaag

SEQ ID NO: 162728 - DNA, 3724 bp, Cannabis sativa
caacaacaacaaacaacaaggcaacaggtccaaagaggcagttccccacaacaccaacggccccaccacctacatctaaactccacgagagaaggcactacatgaggcccaagcttgagattgttaagcccactttccatgttagatcagtctttgcttcttcccctgataagaaccagagcatttcaccctctaaaccaggaagtgggctgggctttcactcaagcccattgggcactccctcaactattttcaaaaacttgtcaataggagaagagaaaaaagaggaggaatcagttacgttgaacagccaagaggaagagaaagccataaaagaaagaagattttacttgcacccttctcccaggagtcaaccaggttattctgaaccagaattgctcactttgtttcctttgagttctccaactacaagtagcaaaaacacataatttttattgtggaaagaaagccaatacagaattccaaaactatacaaaaaagagcattttatcatagtattattgtaattggccttcttctgattgattaatgtgctcggcggctttgtccactgattggagcccaaagaattgtctttgaagagggattaattcaaaagcaaactctcccaaaactatgttatttcttcaaccatcactcaattataatttgtatttgatacaaagatgttgatatcactatcctttctttacagaaataaattaagaatgcagtcatcatctgctaattatactctcattctataatgtataacataaaatcaagtttaaagatggtaactaaacactcataatatatacaatcttaaataattttatctctacagcattatcatcccagaaaatctatatggcccaggaacgagaaaatcaagttgacggatattggggttactgagcatttgcatcattagtattttaatttaatcattcatctgtcatgttgacggattccttatagcattaaaagtaattaatattgtgtctctgacaaaggacactacaacactaattgaaaaatgatagttaaaaaaacaactatttttctactgaaagttgtccaatatcttttagttgactagcccaagatgtccactgattcaatctagtgtaaatactaaatatcttccgacttcgaaatgaaatgaattatataatttaagtgtaaatatctttcaacttcaaagtgaaaaatgttgagagcatatgtaaattgagaggttctcaaaacaaatagaataaagagaataataccaaagttgaatattcaattataccataatcaagaaaattattcagccaactaattcctcttgctttccaacacaactgcacaaagattagaaaagggtgttagcaagttccgccaatctatacacgggctcgtttatcaatcattagccctcgtgctttccattcatcccactactatgttctccaccgccacaccatcgccattgcaagcacggcatgcaacagcagcaggatcctgaacacttagaacacgagcatttcggacattttggtctcctgcagcaacacgaacatttcagacatttcggtctgaagcagcaactgtatccacagttgggtctaaaacacgcaggacatttgggccaccagcagcatgtgctgcatttaggaattgaacatttgggaaatttgggttgacagcatttgatttcgcagcatatacttgaggtagagacagaggtagagctagatctcttgtgcaattttagtgtttgtcgtatctttttcagacgaatctctgtggtgatgttttccatttcttggatgaacttgcaaagatgtcgtatataatcagggtagagctccaaattgcagtgtccacctccttttatccatagtggatcatatggatcctttgccattttccacagtccatcaccgtgcaaccaattcacaacgtcatcttctgtaccctgaaaaagatttttgaagacaatatcagtctcaataaaattgattctacaaattgtatcttaagtctctagcaattactcaaggaaaaattttttctctcaaacaagctctaatcatgaacaaaaatcactactttgtgttaacaattgtgcttcgaacaacgattaagagaagtagattctgtctggacctaaaccaaataacaagagagaagccctcacatgtaagactcatatactgaacaagccacttccaatagcttatattgtaatgcttgctttggcaagttacacccaaacagcttgagttccaaagcggaaaattattcatccagtgcggaattctgtaacaataggttggcccaagattcataaaaaagccagcaggtaccagaaatatatgttcacaatccctctatgcaagtaaattaagcaaactgtgcaagagctgttctggttcctgggccatatagtagagtacgagtcagcttccagataaagaggtcctggaacgtcctctatttgcaagggccacgtctgctttccggggaatggataaagatgccacatagacatgggcatgttcaatcctgcaacctcactaacctaaacatgagctgatttttttaaagccctcaagtgatattagcatatacggtagttagctggtagatggacactcgtactagacaaagaaaggaattgagttaacagttccagcaaattttcaggaatataactggctctatctaccaattaacaaagaaattgaatatatacacactaaaagcaaatttgggtgtttcagtattatacctaggacagcattcggtttgccagtgtttagtattattccaaagagggcatttggttagctagaatgaaattacaataataacaagaatgggaatgaaattaaaatgataatcggaataatttataatatattattattagattttagttttaattttggttttctaaatggtcctagagtgcaatggttgcaatcctcgtacgtatacgtttatgaggaggagaggtaggtggagtggctttcccgaccacttacttggtggcgcaatgagtgtagcctatccttaagtaatttacaggtgttctattggcgggggcagaagtcacaactctcagttttgaagtttttttttttctgttattaagattttattgtctagttcttatctctgcatgtctttaggatagataatgaacttttatacatgaaaaaaaatcttccactagttgtgtaactttattacctttgttattttaacatgtattggtttccttaaaagaaaaaaagaatagtatgtttggaattggaaagaataaaaaagaaatctaaaggattccattttctctccatgtttggattgaatgaataaattaagaattctatttttagaaaaataaaaacttgagaatagtataattttattgaatttaaatcaataaaaatatatatataaagcaaatagaatggaatgtatacagagaaatattcctactctactttaagattttcttttttagtttaggtgtggtttaaaaggttatgttatttaattaaaaagattgccattcatgtaacaagatcatagttcatatactatccgttaatagaaacaaaaaataaaaatttaagtgccgttttctaacacttttgtattctaattttataatcacaaaatgaaaataaaatttttgtttttaaaaattttatttttgaaaaacaaa

SEQ ID NO: 162729 - DNA, 1846 bp, Cannabis sativa
atatatatatatacctagctataggctctcacatgtcatcatatgcctttgtttgttccacatttcctccattggatgcatcaatttattttaaagggtcactcattcatggccattatcgttacttaaagttgacaattatggggtcaacataataaactaataataataataatataattatttgtttttaatattaatcattctttcaaattgatggccagtactggccaggaaatggccgttgacattgttatgcattattgagttagaggccacacattggtataccattagtggatcaattacatatgtttttgggttgaccacaattattttttcttcaaaaggaaaaaacaaaatgaagtggtgaattataggataagtgagaaaataatgtttttgggttgagttcctttgtataaattatcctgaatagaagatcaaatacttttttaataatcacaaaagaaataggttttgtcgtttctctattgtgggttttttcactttaagttatatattgtattagtattgtaaagctaataagacattgacaattgctattttgagaatattttgataactatgaaggttctagtaattcattaacttttttaaaaaactaatatagatacataaatggattaataaataattatgatagttagttagcatccctcagttctcatctatgaaatcattggcttcccgtctaaatggttggatacattatcttatctatataaatatatttatataaaaggtagttaaactctatagctaataaggttgttgtaatagaacggtttcttatagttggcattgtgtgtgtggcacaactacatcctcataaaaatttaggctaaatccagctcatttagcatagtgctagccactatttttgcaacttataatatttgacatttttatggtcaactaaattaaacaactcaaagataatcatggatactacccaattcttccatagttcaaatgaatattgaatctcatatttgaatttaaaataaactaaaaataaaatatgtaaagcctgctacgataatttgtacaaatgattatacaccacgtcttagggtgtaagagccttataataatattttatggataaatccacatttatatttgcgcaaatttttttggcacgataaaaaaccaacacaagcaaaactcgacatgacacaaaatatatgagcttaaaattcttttatagtgcaaataaatatcaagtctcaaaattttaaatttaaaataaattaaaattaaaatatgtaggacttgatatgataaattccacaaatgatgatataccatgtcttagagtgacaatgctatatagataaaccacacttaccgtgctgaattttttggcacgacacgaacctaacacgagcaaaacatgacatgacacaaaaaaattacattgagtttgacacgatatgaaaaaaaatataagtttcactactacaaaattaactttttctaacgatcaacacggcagtcaaagccaagaactgtcaaaaaaaattagcggggagctttaccattggttttacacagatacatgctagcagtagtttataacaactgcaaaagatgtttacatcagttataaattggcactaaccaacactaaaatatatatattttttttaagtatatatatgttaatgtaatggaccaagtgttggttttacggtactaaatcagatacgcatcaaaagagttatttctaattatcattgtaccatatgtcctaaattgtgacagtcagtagtcccgtgatccataagggaaaatgtcgggtaagctgtacaatcccaca

SEQ ID NO: 162730 - DNA, 1435 bp, Cannabis sativa
aaaaaaaaaaaaaactaacaacttgttaaagtttatgtcctgaaaaatctataaagatatttttatttatgaacaaaacttgaacattttcatatatcactacaagaaaggagattttttttctcattttttaagtaacaaaaataaaaatcggataaaagatatattaagacattttatcccactattttaaatttagcgggtcaaatatgcaactaaatttttttagacaagggccctatttggtagaacgttaaaaaaaatattaaaggtaaaaaaatgagttgaagactcaatttttacggattagccaaacagggatcaaggattttattaaaactttttatatcctagttattagtttagaaatgggataaaagggtttttgtgtgaaacccttttatccaagtttttaactaattataatcgagataaaaggtgaataaaaactcttttctcattcgcgattatcatatcatttttatttttaactcttttatcttttaatattttatttgtaaactctccattagaggaaaaatggtaactagtatgacgtctatgtactataaatactcaacaaactctacatgcaaaaggttagaaattcttgcggctcacttgcgtgtgtgaaaatagatttctcataccttattgttaccacttaggcttttctagcatctcataataatattaactcgtggactaaagctcattaatgcaccaaccacgtaattattaaaaccttgagtattcttataatatttatttttgaattatatttctttggctattgcatttaaataattagtttcccaaaaattcgataaaaaactataccatgtgttttaggtgtccattctaaattgacaactgtaatttgtcaatagtgttttgtagaaaatttacccttttaacctacacacaacagaaacaaatcaatcattactcaaggtcaaaactgactttcttcctaagtcaaacctcagttgactcgtattaaacgacaactatcaatcccagtcgacaagttgttttacaataaccctaatttaccttagaacactctagaaccaaaacattaacacacacacgattcacaaattgaaaccctagcagagcttcgagtttcttctcaagaaactcgaagactgctgacaacgaagaaaatctgacaatctcttccttgatcaaaatcaaaccccaaatccatacacaaatagataacaataatagtaagagcaaaagaaaaatagaaagagtgcaccaaaattttataaaggttccccaaatgtagcttggtacatcctctttgagctcgcccaagaaaagctcgttatgacagttagtagtcccgtgatccgtaaggggaaacaccgagtaagctgtgcaatcccacatcgcctggggaaaggtcaagtgtgatgattctgag

SEQ ID NO: 162731 - DNA, 2391 bp, Cannabis sativa
atatattgatgatattgatattttatttataaatatctattatctatttgtttatttcatattctttgcttatcaccaaattaacaaacacgcaatcaagaataataccatagaatcacaagaaccagataatgaattaagacagtaaatcaaggagaagataacaccatgatttaatgaattcgagccatgtacaatgctctacatctcggttggaacagcatcagtcatatctttattgatatttgttttacaagttacaagatattttaaagtatgaccttagttttcttgaggccaataccaagcagtaagccaacttctcaatagggatatatctaggcttgaacccactgagacaattgcttacttagtacaccaaatgttgtatcccttcctcctcacgcatgagagcagcattggttgcatgtttaatgatagccaaatagatgaatatataatttttcgccatctattaatttggataggataggaggtctggctaggtgatgtttgagagcttggaaagcctacttgcattcatcagtccattcacacctcgtgttgcttccttttagtagattaaataagggaacacacttgtaggtggacttagagatgaatctgctaagtgcagcaattcatccggtaaggctttgcacgtcttttacctgtgatcttgcaattccttgatcttttctgtattcgattcaatccctcttgagttgacaatgattccaagaaactttcctgattggatgccaaatgcacatttaagagggttaagtttcattcgatactctcctaagatgttgaagcaatcctttaagggccagtttggcacaacttttgaaaaagctaaaagctgttttttaaaaaaatatgtaatgaaaaggtatttggtaagtaattaaaaaataacttattgaaaaatttatgaaaaaactgaagctaaaagttgaagctggtagaacccaacttttagagaaagttgttttgattaaaagactctataataaataattttgtactaaaaatgcatttaattattgattatatattacaaaaaataaaaatactttttcaaaggaaaaaatatttaaaataaataatatttaaattttttattttttattttgttttaaaaaatattttatattttatattttatttttattattaacaaactacatcaacttatgtatttttttacaagtaataaaaatattataaattattttttaaaaattcatataaatttatactatagggaaaaataattaaaaatatatcaaaaataaaaattttattattattattttttttcataaattttattagctcaaaacactttgattacaccctgatagcaccccaaatagggcctaaaataatcaactatacaacttaatactttgtacaattcatgtcactctccctatatcaacctattgacaatgtttacaaagtataaaaccaatccctatcttcctctctaatcttctttggccaaaacaactcaattctttgtgtaacaccagctttgagtcccctgaccactttgcaaagatcatgctgctccttgctccaaaagcatgtgctcctcatcttttaaatgttgtaaaccagactagccaatgttgttgctatcactattttcctgaatttgcttaatttggctctcccaatccacctgattagattaggaagagtgatgctgatagtattctaattcaaccaagctttagtctcctacagacattgtctggtaattgaacattcaaaaaacaagcaatctgttgtttcattatgagagctgcagaataaacatttatgttcctctgtaattctcatcttaatcaacctatctctagttttgagcttctgctggactgctaaccaaagccaaaagctgtattttggtgtgtttagcctgctccaaacttgtttacaccaatgtgtctttattcgagctagacacaatagattgtatccctgtgataacactgtatttttgttgcaatatcatgtgtccattcattgcttctttgaattgtttcttgagcctgactaattagcttctccagtaccaactgcactggtttgttgctttattgttttttaaaactttaaataaacacacttttaaaatttatatacattaatatgtattattttgatattatatttcaataaaaaataattaaattgtaattaatcaaaataaaataaataataaacattttttttaataattaattatgaactttttgtttctaaaaaataaaattgtttaatatttatttatttaaattccacttctattgtttattttatgtttttataaacattttatattattaaatatttctaaactactgttataataaa

SEQ ID NO: 162732 - DNA, 1849 bp, Cannabis sativa
aataataataataataatttaagacattaaaatagttgaccaccaaaaacttgtttaaagcaaaattgattgagatttaggttccaaacaaaaaaaaaataatgaaaataaaaacaaaaaattcagatcgatcaaattcgaaaattaagattttttaaaatttttgcaaacccacaaaagaattatgttctttttcatctaactttcaattgaacactttgtcattatgatttttagtttataaggagaaaaaaacaagaacaatcactaataattaattttagtttcttttttaatttttggtttagcttcagctatttcaaaaaaaaaatgtctttttttttgtttaagaagtccaattctttattgtaatattcaatatgaatgactagtgttaattatatgattaatatattaattaataatacagtattgacaatttacaagaggtgagattgagataaatttactactactaacattgtatcttttcgaactcgagactcttcgttttccactttctctctccatgcaaacgaacaaggctgtgaacctcgaaccagtgttttcacaccactcccaaaaccgtttccacattgtgaaaccaatgatcaagcccagatctagcgatctcagtggctccagctcctcctcaaacgagacccaatgtagttcgactctcccaagacgacccagaagcacggcgcgaagtcgacccacccactcctgtctcgtcagcatttactccgacgattcttcaagatttccgtccagtacgagcattaatggcgatctcttcagatctcccacaggtattcaaattttttcctccttttctctgctcagtgtcaaatcgcttctgcaaaaccgagtgcagaggtgtaagtttcgtttcaaatatggtatacccattaaattataccctcaccaaacccattacactacgtttaggagtaatggcaattctatttattctctgataaatagtgagtatactgcttgtatcaaaaggaatttctttgtttcatttattaagttttgtactggaactactctgcctgatacaaagagtcgggtccttttgcaggaaactctttccccattaaatgctttgatccttgttagtttcacatcacatagggactgtctatttaagaaccgaagtgttcctagcacatgcatccttgatttagccatatatagtcttacaactatattaggaaccctgctctgcatctgttccctctcgacacaatcctttttaggcattattctccacactttatgttcttatcacacacattctcctctatccctgtcgactttccttatataccacctgtctgcctctctagatttttttcccatctgtgttatatacgttctttcttctttctgcacgcacagactcaatactatggatgacctaaccaattctctttccattgctctcaatctcacagagaccgaaagtaccattcaaactctgcatgaaccaaccctaccaaatacagccgaccctgagttcaaccaaacccccatttatctggttgctaaagtccttgcggttaagtcttttaaccgaaagaatttcattgaaaaaacgacaaacaattggaaccacatatcccgttcccccgtcactattacagaacgctcaaatggcctttttctcattgagtttggttgtgatggagatagacgccgggttttgcttcagcaaccttggacttatctcaaccaagctatcctcatggacatccctacctctgtggacgtcctaaatggggatagtttgctcaaaatcccactttgggtgcaagtcttcaataccccgttccttaaacga

SEQ ID NO: 162733 - DNA, 1046 bp, Cannabis sativa
  modified_base (1001)..(1021): a, c, t, g, unknown or other
aagcgtcatctttcatttgaagcctccatgtacaaaatggtttgaatcatcaaggccactattctgtaaaatcacaatggagacctttaactccatccattgatatatctcttcgaaagtttcatagatattcgtttggtgggtcctcagatgggtctggtagtgttgcacatgctcaggagaagtcgtctgtttctgccccagtctcaaatacagtgcctcattatccttcagctgcaactaaaccttctccagtttctactgctcctcacctggcttcttcagcggcactattttagggggagtctgacaaagacgaggtgtcatttgctcatgttcaatgaagggcgagatatatatcctcaagttttttttttttggtgtggttatggattgttatgtttcgtttggcaaagacaatttatgtttctatagtttcattttgttggatatcttttgagtctttgcttttattttgattagaaactatgatatgtttttttgtggtcattgaacttaatttgtcaagggggagactataaggtccatgttttttaaagatgatatccaaagtgattcaagtcttatttgtcatgtttgcttgtcataactagacatgaatattctgttagtgtccacgtcaatctgttaagtgttaacagttgtaatgaaaatgatgttaggtcttgtcaggactgtatgtctatatatagttggttctgttaagagatttaactaacttgttaattgtattcttggatagttctgtagtgttgagtagtatcaagtgtgctatcctgtattattccttgttttacaggtttgattgaatatcttggaggcattcatccataccagaaagatcagagcctgattgagctgagttcagactgaagaaatttcaatttcatcttcatcatcagatatgaagagatttcagattgaagcaaagtgttgaagaggaactctacttgtgttcgaatttattttaccaggatctnnnnnnnnnnnnnnnnnnnnnttattaacatcctaaataagaactt

SEQ ID NO: 162734 - DNA, 1047 bp, Cannabis sativa
  modified_base (1020)..(1021): a, c, t, g, unknown or other
gcacaaaacccaacacatatatcgcattgccattgcctcataagacaatcgacaatcaagaaacttgcaatgccatgtagtacattacttttcatacttttattctagattcatgcatgttggctgttgtccaaatttttgcaggcatgaaacgtgtaatataactatggaagctaagataatcattagcttgtcaatgcctttggccctagctccagtgaggagcttccaaaaaggatacatccatcgcaaggtaggaacacatggagcatcagcgcgtatgacatctctaagtctcgggagtagaagccaagcgccctgtggtggctaggggcttcttggggtatgtctaggtagattgtggaaggattagaatgagttgtatccctgtaaaatgttgtgggagagctttgtccgtacctattagattacagaagtgatggtcatgctttttctaatacgacaccaggtttttccccccacgtctggccatagtacaaggcatgcgcaccatcgtacctacccattgtccagaaaccattttcaagggaaatctaaaaggaaaggtctttgagtgaaacttatggaatctctcaacagtatgggttgtcatctcagatcaccgtacgatggagcggccacctactagatcaacagtaagatctcttctagcaagactagcccagaaagcacgtgaatgatgagattgcctatacatacccttgtatttcataagataaaggacgactctgggaagtgtaatgaacaaatttttacttactaaaactctactgaaattcatagagagcttctttttcttcaagaggaacgagatgaatatagagttcaagtccgtaatgtaaacatttgtaatattcattacttgtcgataagtccaataaaatgtgctcgtggacaaaggatagttaaaacctgaaccgcgtaaaaagctctatgtttattattgattattttatttctttcttaagctctaattaatctgtaaagcccgcttagttnntttggaaattagcagttatttatgtt

SEQ ID NO: 162735 - DNA, 1552 bp, Cannabis sativa
tggttgtgagcaattaaagctttcacgctagccccagaatttttcatgacatttgtctgcaaatatcactgcagtatcaaagcaagcaggttgaggaggttacctgcacttttcggaatatagaaaacttcaattagttgttccttcagactcactagaggtactttacaaactctggtttgttataataggttaattaatattcttgtccataaatctctctctttcctcctatttctttcttgtaaatataacaattgcagagtttttagttttgttatcttgcaaagaatatgattttggacaatatttcaaaagatgaattgttcttttcgtctcacgctaaatgttttaattgttcattgatagatgtaactgagatgaaaaagttgtggccttgcttaattttcagtttatttattgttaagataacactatgttgaaatgaagagtaaaactagcttgtgtacatttgataatagtgtgctgtttgaatactgtaggattctcgtttctattcatccatgggtgatagaataattgatttgtatggattgttgtcctaattactgtggaatctataccaggcaaattgtgatagcttcaatcccttaaattttaatcatgatttagccttatatagaagacagaagacggttatcagtttattttgcttgaacttaagattgaaattttaatctttggcgtaataattgtgaaagttgggagggggaatgattttgtggtggtgtcatgtttttcttttttttttttgttttgttttgtagcacatttgcttacatttggtatgattgtattataggcggcatggctggaagaatgggttgaatataatgtcatacttcccattcgcttaccatgttagcaatgagaaagaaacctatactggtgtggtggctgttaaaaaattatagaggaacatttgctgtagagtaatattctttgaaaatcatcccacaggtacacaatttctaacaagccccttcaccttgcaggtgagttgagttgagtttagtttatgagtccttttgtgtgcgtcaaagatttaactcactaacttattatatctgtaaataaaaaagaaaaagaaagaaacttgttatatcaccctgtttgttattgctattcttttattttttttgttagattttgtaaatagtgaaactaaatagtacttttggaatcgttgagatatgggtgtggtgtggtggcttgcagagttgtattatgtctcgtttaaaggtccaatcaatgattgtattagttagttgcgaatttcttttattatttttttgagaaaggtcttatttatttataaaaaaagtaaatacgacataaaaagtaatcgaggtaacaaaatatagcctttgtcattttcagtacgtcgccatttttaagagcgggcttcgaaggtctctgtctctccactctttacacttctcatttacccatatttttatttagattattttttaatgtgcaacttttaaaagataattataattaaatattaattctttttttttttttt

SEQ ID NO: 162736 - DNA, 3058 bp, Cannabis sativa
tttttcctaaggtgagaaacattgcccaacatcaaagatgatagatgctactgaaaacactcgcactttacatccataaagctaaagttcaacaaaaatgaaaatatgaaactaaaccataagcatgcagatacatacaggcaatttcatgtaaaaatgaatggcattacagatagatcacttattaattttgcagtatttgtagtccctctctctggctttttattttatattttttcacctgctggtcgaaaacaaatcaatctaagacaccatctaggctgaacaattattcctatgaactattgttggtcaaccagagcgtatttatgggggtttaccaatgcaggaaggaaatagaattcaccaagttatcatcagcggacagccaggagatctttctgtggagttccttgtgatattacagagatcttttccttctcattggcaacaggctgcttctgtgtggacgaaaatgataattcctgctttgcttgaatttcggtatgtccccctggatatgacctgccacttccacgtacaagatctttaatggttgttatcagttcatcatccttgatcaaagattccaaggtcacatgaacgcctgagttaagaaaaagtgtcgttgaaatcagtatgttggttaaaaccaaaattgtctacaattgaaccagactatacatacggaatctccaataatgcttaggatttgtagggtcattgatagtttcctctgctgcaggacgtgttgtgtatttctccttcaaggccaacaaatcctgaatgtacagaggcgcaaagttaacatgtcaaaatgttaaacaatatatgacgaaagaatatcaatgtgttcaatcaaccaaaatccaaatacctgaagcgggaaaatggcccacattgatggagcatcaacatgttgctttatgatgaaatgtgcaatttctggaacgcatcgatctggtggcaacatgtcagagctaacaacagttttaaaatatcttcgtcgtctttcttcatcttcctcccaccaagcccgcatggtcgagcagtcatggcaagatggagcacacacctacaatgttgacactcaagaaagtaagatggagaagcatctctgccatatgctgaaaaaataaacagaggaagaaaaaaggtatttactgtcatgtagtcgtattgagaaggaataccaaactccaaatcaggttcattgggcatgcgttggatgcgtaaacctattaaccctagttcttgcataacctgaatcatgattgatcaattaaagcctaacattgacataggtctaaaactcagaagtgaaaagggagggagattaaataataaggcatggagacttgaaactttcatttgaaatgagagattgaatgagcgtacaggatgaacacaagaaggaattagacccagatcttccccgcaggcaagcatatctgatgagttcaggagagctggcaaagtcttcagagcattctggcgccaaagattttcttgtcgatggaaatagtagtcatagtacaattttttcagaacatttttgctgttcacgacaaaaaagagtttccatgttgatactaaattacggtctcaagaaaaaagaatcatttatatactgtaaaacaacagattattttcacatgcattcaagaaatttaaaaataaagtcttaataactattaagagaaattcattcagatcgaaaaactattaaaacacctgtgctcatccaaatcctgaaaacttgaagtatcttccagattgaagcgaggataaaatttccctggatcctctggatctctaataagaacaacattctgaaaaaaacagcaacaccgaaaaacaaacttaatacatacgagtcttaagaacaaggatggtagtggaaaatatgacaaatgcataaaaaaatttactgtacccgtagaagatcaaagagatcaatccgtgtcttattctcattctctaatagagacttgtcagaaagtgacctcagcttggaggcaatctttttctctgtgttactgtcgtccttaaactaaaaagccatgaaagaaactacataagagaaaaaacccatgtcctgtttcacaacttattatggcagaaagatgtcaaaataagcaaaaacgcatgcttaaagcaaaacatttcataatcgtctacgatccagggccctttggtattttttttttatggaacgggccctttgcatttgacattttagaaaaaaaaatacagtatggtgttacacattacttattcagaagaaataaaagaaattaaattgaagttacttattgtgactagtgcggctagcggttggggagggaattgtataaatagaaagacttagtaggggaaaggttgtctagcaaattatattgtctaggtcattcttggagaggaccaaagcctatcgaattctttgaagtttgtaaattcagtaaaaggtttcaagaactcattcagaaatcctctaactactctgatagagtcaaaaaaaaactcaatcaattggtatcaagagctaggtctctgtagcagcaagattagattcagttggatgcaagaggtgtgggaaactataatgtaggaaaattttatatttactagggaaatattattgtatagctgccacatcactattctaggaaagaagttataggcataatctcattgtatatttattttgttcccttatatagggactcatgtaagctatatacactgttttgtgtatagactaaaatatcaaagaaaatacttttaccctaatctacttggtatcaaagccagccacctcctaaccctaaccctaagttttcttctccttcttcaccatgtgtgacgcctcaaatgaatcaacaaaccttccagccaaatccacctgattcctagggcaattgttcccatcccctcgttccttctgttggcccattggggtcgatgccagtacctgaaaagtcgtcggagtagcggtcggtgccggaaaagtcgtcggagttgctgccagcgccagaaaattcgtcggaattggcat

SEQ ID NO: 162737 - DNA, 3537 bp, Cannabis sativa
gggcataaaacccaacacttaccccctttgtttaatcagccaacaacaccacaatcaaccataaatatgtctgtgcctccttctacaatcaaccccatacttactggaagtcgaacaccactatcacaaaccagcaactcctaatctatcacaaaccagcctcaaacttgacacatagtaagccttcctactgctacttttcacccatcgtccacacagacttttacacaacaacctaactttaatatatcttcaccacatcctgcagccaatctcaccacccttacaagccgtgaccattctattgtggatgacaataatccccaatcagtcacaatgttgcctggcatttttacacctgatattggtgctgccactcgacccttcatccctgtggcaacatatccaccatccttgacaccattttcaccaaaacctacatacacttccattgaacacgctgctgtcactactacaatggttgccctttctattgttgctgctgcaagtaacaaagagaatatcccaccagtgcttgtcaccgaaagacactgtgacgtgctcacaatgaggcaatttctcaaaagatgtcgcaaccaagctacttccactccctcttcactgtccttgggagaaagctcaagtcaaaatgtttcctatgttgatatcgattcggatggctttattgatgatttcgcgaagattgctttgcaatccctcgattcattatgaaaatcttgagttggaatgcgcagggattggggaacccatctgcattcaggcatcgtcgattgcttctaaaacaacaatcgccccaaattttatttctcatggaaacaaaacttcctcaaaactctatttcacgttttcgacaatccttaaatttcgataatggtttggaatcaccacgagctggtcttagtggtggttggtgctcctttggcaacaaaatattgatgttactcttctgaactttggtagaaccttttttgattgtcatgttaaggctgagaatgaagctactttccacttcacagctttctatggtgctccggatactcaaaacaaagctgattcttggcttcttttgcaaagactggctgatgtttccccttctctaccatggttgactattggtgactttaatgaaattctctccaacagtaataagtcgggtggctgcctcaagaatgaaagaaaaaaggaagcttttcgaaagtcattagactattgtaagttgcatgaaacttcttttgaaggtgacccatatacatggattaaaaactgttcgcgaattaacacggtcaaagagcggttagattggtgttttgtgaaccacctttgggagagcttttttaacacaccttcggttcaccatctagattatttttgctcagaccatagagccatttctgttgtcttcacaccagtaaacactcggcttcaacaggaaaaaagacgaagtcgatttcgctttgagaaattgtggctctttgatgcacaaaggaaagacattatctatgctagctggagcacttcttatgtccatgatcccatcacagtcgtgcttactaatttggatgaatgtgctaccaacttacaaaaatggcacgttgataaatatggtaacatgaagaaaaagatctcagatgcacaatcgcatgtggaaaggctaaataatgcacctcaatgcactgctgaaacaatgaacaccttgaaaaattctaaagcttttcttgatgatttgttagaacaagaagagatctattggcaacaatgctctagagttgattggttaaactcaagggatcgcaacacaaagttgttttatgccaaggcctcggcaagaaaaacaaacaacacaatcaaatttctgcataatgatgctggtatccgagtttcttcaaaatttgagatggcagcagtaatacaagactactttgcatccattttcacagcttcagaaatagatgaagatgcccttgttgtcactttaagtaccattccaacaacgataaccccgaagatgaatcatgagcttctcaaaccgtttgtagctgctgaagttgaattggctttgcactcaatggcaccagacaaaagtccaggtattgatggtatgcctccgatgttttaccaacaaaattgggctattgttggttctttagttaccacggctatcttaagtgttctaaatgaaggagctgattctgcatgtttaaacaagacactcattacactgattcccaagattaaaaaatctcaacggctacaagagtttcgccccatcagcctatgcaatgttatctccaagcttatcaccaaggtgcttgtgaatcgcttcaaacatgtccttccttatgttatttctgatacacaaagtgcctttttgccaaatcgcttaattactgataatattcttgtggcttttgagttggtacatgctatcaagaataaaactttaggccggaaaggtattgcatctttgaaattggatatgagtaaagcttttgaccgtgttgaatggagattcattgaggaactcatgaacaagatgggttttgctagtgaatggatcacccttattatgaactgcctacgcactaatagcttttcctttcttttgaatggtgaggtcacgggttcacttattccatcaagaggtctacgacaaggttgcccgctctcgccatatttgttctgagggcttatgaagactactccaacatgaagaaacaagtggtcatctaaatgggttcaaattgacacgccatgctccctccatttctcacttgttttttgtcaatgacagcctcctcttttgtcaagctaatgaatcgtcttgtcttgaaattaagagatgtttggatacttaccatagggcctcggggcaacttctcaacccagattagtctgttatgtctttctcgcctaacacaacgctagctgctcaggttttcttccaccaacagctatctatgccaatatgtgaatgccacgaacgatatctgggtttgacatcttactctgggagagataaaaagcaaatgtttagtgacatcaaggagaaaatctggcggcttatgcatacttggagtgaaaaaatcttttctgcgggtggccgcgaggtacttctcaaagcagtagtccagtctatccctacttatgttatgagctgcttccgtttacctgtttatttttgcaatcaacttgagtctatgatggccaatttctggtggggactaaatgagaatggcaacaaggttcattggtgctcttggaagcttttatgtaaaaggaaagatagtggtggtatggggtttcgttccttcatgcattttaaccaagcaatgcttgctaaacaggcttggaggcttctaaagcaacttgattcaatacttgcaaagcagttaaagagctgatatttcccaaacaactccttccttgaagctaatcttggtcactctccctccctaacttggcagggcatccatgttgggattttatgccctaaataaaacccatttcaatctaatc

SEQ ID NO: 162738 - DNA, 1873 bp, Cannabis sativa
aaatctcctcaaaatacaaccacctttaccttgcctcgattgtgttacacatcaaattcttctgtgtgtaaatgaaacgctttgagattttcatttttgtgactaatcatacacatgggctacacaaggattgatgaaggtgcagctacgttttataatgtgaaactaatactataattttggcttccaaaattttaatattggaaagtgaaaaagttacaccttggaatccaaactagtccctagttttgacttggactatagcactctaggatacatgcatatatgtttgttccaacctacctacctgtatatatatatttgacctatatataagagcaacattctcctttcttttacttttctctgcaaaaaaagacagcaaatataccccaaaaagaaggttgttttatatggctgctgttatgaacaacttctctactgccgtattactaatcgtgtttttctgtttttcttccttatgtctctcctctgcactaccactccttcaaggtacataactgccaaaactttgtctatatatttttatacatatatatatataaatgattaaattatacttctatcataagatgacatctatgaattttcttctttatgtcttacaagataatgagaatgctatttcagaacttaccaccatttccaagactgatcatgatccaaaggtaagattataatcttaattatatatataaatcaagcctctcaagctaataattatatgaattctgctttttcttattattattatgtcagggctttagtgcaagacgagtgggaggaagaaaagtttctttacacaaggtggtgagcctagcaaaggttattaaaccagaaaaacaaggtggctctgaccaagttgaaggaaaattaggcagcagcaagcaaaacataacaaatggggttcagaagttgaactccaagcaagctaatagtagtgttgctggtcattattctgccaagattaatgaggctgctggttttgttgccttcaacgccgactaccgcgcaccgagacaccatcctcccaagaataaccgatgaaagatcttactgataacaaagttatatttttctgtttaccttggcttacttttcttattttagtaccatcttatgctattgatggttatgtttattgtgttttgagtgtgtatactacttggaaaagatagtgagttgttgtactgttctaatataatataaattgtttgcttaacccacacagggaaatcaaaatcaaccctgctggtttaaatttttggtagttttgatcctttttaatcagttgtcaaagataagatttgagttggttggatttttcttttttactatgttcgttaagcattacaacatatatgtcttcagtttttgctgaatctgtcttggtatagactacggttggtttaattagttacatgaaaaataatagagaagaagaagaaagaagatgggaaatgttaagttttctgtgcacactgtagatacaattaacccgtggtccaataacaataactggacttataataatcacttcattttaatgcagcaatatacgagaaactttcttggcataccttcaattaatatattaagaactaatttaatatttgctaagagagcatttgatcttcaattaatatattaagaactaatttaatatttgctaagagagcatttgatcactttgtacgaacatgatccgctataagataataaagggtaattgacctgaaatttagttccattttggtattgactattatgttagtttggttagagaaatgctaaaacgtactagtaataatgtctagcaccctcctacgtatcaatatcgttattagttcaa

SEQ ID NO: 162739 - DNA, 3548 bp, Cannabis sativa
tcacatatgcaggattgacttgaatcactgccttaagaagtgtctttttaccagccttggagggtggtgtctcatgctattccagttgcttcctcccttttttgctagacatattattgactctccactttgtcctatttgtaaaaacaacctagaaacagttcatcatgctttgctagggtgttccagattgagaaaagcttggaaatcttcaaggtttgtggatcattattataaatataaacaccttgatatcagtgattttttattatgctcttttgatgatttggataaggattatgttaacattctgttttgttttttatggactctttggaatcaaaggaacaatcatcttcatcataacaatgttatcacatcttctgatatttttaattggtgtgttaactactttttagaatacatagatgcacaacacataaatcaacatactagtgcttcagttcatttgcaaaacagtgtctcagatgctttgcaggaggattctttacaggttttacattgatgttgctcttgatcatcatagcaagaagcatagctatggtattgttgttgtggatgatcttgatagagtgaaagttggcatagacaagccttgtgttggaagtgctcctactgtcatagctgaagtcaaggcaattcatcatgctgtacaatggattcaattgcttcatcttccagtggatgttctaaaaatagattgtaaaaccattgttgataaacttaattcttgtaattggaatgctagtccactagatgacatattaattagtattaaacacttgttatccttcagtcctaatcttaaggttgtgcatgtgtatagggattctaatcaattggctcataagattgccaaactaggattaggattagataatgagttggtttggaatggtcctttaccttccatgtaatttgtttgctttgtactttctttgcctattctaattaagcacaagttttctctctcaaaaaaaaaatattagtcacctatagttttaaaaattaaatctattaaaattgtccataaaaaacttctcaatttcaccctttcaatatctacctcaatcaacaatcataacgttaacagtcattactatagtaataattcattgactttaagtttattttctacaattataagaaaataaaattagtcaaattattataaataagtaacataataaaacagagaattatattcaatattcattaagaaaattatactaccaatcaagtaaatcataagcttgaacttcatccaaatatttcctcatttgaatccctcattattctacttcatccaattttgagtgcaatctagtgtctccaccatcttaagactatgttaactcgcttttagccaacgataatgagtcaattaaagcgatcagaagtaattaataataataaataggcaaagaacacaaaaattgttatataagttcgaccatgtgatggtagtaatagcatactcctctttttcttgtattgactagtgagaaaagaaccaaaaaattcttgatcttcctcgaaatctcttacaatggttttaacaacttaaatgctctatgaaatgaatgatttcagatccctaaatagtgaaatgactctactatttacaggaataattacattagtttggtttccaaaaataaataagaaataaataaggaaacttaattactttatcaaatcaagagaaataaaaaggaaaactagataggtttcctcatttcttctgtcgaaacggatttatctcacaaaatcaagatgtgatcgtgatttgcatgctagaatatttagggaaagtatccttagaagatattctagttgcatttactctggtcggtacatgcgagctgactgtgaaatggatgttggtcggacaacgtaacattccttgtccggatattcagcttcttcaaaccaattttttaattataaatcactctagacagtacatcatgaagcgaactacccgtccaggttacgaaatcctatccacgtgtcacccaaatggatgctacgtcactttgtgcaggaatcgggataatattttcccccaagtttgccgtggaacttcttgctcgcatgtgaacttattcaaacactaagctcatcggatgggtgacatgtgtttactctttgtaccattcttgatccgatgtgactaatattcaaatgtctcttcagtatatggggcatttaatgttgtcttgagatctggacctcggttgctgcactgacaattattgtatatgcatgttttcgtatgtacttcccaacatatgtgatgattatattttcttgggggaaacccaaaatttgaattttggattactatattacccctctatctgcctatataataggtcaaaaattattttaaactattttagccctttttactctcaaagaaaattagtgcaacccttattttctctttgaaaccttcgaagaattctctgactaaagctcgctcactagcatccatttaagcacatttacaaacttccaagccgtgagtaagttctctttcttcttttcatgcaacttctttaaatacatgtaccattattttaaactactctgcgaaatttggattcttgaaattgttctttgatgatttgagactagaaattttagggcttttgatttttgatgttaatacatgcccaggacatataggttttctaatttctagcttttcctcactgttttgctagaaaatatttaaaatgatccattcaaagcttttggagattcttcaacttcttcgtcattcattaaaccatcttattttgggaatttcattattggaaggaaatttcttcctttttttcttttaaatgggtctggtcggcatattagtgttgggttttgtgccctgtcctaactagaactctatttcaatgtaatcttgaatattcatttatcaataaagaaacagatttatttcattacttgtttaatgatttattatgttcacatatttatttcatgatcatttatttgatttataaattcatctaaatccttatcacattaatattcttgattactgtgttgtcaacacagtgaaaagtaatcaagattatgtaattaaatacattcttacaatttattagtacacaagatttccactgatatgataataaaaaatgtagtttacttgcaccttgaataagtggtatgttctttctaaggtattggtaaagtaagcttggattggttgtattgttatacatcaaattggaccgatattgaacttggataagatatcataaacttatcgtaatatctatctaagtcaatatcacctagttgatcttagatcaataatcaattctgagagggttattctagttcaattgtattatttatgttatttgaattgttcattaaagtgaacaaattagatcttcctgatacatacagattaagaacatggtagttcaattgagtgggggcgctaatcatagatataaaatctatagcttctataaatacatagaagtgaa

SEQ ID NO: 162740 - DNA, 896 bp, Cannabis sativa
tatatagtaattttccaaaaaataagacagcatataaataaaaatttcacttcagacaggttaagtggcctttacaaaatctacctaattatatcctgttgagatatatactaccgaaatacaagttaccaccctaaatgaagaggatcgtaatataatataatttgtacatgcattaatcattaattatttgtagctataatataatataacattaacatgatatatggtcttcattttcatatgcgattttagcatgcaatgcaagaaagtgattttcacgtggaaaattaagatgctttatgcttataattagttattatattttaggtgtaaattattatcaaaataattccactagtcaaacactaaagacttttggatatatatatatatatattcttaccatatagtacatttatttttatataacatattgttttataagccttgtctcaatattaatgtgttccagccgtatttcatcgttacctaaataagaaaacccaacatagtccagaactggtatgaacagaggaaatgaagtcacagtctcatatataataatacatttttatatatatgtttatggtacgatagctaagtagtatagtactgtagtatagtggtttaagttgagacgtaaaagagaaagagaggaaaggagaataataaagagggagagaggggaccaggaagcttttggtggagatccaatggctactggtgaattaagtgggacccacagatacttactacgtcattttggactctatttttggaagaacagtggcatccttgagtgggtccaacttccattttgggaatttcctcgttaaggatggaagtcaccttgtctagttggccctacttctcattgaaaaaaaaaaaaaaaa

SEQ ID NO: 162741 - DNA, 4069 bp, Cannabis sativa
ccccccccaaaaaaaaaaaatcattcttaggatcgacaagaatagtggttttagtagtagtgtgagtaaccgtagagagacaatcgtaaagatgatttgagcaacaagccttataaaatagcgcctttgtgataccaaagtaacctttttgtggcatcccagtaaactatagtgagagcatgaatgaattgacttagtttgttgatgatataggcaatgttaggtcttgtaagtatgagatactataaggctccaacaatacttctatataaattgatgtcttcaagtggttcccaagatgacaaactgagtttgtgagctgaacttgtaggactagagcagggtttgtctccttctagatgaagtttgagtagaagatcaattatgtacttagtttaggaaaggtacatacatatctactttctacaaacttcaatgcccaaggaaatagtgaatgtcaccacgatcttttagggagaaatctgagttcaggttagatattagtctttgaattaggttggagttttgcccagtgatgaggaaatcgtcaacataaactagaagcaatataaggtttgtcccagtgccaaaaataaatatggatgtatcaggttttgattgttgaaaatcccattgaaacaatgtgtgcttgagggatccacaaaccctattgtttgttgcatgtataccacttcatttaggatgtcattgagaaaggcattactagcatttagtttctttacaacctaatcatgtgagataaaaatgcaaagaactattatgacaatagaaggcgcaggcttgactactggactaaatgtttctgcaaagtcaatctttggtttttggaggaaccccctagcaactagtctagattcgcacctatctagagtaccatattttgacttaaccacgtggacccatttatttgtaatgacttacatattaagtgagtagggtaccaaagtccatgtctttctttttcaaagaagcaaactcatcctacattaaccataccacctaggatcctttaaagcaacctttgtagtgataggttcaatgggaagtagtgcttcaggcaatggatgtttagtggacatatagaccttagttttgaaaattcctctttgtgatagagttgtcatagaattagttctaacaacagtagttttagtgggaacaattaatgtttatggttcatttggcacaggggagcacaaatttgcatctatagattttgatagaggtgaaccaatgtcatgaactacagtggaacaaagctcagtagtggaagggagaggttggtcatcttccacaggtggagttggattagtagcagttgaggtaccaactgaattgtttaaaattgagcttaagacaaagcactggtgtgttggggagaatcctgaacaggttgcataactgtaggaaatgagaattttatctcattaaagaccatatttcgagcaatatatattctgccatttttaatttgacaaatgtatcctttatgattaagagattagcccaaaaatatgtaaggttgagacctaatatccaacttgtgagaattacatggcttcaagtgaggatagcaaatacaacaaaaggctttaaaggtgcatagtctagttgtttttccaaataagcattatggactaatattgtcaagaatcctaattggaagtctgtttagggagtacattaaaaagcatgctaccaataagataagcccaaactagaatgtgcaagaagttaaaccagtttatgttatgtgcctgtattttctatcagtccttccattttctcatgagagtgagggaaagaatgttggaactgaataccttgacctttcaaaaaatgatcaaacactatatactctcctccccaatcaaattgcaaaatttcataggtaaaggaaattatttctcaactaggcacttgaattttaaaaacacataataagattcaaacttgaggtgtgaaggaaaaatccaagagaacatactaaagtcatctacaaaatgaatgtggtacctaaagccatctatggaaggtgtatgagaaggtccccacacactatgtgatggagttttaagggttgaatagcatgatcgtttgagagaggaaaatattgtttatggcttttctctttttggcaagtaccacaaaattttaattgctttagagaacatggaatagatagggagaagagtgttttctgaagaatttgattcaagactggaagtaatatcagacacaactggatcacatttagatccaagtccattcaacagttgtaattccatatcttgatcactgatgatacatctagctacaacaagattatcacagagatattttattttatcaacataatttgaaatggacatgttacctttttggatgttggtgagttgactcttcaattgaagaatccttgcctttgattgccttgcgaattttcattcaagatctctccaaacatcataggaactagaatatgcaacaacagaaccaagaattccttcaatcatggatgatcgaagctaagacaaaaggagttgatgatcataacgtttccattgtgagaagagaggattaatctgaccattgattaattttttaagaggagatactttgctaaacaagatctcatcgagatcatgcccagttataatcaaaacaacttgggatttctaggaagtttactcgatcgagttcgatagctaaagattaagtgagagatttagagaagggattccatagctaatttttgctggttgtcggaggggcaggagcctctactagagctacagttgttggtggattagaagaaaacaagtccattggcatggtcaaaatggctttgataccatgaagaattatacagtttcaagaaatcttaaagaaaacgtcattgaattggtagtgaaaaacttgaccagaatgtgtatcaagatatttatttatagagtatgatcggtataaaggttaatagaaattcaaaaattgaaactaactgctaacctaacaaactaaattaacaaataaaataagttaactaactcaaatagaaaactaatccaaatagtagaaaactaattagaacaatttaactaactagacagagttagttattaacaaatatgtattacaaattctaacaattttttcttatgaattagtgatattaatgataatttttttttttaaataaatcaattacagtatagtattgtagatagtaaataatgatattgtaaaatatgaaaattaataaaataaatcaaacaaaaataagattggaagatcattaataatatattaattgtactaaaaaaattggttgtgatctaattttcagctatattatataaagttacaaactaaaataagattgtggggtaatattatattcttggactataaaatacattaactcgttattaatagtagaaattacacaatatatggaaaaattataagagtttacttttttatggcataaataaataataccatgaggttatggatttttttttttatttttcatttacatttatatgagcctttttatgccatatttttgttaaaaaaagatagaaatctcatatttttaaagcaataattaatgttatcgaaaaagtcaccggcaccagaaaaaccactggaaaaatcgccgaaaaaattagtgtcgtcgaaaaagtcgttgttgccggaaaagttaccgttgtcggggaaaagtcaccggaaaattcaccagaagtagatgtctcagatataaatgaaaatagaactgattctataacataatgaataaaagtaaataatacaaaataactaaaatcagttataattgaaatattaccggttctgtaacataataaataaaaataaataatacaaaataactcaaactaattataattaaaataaaatcaattttataacactgttatactgaataaaaataaataacacaaaataactcaagccgattataactaaaatggaaccggttatataacataatgaatgagtattttggggtagatatggtatgagt

SEQ ID NO: 162742 - DNA, 2918 bp, Cannabis sativa
ctctctctccatttatatatattatatacacaaattcatagctcaagctatatattaattccaaataatcatggatcaactacagaaatgcgaagcaaattacgtgcctctgagtccgataacattcttgagaagagcggcaacctgctatgaaaaccgtacctcagtgatctatgaaggcacccgctttacatggcgtcaaacctatgagcgctgctgccgcctcgcatcctctctccgttcgcttaacattgtgaagaacaatgtcgtaagtatcaattacttactatttttctcaattctttcatcaataaagtgaattaaatataggtgtataatatatatatattcaggtttcggtattggccccgaatattccggccatgtacgagatgcatttcgcagtggccatggcgggagctgttctcaacactatcaacacgcgcttggatgccaagaacatcgccacaattcttaaacactctgatgctaaggtgttctttgtggattaccagttagtccaggttgcaggagaggctctccggactctaatggaggctgatgagccgtctaacatgccattggtcatcgtgatagacgacatcgatgtgcctacgggaacccggcttggtgagcttgagtacgaagacttagtccatagaggtaaccccgacttcgttccggttgagttgaacgacgagtgggatgcgattactctcaattacacctctggaaccacatcgtcacccaaaggggtggtttacagtcacagaggcgcctacttgagcactctaagcttggtactcggctgggaaatggggacttaccctgtatacctctggacactgcccatgttccactgcaacgggtggactttcacctggggcgtggcagcacgtgggggaaccaatgtttgcctccgcaacacaactgcatatgacatgtacagaaacatctctctccataacgtcacccacatgtgttgtgcaccaatcatctttaacattcttcttgaggccaagcctaccgaacgcctgaatatatcatctcctgtggagatccttactggtggcgctcctcccccagcaccactcttggaaaagattcagtcacttggcttccacgtgactcacgcttatggcctcacagaggcgactgggccggctttggtatgtgaatggcaggcccaatggaacaacctcccaatagaggaccaggctcgaatcaaggcccgtcaaggaatcgggattttgggcctagccgatgtggacgtgaaggatctgagtaccatggagagtgtgccacgtgacgggaaatcgatgggcgaaatcgtgctaagaggaagtagcatcatgaaggggtatttcaaggaccccaaaaccacgtcccaagtctttaaaaatgggtggtttttgactggcgacgtcggcgtcgtccacccagacgggtacttggagataaaggacagatcaaaggacgtgatcatatcaggaggtgagaacattagcagcgtggaggtggagagtgtgctgtacaggcaccctaagattttggaggccgcagtggtggcgatgccgcacccaaggtggggtgagagtccgtgcgcttttgtagcactgaagagtgactgcggtggtggttgtagagatgtgttggagaccgagatcttgacctattgtcggaagaatatgtcgcactatatggttccgaagaaggtggtgtttgtgacagagctgccaaagacatcgactgggaagattcagaagtttgaattgagggctatggcaaagacatttactgtcatggaaaaagagagttgtcctaagtacgacactagccagatcattggctcttccaatacaggggatgctgttacggggtacaacgtgcaagtcatggccttgtcccgtctatgattcttatttttcagcctttttttctagttaagggaaaaagttatggttatggtttcgtgatgccatatatgtgacaacttatggtgctaatttacacaatatagggaataacagtaatccttattcaaaaatgatttctgtatagtcaatgtttgtgtcggtgtgggttgagtgggtgtaagctttcatgtagcaccattgttcttttacaatccacccttataatttacaaagaaattacaaattaattatagtatttgtgtcatctctagaaaatacacttgatgttgatacgtggtttgctaaatgtaaaattactcaaaataacataaaactggaacataaaacctattttaagtacttcatgagtttccaggaaaacaaaaaacaaaagtacttcatgagttggttttaaaaaaaagccccagtttttatattccctataaaagatcattaacattgttatacataaaataagttttttttgttcgatatccataagataagtttcattcactaaactataccgaaaaattaaatatatttatagtatatatacaaaaatatatactagttcaaactgcacatgatattagattccttctcaaaaaaaaaaaaaatcacatgatatatactaggattttttgatgtcctcgcggcacaatttattacttgttggttttttgttttaatatataaaaaactatgaaacaatacgtaaaaaaatagtaaacaacctgcattttgtgacgaatgtttaaaaaatttaacgatattaatttttcttataattttctttgaataatatcagaaattaagtgtacaaaatctcttaaaataacatgtattgacaaaatatcttttttcataaaaatagcctgagatggttcttataacactctttcgtatatcccggtcatttaaaattattctcatcattctatatcacgtattgttattactgtatctcattagctcgtatgagtgttcataaaatagtcg

SEQ ID NO: 162743 - DNA, 1094 bp, Cannabis sativa
aagaaaatataggtgcatgagtagtagcaacaattgaaggtgcaagggaaaaggtatccttatcagtaaggaaaggcatattaattggggaaggcttagtgaaagaacatgcaaggatatatggagggtaggtaacaaaggggagtggggaggaggatttaaatggggagacagaagagcaatcactaatatccagtatgaaaacatcaaatatatgggcagtggatacatcattattggccaaagataaggattgaatattgacattggtagtaatgagtgatgatgataagtttaagataggaagagtaaaaaaagttgatgtaactgtcgaagccaaagaagttgcagatgcagttgtaacattctgtcctatttgatcatttagttgttgagtgtttgaagcctctccaattaaaagtgggttcggatgtgggggaagcctagtaagaatatgtagaatggaagcagtaagagaagatctagctaatcttgtaaaaaagggccaagcattccctttagagtagtcaaattgacaacaatcatatgaagaagtaggtaatgccgagcccttcaacattggaccataagccaattccggttcaattccattgtcaagattctccaaaaaaattggacattttgggtataagtggccaatcaccccgcattgcatacaatagtctggtaaccgttcatatcaaaattccactcaaaattcatcacgaattgttggcagagtaatcattttccccctcaatagtggtttagtgatgtcgaggtgaactttgaatcttagcaaaggtccccatccttcgtttaaggagtcatcatggacagccaagaactcacccaacaattccccaaagctttagccaatgaccttgatttacaaagaaatggaagcctataagcttgcacctaaaacagagagaaaatcatggcctcatgagtgacattttgcattgcagatggagaatggacgacaatatgatggttttgaaaatgccaagattctttttccaatgctctaagccgatcaccttcacaaccaaaacatactaagaagagaccagaatggtgctccttggtgt

SEQ ID NO: 162744 - DNA, 2602 bp, Cannabis sativa
atagtgtttggagactcatcagtggactcaggtaacaacaacttcattccaacaatagccagaagcaatttcaagccttatggccgcgatttcctcggcggtttccccactggaagattctgcaacggacgccttccatcggattttatatccgagggagtaggcctcaagccaattgtacctgcatatttggatccagcttataacatatcagattttgcttatggagtttgctttgcttcagctggtacaggctatgacaatgccacttctgatgtgttagtaagtctccttaaagaaattattttgtgaaaaattatgattaatcaatataaaccccacaaataactcatacatgagcgatgtgggacagttaattaattgaattttgcagggtgtaattcctctatggaaagaggtggaatactacaaggagtaccagaagaaactaagagggtatgttggtgatgagaaagcagaggtgataataagtgaggctctgtatttggtgagcattggtacaaatgatttccttgagaattattatgcattgcccaaaagacagaaagagttcagtaaagtgagtgagtatgaggattttcttataggtctggcttggaattttgttaaggagttgtattttcttggggctaggaaaatatcacttgctggggttcctccaatggggtgtttgccactacagagagccacaaatattttggaagaccatgcttgtgcagaggacaagaacagtgtggctagggagtttaatatgaagctcattactttggttgcaaatttgaacaagttttttcctggacttcaaatcgtctactcagatgcttatacagtatttttagacatcataacaagtccttccaaatatggtatgtcttttttgattaactgcaatttgcaaatgaacaattatgctttttcatagttctttcctatttctcatataattttatataagcatattgttcaattaaatcagtgcaagatctaaaatatatgtgtttatttttggtaatatataataattaataaatttaaaatatcttttaaaattaatagtgatattgtaatttaaaatattactatagatagaatataatcatatccaatgaaatgtaaattggtattgaattgctaaaatatagctcagcaaaagttttgctctaatgttaatttcacactcaacaatatagtttgatacaaaaatgctttatatttatttttatcatttttttcttttcaattttataattaaatatttaattatagaattaaataattaagtaatagacttttttatagtagcaaaatccataacaaaatattattattttaaatttttaataaaatattaagaacattaattaaatattaaaatttgtaagaaatatatcgtaaagatttttattgccaaatatagtacaatatttgactggaagatgattttattctgtccaaattgatcttttaacaaatttattacttatttggtgaatttaggaggaatgaaaaccagtatttcttaattgatttgttctcttcaagattatgccatagacttacataatgtttcccacttcattttttcgatgtttttgtcttctggcaatgtaaaataaacttcaaacttacaaaatctatgcagtttaaaatgaatcctcaaatttctaattaatttgatcattcctagtacactgcaagtgcaatcctctttttggggccttccctattgatgttgaacttccatctatggctactttctctttgccctgtgtagctaaactcaattacatatatttaagaacatcaaaattcttcactactttcttatgttgtaaggcattttaatattgatgagcagggtttgaggaggcagaagttggatgctgtggcacaggaacatttgagatgagttttctatgcaacaaacacaatccattcacatgccctgatgcaaataaatatgtattttgggatgccttccacccttcacaaaaaacagctcaaatcatctcacatactttacttaaaactagtctagccaagtttgtttgagatctgctgctactgcaaaaattcattggtgcctttgaaatcaaaatcattaccataaggcatatattcatgttcacttgttactaagtagatatcttcacattatatagcaataaaagattatactccaaaggagactaaaatctaaaacattgagtatcaaaaaaaggacaaacatatatttgttaagattagaatgtacttgcatctgcattactataagttcagttcgtggggcataagacacaatttatgatttttgtgtttcatgggccaagaaagaatgcatcggactggcttcagaaacaaactttacagtatgcctattatgagaatgaattgaatgatttaggccgcgattttggcttcgagtgtcttctcatactcctcaatggatttgaagagttctgagaaattaccctttccgaaacctccacaaccacctttctggtacagcttccccttatcatcgttcatcatacaccctactctctgtattatctcaatgaatatggtcggtctgcacatt

SEQ ID NO: 162745 - DNA, 1590 bp, Cannabis sativa
cttttgatttagaccaagataagtactctagcactgattaattagataaggtagactacatactgagaagtccaaaaaactttgttcctccaatacaccacaattttagagtggatgcacttattaaaatttatttttcagggttattccaatatgagactaatttaggtcaagaagatattgtcccttttgctacaggaaaaaccaattatgccaagataaatgatttggatcattcttgtatgttgttaaataagttttgttgtagttacatttgatataatctaacatgtcactactttatttgttttttcagaacaccttgccacatatttatatgggaattttaaataatttcttggatgccatcaactccagggccaatgaagtccgtgaggtggctaaagacaaaaagatcaagggtaaatctgcgcaagtctctaggagtggatctcagaagccaacacctctagcccaaagccaagaggctgctctaaaggctccaacctaggaaaatttgcctgctccgattatcgacttgacagatactgctttagatgtcgtgccattgtgacaaatgcctatgcattaggttgatgaggattctttagattgcgatgggctagtcattatttccagaagaggtcctggactttgaacggtggtgtgagtaaaaaggctaaggtggacatcaaagaaaaggtgcaatagttggctgccttaaggaaacaagcttatgatcctcattcctagaagagatctcatgccactgatggcggaagatcttcaaggaggaatgcctgatccagcaaagaagctcacgatctacctctactacctccattacccaaaaatattctggctacatccacttaaatgtctagggaaaatacaactcttccttagctttctcctccccaatttaatcttcctattaggtatatgtcattacctgaagaagtacaagcacagatggaggccatcgaacaattctagtcaaaaaggtaaagtgctgagtacgatgagatggggagattagcttccaatatatccaccaagtgcaatgcagagttgcagattatgataagtgggatgagcccttccctcatatttttaaccgagtggaagtggtggagaggcttcatcccaaggttgggactgatctggttccattcttgtctaatctgttagacctgagtgcgaccactagctgtaagctgggtgctgataaattttccatgatggggagtggtgatcccatctacgtggaaaattacatgaggaacaaggacaatgttgtaagtggactttgcctgtgttatgtttggaaagaagtatgcctattttagatatctgactcgtatatgattcctcttataggttagtcttatggtgaagaggaattgtgcattgatcaacaagaacgcttataagcttgaattgctaaggtctgagcgcatcaatctcaagaagagacgagacaaggccgctatgttgctatattttattaatactacgcaagtatacgcaatcaagtagtaaatctcacacaggtgaggtcgatcccacagggaattggattaaatacca

SEQ ID NO: 162746 - DNA, 1358 bp, Cannabis sativa
ttggaatgggattcagctatgcaggaagaaacagtgtctctaaggaagaatggcacatggatcacagtgaagaaaccagtaagatgcaaagtgaccagttgcaaatgggtgtgcaaacacaaaaatggcattcctggaattgaggaagcacgattcaaagctagattagtagcaagaggtttcacacagagagaggggtatgtgcactaccatgcttggatgtatgagaccgaatttgatcttcgtcagaaaaagcataaccatcacttggttatctggcgtgcataaaaggttgacatctgcgacactccagaatggttgatattcgcattaggccattcgaatacccgtccaggtatcgcctgggcaagcttcccttcttagactcctctaagtccaggagaagaaattcttcatccgcgtccgggaagctaaggcaagcttaagtaggcttccatgtgttcttccatcccgagtcgttcccgattctaggaggcttccctgtgtcagggtggcattaaagggctttaattagggaagtattagactaatcctcctcattaagtgacacatgtcatactctgtagaaacacgaataacagattttcctggtgaccttaacacaagaagatcccaatctggctacgtatttctgctaaaccagtgcacaatacgttggaaatcaaacctccaagttgttgtgggtctttctactacagaagcagaatacatagcctacacaaacgttgtcaaagaagccttatgactaaaagggataacaagggaactggggattgatcaaaagactgttagcattcgttgtgagtaagaatgaagtctttcatgagagaacaaagcacattgacgttagatgacacttcatgcaagatgttctgtcaagtggcaaggttcaaatcgtcaaagttagcaccaaagaaaatgttgcagacgtacttactaagtcactgcctacaaccaagtttgaacactacctcaacattttgaacatctcggatacttagtcatgtaactggtgtacattattaaggtagagaattgttagaatgtgtcttgaaatgtgtaccaatccacttaagtatattttttgttattgacttaactatcttctcgacagttaagacagttagtactctagtgttagctataaatactagcctctaatttagtgtacagagagagtgaaatacttagattgtaaagtattacacaattaataaaacaaaggaatttcagtaacttagtggatgtttggcatcataattaaaaaactgttttttgtttttaaaaacagaaaattgttctttgaaaacaatttggcttgtttggtcttgtttttt

SEQ ID NO: 162747 - DNA, 1034 bp, Cannabis sativa
ccctttgttcaccatatcctccaaaaattccaccgccgtattaacctgccctttcctacacaacccctgcatcaaaatcctatacgactcatcattaggaatgaggtctctcttaaacattttgttgaataggtcgtatgcaatacaaagatcaccattaaaacaaaaggcactcatcaaaatattgtaagattcagtattaggcaatactccatactcatgagaactcctgaaaagctcaaaagccagccggagatggctccggtgagaaactagaatctcaagtatccgattcaagtgtttgggcaaaggcttacagtcaaattccagcatagtatgaaaggtttggaaagccttttggggcaaattagcctctccatagattttgataagataggaaaacagggtgtgcgtaactgggtatctctcagccttgagacgaagaaggagatggtcgataagagagaagtaccttgagcggcctagcttcagaatgagaatgagaaatgaagaataagaatggcgaaagttgggttggcgagaggcgtactcgaatatctctttggcgagtaaagggtcggattgtgcagcaatgagcttttggactcttgaaggagaaaccaagtggtgtttgtgattgtggttttgacctggttggggttgtgaggagtattggggcagtgatgggttccgtggaaggaagattagagagcgattcgtgggtatcaaaactttgcaccatcggatgccttgcatttttctcttttgtgtttgggtagtaagagtatactatagagaaatgactgggaaattcgccaaaacagaaactaaatacaattttttcttttttcttcttttttttttttacaatggaaactaaataaaatttttagttattcttttatgatccattaagaagagtttagtacatagatgagataacaaaggatcatcaccaatccataagttgtctagctttcctattttttgaaaaaaggtaaaaatagtaagttttgttactcatttctttttta

SEQ ID NO: 162748 - DNA, 2286 bp, Cannabis sativa
tgtttgtcctatttgttaaagacaacatcgtagtattaagtgatttttttgtttaattgtattttccaaacgacaaacttaacagttatgcatgttagttgaggagcagccaacacatttgtactactaattagcgttaaagctaatacatatatacacatttatggagatcgaacgttagatatacaaatatattataagagttagtgtcgacttcttttacctgttttaaaatctatgaatttctgggtgtgtatatttataaatttctctatatttgggcttgtgcaatttttttaaatatcacattcagtcttatggtctcttaaaagtcgttcgttatgcttacactatccaagccaaaatgtgaagaaggtatattagagttaatctcacattcctaattaatatgtagaaataataaataaattattcatctcattaccaattaattttgagataaaacactgtatatcttatcttaaattttaacatatatattattaaattgggtatgaatctcacaatagaaattacataatgtatatgtagaaagttgaataggaggcaaaaataattaaataattaagaagatctattaaaataattaattcttgtggatataccgttccgtactgcaatttaagctgatcagatcaagttgttaaagtatttatatatatttaattagctgtagttgatttaatatttcaatattatttataaaaataatatcaatcaaattaatgttgatgcaagtaaacaagatatatattaactaattacatgtgtttattaaaatgtttttgaaattgtttacaaagttaaatagctggctccattttgtgaagactgaagttacctatgagaattgtgaggggtcgtgttttgcctccccaaagatgaacatagatctagatgcgatcaaaaaacacattggaaacaaaacgacatgatttataaattcttttgtctcttgttttattaattttcatatatctctcttgcattattataaggtgcccattagttatatattaccaacgaaattcaagccaatttggtcaaacttgttaatttgcattgtcatcaatcaaaccccctttaatcactcttattaattttgttttctttcataattggatgcattataattcactacttctcatgaaacacacaagaagtttgagacgaaagtacgtatatgtgatgagaattcttttataaaagtaatgagaaatggggaatgtataataatataatatatatatatatatatatatattgattaaacatgtagtgggtccaaagattttgttggtcggataagggttttatgtatagaatacatccatttttggaagaggaacaagatgttgattgttgcatatatgtatggtttaattaaagttatcgtttttatatgcaatattcagaacattatgtcatacccatacctttccataaatggtacgtagtaaattagtatagtgtacaaaattccaaatgggaaaaaatctctgctatgatgcatgcatgggccaaattaagtatatataataataagacataaatatggaagaacagtgttgatattattcattggtatacgggaaaattgaagctttgtaatatggagcacaacaccgttacagtacgtagtatataacgtattatatattattggataagtttgttgctataaaagtgatcacagctcatccaattatgcatgaaaagttattggttgatatatgtaattttaatgtatatgtatttatatatatatataaacaagtagtttaataaatcttgataatttagtgattttcttattaattataatgtaatatggtgagcaaaaatcgtttaaagattgacaattcaagtactgtttataatgacgtttttggaaataagtttgattttttttttagagtaaaataactgaacattgatattaacgtgtctagcaccttttagacgtgctactttgcgattggctagcgatactctctaaaagttatcacattaaactttatgaaacccaataattagttggaccaatagcgatattgacacgtagaagctagataccactgatgccttagcatttatcaaaataattaggcaggttttagactctcaagtggtacttatgggaggacatcatgactagagatggaaattgggcggttaatgtacggggaatgcaattcccgcctccatccccgctacctatttatacctccatccccgcctcatccccgtttaataaccaacgga

SEQ ID NO: 162749 - DNA, 1148 bp, Cannabis sativa
aagtagcttttcacaacacttcatgaggaaccatcgtcccgtgattgcagtggaagttattgcattatcgattttaatttcaacttgcatcaccatataaaaactcacccaacttaaaatatttggttgattttcttaataatgctcattaaaaatacatgcatgtggatgcttgtcaatccgatcatgcaatgtagctacgtatctcaaaatttcaatatataaatacgacaagttttatttaacaaattaaattgaaaggctttggaagtcaatttcaaaatataatttttttttcctttgtttatatccaacattttaaaacacattataaattatgcgtagttaatgggaactagtcatttgaagaagtgaattaattactatattaataattaagaagtaataaataaaaaaatatgaatctacgaataagattgtaaatctatctaaccatactcctgtttaattaattaggaaatagcaatcgagcactattttaaattagtaagcagtattctttgatacgcttattatacatatataatatttacaataatttttcaaataagtacattaattaatataaaattagattatttaagaataatggtgattcaaaaacaaaaagaatgctgaatgtagaagctcattaaaatatatttaattgttcattttttctaagaaatcaattgttagatgagttatatagcagcatcctcatttttatataatgacttccatgactataaacgaagatcttcttctagattatgaataaattgaatgaatcaaataatataacccgaatgatgatcagttatatatattatgcaacattaataatccaaaatctggcacatccattagaattagtcaaaatccgtcgtcatccttgtaataattattatattactattattttatattgttgaaaacaatttcctctatctatacttaattataataactagttttgtcttaatgtggtaattaattaaaaattaaatgttaataatttaactagtgctgttcaaaaagtaaaacaataagggctcgtttggaacgctgtattaggtcgtattgtattgtattgtattacattgaattggattatatatcatatttttatataatactatgttaaa

SEQ ID NO: 162750 - DNA, 2420 bp, Cannabis sativa
cgatgacattgagcaattaaataattgtttcaattggtagaatttttgtaaagaaaacagaaaaggagtaataaatgacatgggcacgattataacattgaaaaacacctagatacttagctttctcgcaatattattgtacctcattggatttggatacaaatgtagattgatacatgttgttcgtagtcaatagttataccactaacttgtatgagtttatcagtaacaccaagttgcattgtgtgcaagtgttaagagtttatcaatatatgtggtgttttgctgatattctagattctatttggttattctagattctatttggtttttctagattctatttggtttacatctatcttcacaaacaaactactaacattatttcctattgctaatactgaatggctgcagtcttgacaaaccaatattcccatgtgagcgggtcgaggctaggtggggaaagtcagaatgcccggagcgcgaatgtgatgtactaggtagtacaatagacttttcggatacccgactctaattccagaatgactgaaattattgttgggaatgtccatggcactattattttgtaaattactatatatatagacatttcattgaagtggtagtaattcctccagtttttcataaaggcagttgaaacaaggatagaaacctatagataggcaacaatgttcaaatgtacttaaacgaaggtacacattttgattctaacaaagctaaatggtcaaatcaaagcaacaacctccatgaaccctgctctgattattgtccattcctgtcttcaaaccgatctaaagggaggagcctcgccgaatttcagtagataggctgtttcatagactggccgcagttgctggatcaactgtgcatccaagtaggcctcacaggagaagcaccaaactgataaatcactgtcataattatagatttaagaaaccacatgagccaagaaaaactcgaatttagaatgtacagaattgacaaaatagagtaagtttgggttgaacctgtagctaagtacaagagaatggtgtgtttggtggtaatgattgagcatgtgcttgttcacaaaacggctacacaatacctccttgcagcacaaacacagccaattctcttttgggtgttggcaccttttatatatataaatataattcaataattaaaaacaaaatgaattaatcaatagaaatgtgggaagagaagaactgggttggtttattacgcacgtgtggcaaggagtatgaggtgtggggatatgagcgagatcggaggagagggaaggcaagtgatcgcaggtggtcttcgcctctacccaacctgattcggctccgtacaacaactcctcatcttcttcctgataatgaaaatgtttatggacaagtcaggtgaagactccatatgtatgttaattgggaaaaagagagaaagaaaagaattatgatgtttaccaaaggagcagaagaagaggaagaagcagctgcggcctggttcgccatggacacacttattttctcagaaaaagggtgcaagtgaatgaagcaacgaaggtgtttgtctttacggattcctaaatattttggttttttcactaattacaacgcctttttttaatttttcactaattacaatttgagcctgattttttttaaataacattttatctcttgctttgggggtgcgggaaggttttaacaagtttcagtttgtagaaattacattatatacctattttactttatttgttttcatttttacattcatttccatattctttaaaatacatttacttttataaataacatttcttttctaccctttaaattaatataaatcatgtgctacgtggagagaaatgatatactaggcaacccacttataaaaataggtatattttaatgaaatataatataagggtatttttgattaatggatataaaaaaaaaagtattcatcaacttatctctttcagtttcaagttcgggtgtataaaatctatagcccaaacttgcccgtttgtgtgactgggcttttgggtttcgggctcagtgggtcgggtgcaggttggttcgggtccaagtgggttggaaatggattttaggttgggttaggctttttttttcttttttttttggaaaaatatcaatttttatatttttttcataaaacttctcaaattttagcaaccttttcactttaaaaaaaaaacatgctattttgacattttacaatacaatatttataacttttatattataaaaaatctttactacttatccttaactacttctaaacttattaaaatttctaagaaaaattaatttaataatttttgttgacattgcttctagcaacgacattgagtcaagataaagtaattagataaaataaataataga

SEQ ID NO: 162751 - DNA, 1577 bp, Cannabis sativa
ggtaaaataatttccaacatatggctgctgtacgtgtggcatgtgctgcattggtgtcaaaaatatgtgcctctacagttaataaatcatgtcgtatcgtatttcgacatctggcacataaaaataaaaaaaattttccagtaagtatcatcacaataattttttgttatctaatttttattgatcgccatctacaaaaaatttttaaaaaagaagattattaaatttatttaactcatatttaaatttttaattttaaaaaacttatgttcacttattatgataaattatctttcacaattataaatttattatttacttaattaattattttaattattaagcttattcattatttttaatattatgaattagttatctacttaaattattcaaaaattttaagttgattaattaacatattatacatttttttcattttaaataagttatagtgactattatgatgaattctttaattatttatatttttaataattataaattaattttgaatttaattatttataataataaaacttttaacaaaattaaattaatttgtatttcatatttcacatttttcattatatgatcatatattagataaataaggcttttaattaattaatatataactattcatcatattaattaaaatattattaactattaattattatttaacataaattatttattaataaaaatgctaacttaatcaatttttgaattatccacttaaaatttaatgttttaatttttattatgatgaagataaaattttaaagttaatttataatttttttttccaccatgattagggcaacataataactgtttacaaatatttacaaatagtatgtgatatatttacaaataaatattatatacatatacaaacttattcacatgtgccaacatacatatacaaaataaataatcaaataaacacaaatttttaactttaaataaacatcaaacacataaatattcatacattcacattcacacacaacaataatatacaaattcacacttttaccattgataatcaaccctcctttgttcctcaatatctcaatctaggtgtactcttcaaactcattaacaaatcaaacttaatgaggaaagttcaaacttttcacacaatctcaaataatattacttaaaaatcaggcaaaatgcaaaacagttcagcaaaaaaaaaatagaaaaatgcaaaataaatctggaccagtcaagaccaaaactattgcactagatttttgggttgccaaatatattttttatatatataaaaatcaaagaaaactaaataaccaaatagaagaacagatctaaaatcaatctaatttttttttattaaataaaaaaacctggaagccaagtggcatagccaccgtcgatcccttgctaacacaaacttatcgacccccctaagtacccaaacactatcaatcccctgcgaactgaaatcctccgtatttgaatcttaatccgtcgtccctgccaaggaaaagagagacccaaagaatgagatatatatatacatatttatagagagagagagagag

SEQ ID NO: 162752 - DNA, 2186 bp, Cannabis sativa
  modified_base (2117)..(2141): a, c, t, g, unknown or other
ctaccaaatgtgtcaacctcggctactctcactctcacaagggatataaatgtctcagctccactggccgcatttatatctctcgtgatgttgttttcaatgaaatggaattcccctttcaaaccgactttctaaacaactacaggtctgaaactcctgttgtgatacacatctctcaatggtcttaccttcttattcctcccactggaaaggccacggcaccccctggaacatctgttgtttcaccattatctcatgagtttactgtttcagatcagtatcatggttcaggcagggagggggagaaaaatgcagcagatgatgcagcccttgcatcaccacaatctcagcagtttcatcacgattttactgtgcctacatcgcaaattttctctcctgctgtctcaagtacaccagcagtctcaagtacaccatctactgctgcatgtactcgtgatcaactgcccgaaccagccatagcatcgactgttccaccacaacaaactactcaccacatgataacacgtgccaaggcgggtatttttaaaccacgagtcttctgtggttagtcaaattgggagtcccttatcaaagagcctagcagcctagaagaggccattaatcataaagggtggaaaaaagttatgaactctgaaattatagcactcaagtccaataaaaacatggtatttggttcctactgcccctggacagaacctggttggaaataagtgggtttacaggattaaaaggaatgcagatggatcggttgaacgactcaatgcgaggttggtggcaaaaggatttcaccaaagacctggaattgattttggagaaactttcagctcagtaattaaagcctcaagagttcagattgtcctaactttggctgtcacaaaaggatgggaaataaggcaattggacataaacaatgccttcttgaatggtgaaatcaaggaagatgtgtttatggttcaacctctgggatttgaagagccaggaaaagaaaattatgtgtgcaaactgaacaagtctttatatggtctcagacaggcacccagagcatggttcgataaactaaagactgcccttctgacttggaaccttaaacactcaaaggtagacaactctttgttctttttaaaaacttcaaaagtcattatccttgtactcatttacgttgatgatataattgttacaggaaatggcattggtgaagttaacaagtttatcactcaactcaacagatccttttctctcaaagacttaggtgcactacacttcttccttagaattgaggttcacagagatgaatcgggcctatatctcacacaaaccaagtatattgaagatttgctaaggagggtcaacatgactaatataaaaccttgcccaactcctgtaactgctggaaaaccgatgtctgcaaccgatggagatctgatgcacaatcctacagcctacaggagtgtgattggtgcactgcagtatctgtgccacactcgtgctgacataacttatgcggtcaataagctgagtcacttcctccaatcacctactacgactcactggagtggagccaagagggtcttaagatacttgaagggcaccagaactcacagactgcacttaagctgcaacaacagcctgcaaatcatagggttctctgatgccgattgggcgtgctgccccgatgacaggcgttcaatcacaagctaatgtgtctatctaggcgaatcattggttatggtcatcgaagaaacaaccggttgtgtcaaggtcaagcaccgaatccgaagtatcgtgccttggcacatgttgcagcagaaatctcatggattgaatctctcctcagtgaattaagtgtacccttctctgttccatccatcacatggtatgataacattggtgccggtgccctcgcttccaatctagtgtaccacgcacggaccaagcacattgagatagacatccactatgtccgtgacaaagttctacaaggaaaattggatgtgagatacgtcccatcttatgatcaaatagctgattgtctcaccaaagggttgtcaccttcacgctttgctttcctcatcgacaaactgttgggttttatgccnnnnnnnnnnnnnnnnnnnnnnnnnttagttatcaatttagaagtgaagcatgtttacatgtatgttaca

SEQ ID NO: 162753 - DNA, 1702 bp, Cannabis sativa
  modified_base (1660)..(1671): a, c, t, g, unknown or other
atatatatatatgtatatattactaaagcagtactataggtatatacgcaattctccaatctgagttatatatataatctgttcacatccttatattttccacaaaattgggacccctcgagtgcttttttggagagcagcttacgtcttgctgtcaacttgtttggctcatttccaggatattacattttgatttattataaatgtttatataaagaaatactccgaaccaataatatatgcatattgtacggacaaattactagtgatcatcatttgaaacagtggcggatgaccagaagtagtaactttgaaacggtctgataaagattaccatgaacatctttatagaataaaattctaataattatatgataatgatgatgaagagatcgaagccactaccattaatttaatgttagacaaatattgtgtgtgtgtgtgtgtataaatcgaggaagatttttagtttctatatatcaacacctttgtcgtatatctatatatatgtgttgatttatgtaaccctatgaaccatttcttcaattttattttttttgagtcattaattaacttgagaaagcaaacaaggaagagaaaaagcaaccgcgttatattgactcatgtctcatcgatttgagtagtcaattatgtataaggaatttgagtaggaaacgggaaaccttcaagttttagttataatatttcctcttataaggaattttgttacagtagtagtcaattaatatgtggaaatttcacatttttattggctagctaaatatatatactttttcttttaatttatgagtttcctaattttgttttcatatataaatcatgtgtattttcaatcgacaagtgttgtaataatatgtatatatatatgtcttacgtacgtactggtttagctagtttatgtctacatgttataattcttaataatcaaataacatagaaatgctatatctaaaattttgatgagatagcctaagtaacgtagtatattgactcaatcaataacaactttgcttttattgttttagcagaatccagattggaattgaatccaaacataacagagctctaattaattctaaattccaatcaagtacacatgtatgtttttttaacatataattatataatattgttttgttaaggtataggagcatatatatctttcaacctttgcgagtgatgatcatatgatgctatggtaattgggagttatataaaatattatattttatgtaaatatattaatatgtgtacattatttcttttgtgcatggatcgatcttatatttgaacatcaaatattttttttttccaattttttggaattttcagatactcgtgtgtttaaaatttgtaacgattctcatggtagtatgtgactttgacttagacttatagtcttttaggttgtaaaattgtaggccaatagatgaaattcttctagatatgttcataaatttttcaacgttaattttgactactttccatcgccagtaaattaagggcaacatatattattcgcttcttctatttaattattataatcttcacattcatcttatttttatttttatttattacttgtattgcatcccaaagagtgacatgggaatgtgaatacaatatatatatatatatnnnnnnnnnnnntagcaaaaactacgtgcgaggcacgtatact

SEQ ID NO: 162754 - DNA, 5232 bp, Cannabis sativa
  modified_base (5173)..(5177): a, c, t, g, unknown or other
ttatatatatcgatagtaagatgtccatacaaatgcattgaagtaagatagaagtgccaagaaatgcccaccacaaagaaaggcggtgcttgtaagcaatgagatatttgaaattttatttatttattaatataagaaattctaaaatattaaaaagaatgtaccgatatattttatttatgagaaaattacattatatattcattttttattttttattttaatttttatttttattttattactctttaatttatattcaattttttagatcttaccctcattatgtgtattacaaaatctaattttaataaattatgtgaggttatatttggtactttgattataaaagagggtatttatcaattaaaattattttagagtcatatttcgttaatatgtaataaaaaatggctagttttcatctgatcccttcatttgttgacatttgagaaaaaaatttaatctattttttttatagttatatatgttgtagttatttaaaacgtcttgcaaaattttgataaattcaaaaaaaaattaacgtgacaaaaatagagttcaaatagtctgttgcatgtgtgactcttttattttatacttgtgcgaaataggctgtttcaatattattttttatattgtaaattattctaaatttccttaaataaccataatacacgattattaaaaaaaaaagaattatcctatatatttttttttaactttttttttattatttttacagtttggatcgttctggtaattgttccggtagtttttatgtggattgctagatagatttggattgaaattttggttgttctattaattgttatgtagattgttgtgttaattttagtaaaaatatatatataaattattttaaagtgtaaaaataaaataataaaaaaaaaactcgaaaattttcttaaatgccaaaattaatagtatatcgctgcaacctttctagatatgttgtattacaaaagtactcattaatatttatattatgctttcctgatcagtctctttctctgaatttaaatttaatgataattattaaattacagtgctggaatttcaaaaaaaaaaaaaaagaatggaagtaatattagattaaattttgttgcaagcaatacactttaggctcactaaaaaacaaaccatcttcacgtgtggtccacaaagaaggccgtacaataatgatactgtaaacaagccattgcataatgttctctgattataaaatctccttcagatcctctggcttggcctctactttcggtactccatagtcaattaaccattaaaagctccattaaatatttattgtacatctcattcctacctcttctaccaaataaatatttgtggtcactaattaggactataaaatttcatgaatatcttcttttcgggctcctttcttttctttcaaaaacatgtcaaaaaatattttaacccgagctccataaacatagtgagaaatctttataaatgatttatgtcatagcttcctttagataaaagataatgccaatcaagtccttgtacttttcaaaatataaacaaaaaccccgattgttaaaagttgtaacaaattttcaattttgtccttttaattaattagttatataccacatcatactatcttaaattcattcatatatgccaactaccatactagaaatccatttctaaatagataacaagttaaatgaggggcatcacaagagtaacataaaaaagttttgagtttctccgtacaaattaatagataactaccctcttaaagatctagatgtacaaaaagcgatgacaaagttggagaaacaactagagaaacttgaaccctttgcttcttttcccacattccactaagcagacaccaccaaaaaggaatcaaaaacccatcttaatttcccatgtaggatgatgatgatgatagaagacaaaatacaaaaatagtgaagaaatattaataataaatagttaaaataaataattaagaaaaaggttgtctttttttagatttgaacacctacaaaacaacagcagaatcacatgcataaacaacctgtgcacattgaaaatccagcagcatcagcagactagcctccgtcctccctaccccacatcatccatcatccctaaacttactttttaacccaaacagagcatcaaacctgaaatgaataaggtcaccaaggaagagaacacactagtcttagctagtctaaacccaccactttcatctgtgttaatgccctgtcctgtggggcccatgccacctcccattcctcctcctagcaccccggtggatggggttgtgctgtatggggatgtggtcgatggtgtcccggtgctggatggcgtggtgccggtgcctgtgccggttcctgtgcccgtgttcgtgccagtgctagtggatggtgttgtacttgacactggagtagtactggtgcttgagctaatcaaatgaaacaaaatacataaaacaccataagactaagcacgggaacaagagaatgatactactattaagtattaacttgcaacattctcaaatataagattagtaaaatatgcatgcacttttcctacctacgtggcaagaggcacaaatctgaaacataattaaagcaaaatccatgtggtcaacacatttagaagttaagactcctatgaatgataaaggcaacttcaaactaggaacaaacaaaagcaattctctagtcatttaagctgaaaaataaagtgatatagttgaaataattttgacaccataagtgatcgttgggtacttcttaatattattcaagaagtataataaatacaaaaaaaattgcctggcaaggttataatcaatgtcatggtttgtttcaagtactactcagacccaccaccatgtgaatacgtgatgagtgtcttcaatagcagtgtaacattttgattccctaatatttgtttgttttattttactttttacacatatctatatacttcagtaaaatagaaaataaaattagatttcagactatgctgctttccatataaatggtgaaatagaaatgacaaagcacaactctcgagaatgccccaaaaaattacaaaattggctctaatctcaaaagacttgcttatcccaaggacaatctcaaaagagtagcccccacccagaaaaagcagccgctgctataccctatttttgcaccataatgtggacacaacttctcaagtcactgccaacagttcttgatggccacaacttttgaccattgcttagcttgggtgcactactatcagtcataaaaagcaacaaaactatgcattgtgtttggtaagggtaaaaaggaaatttacttttgacttttttaccctttactctgttcaaatactatgtgacattaaccatctataaaagcattggatccaatgattgtggcatcgatcttttataaaaagtgaaaaagtcacacattcccataagctcaccaccaattaatggacaatgagtcaaggacatcatgatgcaattacaatattggtcaaaatgacaaaaagggtacacatatattggacaaagaaaaaggagatagagaagggtgtattgggtatgtgatttttttaataaggtaaaataaaatgaatggaaggcatttgaattgaacgaaatagttgaacaagacatcaattctttcaaaaaggcatacttttatctgtatataaaaatatatatataaaataaaaagcaaagatgcccattccactatgaatgggcaaaaactatcatgtaaacaggaaaaaaaaaataggcagctcccttcacgaaactacagcaataatacattccatcaaaaacaaaagaaactacagcaatacaagaaactaagacagctaactctatctatagatcattttttatcccaactagttttgatgggtaaatccctaaaacctaaaactttatttcacaccaaaactttacaaaaactacagttgcagcttttttatttattttctgctgttctgccacaaaacagctgaaatatggaaaagctctatataatattttcttactttcaaacatatttctttgatctaatcaaagataacgacgttgagtcccattataaaacaaattcaaatttgaatgagatattctccagtctctaccatttaaaaaaaaaaatctatcatttaaattttaaatattctcggggatacttttttaaaattcccattatacccttttcactacttaactcgacatacgtatatgcttttactccataatatgtttactctttcacaaattttaaaaaccaacaagactacagtataccaactcgaaaccctgatgaatgtcagacccgacaccgcatttaaaatgacaattataaaaaaagctgcaagtggcaccgaatgaaaacaatagtaacacattcagacatataaacagtcctaaagtttgcaaaaattacaagattaggcaaccttttcttggacagacttgattcacgcctatcactaaaattcacaatattctcagaacaaataggccattttaagtggatacttaaaaatatttaaaatgtgcttaaaggttttgattatcaagttctcttctgtaaataaatataacatattcccctctttcgaaaaaatataatatattcccaaactaaaactgtgaacagaagtattatgtacctggctgaagaagggtaactgcaaccagttgtacctgtcaatcaccatgtaaagtaaatgttaaagcgagttacagttcacttaaaccttgaagataagaaaatggtgagttttgaggtgggaacttactagggtcagaagtagccaacgaagcagttccggcaaaatcacatgcgccttgagcctggcccttcttctggaaatagctgtttaaagcataattacagtgagcaagaacagtgtttgggttgtaacaaaccccatttgtgtggatggggttacagtcagccccagccccacaagcatagtccttcttcttaagactctgtttgtccgccttagaaacgatggatactatttggccaagccgatcagattttccgacgaatatgtacgacagagattgtgtgtgcaagtggtaaaagtgtaataaaataaacttaaagtgtataaaagttgnnnnnaccgtgttgtagtatatatgtaataaagttggctttttgtatttttagtgtaaaa

SEQ ID NO: 162755 - DNA, 4306 bp, Cannabis sativa
cccccaaattatctctactatttctgaggctacacgccctttcactagacagactgcctaaattggtggttcagtttggagtatgctgaagagagctcgagctactctgagtgaagacgttgttggaccctctcttattgataatgagcaaacgacgggtgctgctttgcaaccccgccgaggaaaataagtctcattagttggaatgcttgaggattagggagtcctcgagcattctgtaacctctccttgttggtcaagcaacatcgacccattttgctttttgttatggaaaccaaactccaggctggccgtggaactatgcttaagaatcatctccatttcgataatgtttttgaggtgcctaggagtggtttagggggagggcttttacttttttagaacaattttattaatgtcaatgttcttactttttcccttaatcatattgactgtaatgtttctgtgtttataatgatatgaagtggcatttaacttgttattatggctctccttacccctctaataagcaatttacttggatgctgataaatagaattcatgacactgcccctttattgccttggtttatttttggagactttaacaattacctttctccaagtgataagaactcagtcaccgcctccctctcatgctatgcatgattttatctcttttcttcacaaatatgatctgatgcctctcactcataccgctaataaattcacttggaatcatggtctcattcttgaacgcacaagtgcactgttagtctttcttggtctactatgtacacttctgcgggtctttctcatctgggatttttttggctctgatcacagagcccttaaagtcactttggaggaaaacttaagacttagcaataggagatcccattttgctttcgagaaccattggctcactaatgagtctttctttcatgtggttgattcttcctggtcctcttctcatcttgcctgcactaactcccctcttaattcctttctttccaaataaaccaactgtgttcataccatcaagctttagagtcagtctcaagattctttaaaagagaaaattgttgaaccctaggctcttgactctctgctcaacaccaatcagcccattgagtctattgtttcccaagtcaaatctttgcaatcctttttggaatcccttatttataaagatgagatttatttgaaacaaagagctcgtgttggctagcttaaagtaggggataagaatactaaattcttccatcacaaagcttccactcgtagaaaaacaaatctcattaaaaatatcacccatacagatggttctcaagttagtggtacccaaaccattctttctcattttgtcaatttctactcaaatcttttcaagtctcaaggggtgaacttaaaaaatgagctagttgagcactccttttataggtgaaggaggttctattaattgagaataaaataatccaaaaaataagaaaaaatacatttaggctatttttgaccgtagatgatgatctaattgtgaaaattaacttcagagattaattgtcaattttcagagctcgagtggcgttggcgagacccactttgggtaagttggagcttaaatttgtaactcccttgggtgaaatttagagtcgataacttcataattgtgattgaaatgtaagacatgacttgataaaataatgaaatagctttgaaatataagtttaatcgtgtcagttagatcaatattgagtgaattatggtaatttttttgaaggttgttcaggggccagtgcccaggtggacatccagcactcaggttaacatgggtgagtgaaaaaacacattggggatgtattttttgatgccttagtgatattttgacatcacttagtccatttttgtattctggcgaagctaatcaccagttctcgaagatgttactgttctatagaaacaagagactcaaaactacccaatttctgagtaattcaccttgttggaaaagtgaaaatatgaagttgtgaatttgacacttcggacttcatggctctttgttattatgaaaaactaggcaaatgttcgaggcaaaatcaacgttggataagccaaacccaacgcacaaggccatttgttaacctaggcactgggtgcttatttcgtcgcatttggaatatctttttgatactacaatggttctggaacttgagaacaaggtcttctaccacttttttttgaccatttcaaagagaattcttggagcagaattggcatttgaaggatcaaaaccagtataccaggtttattatcaacctgggtgcttggcccaacatcaagtcaacttgggtgatgggctcaattttgatggcgctgggcccaatgccaggtgtcaacctaggcgatgggtccaatttccgaccacttggaagttttctttagtgcccaaaattagttgaatcgtaatctttgatgaaaatagagaatatgcctggaagacttttcaaaaaaactttgtggaattggcccaagttgacaaaatatcaacttgggcactgggccaaccctaggtgtcaacatgggcactggttccctgttctgccacccaagatgggttgtttcttccccgaaagtacttggttccccgtcttttttgaagacgaagaagatgcacgagtcgaatttttgctataaagcttggaagtggccgaggttgacagattttcaacttgggtgctggggtgtctaggcaccgagtatccaggtgctcaaaaatgaaagttctctgaatcagatcctaatgtctcaaaaatgttcgtggaatgtctagttcattttccaatgtaaagtttaattaacccattttcacttagacgggcctaaaaattaaaaccttagatggggctgtcaagttgggagctgggtgaaacccttgttgcccaggttgatttccaaagtgttggttcgtgtatttttagctcccagaacctcgacttggttgcttccatgtcttgtttgtacagaatactaaaagatagtgggttgaaaacgcatataggaatctgaacacccatattccaaaattcccagagtccacctgggtactggactggggacccctcccaagttgactgctatgacttaggactagtcaactctgaaatgttatctttcttcctcgtgtcaaagattaatatccatgtcactaggaaaagtttccaaattagcatatatatatatttaattttttagcgtcaattattatttaattgtaaggttactaatcgatacttaagggtcattatatgtatcggttaatactgacaccctaagaattagggtggtcttttgtgtcatttttaaatctatcaaccctcaaactgataccaaaagtgctagttgatatctttagtaaaagcattctttactactcagttccaatatatgaaagacaagattgtttacaaagtacatatagctaatcttgagtagtattaagattaggctatgtagtgtttagtgagtattattagttaggtgtagctgtgccaacaggaattggtttatgtgttaagccactcggttagtaatagagtaacatattgtatatatagttgtactctggaattgattattgaattgaatgaaattactcaattctctctctctctctctctttttcatattcaagctctctaagctaaaaaaatacgtttattaaacatattatattttgatcaacacgtttaatttaaaaatgacataattataatacgtatacgaaaaaatgattgttgttaagtttgatgataggggagataaattaatactcttaagaaaaaattagggatatttataaatccgaaaataaaaaagaaaaaaaaaacctcaaaactttgttttcctcactctttataaacaaaagacaaaataaaataaaactatgaatctattagaagtaatatttataattatacataattttgtttttttgtgtcaatttcgttatgtcctaaaatatttaatcgtgtattaaatttgtcaattatagtttagtgtcatacaacacaactataaaacatgttattacatatttcatttttgtgttgagtaacctgttaataaattgtattgtattcatatttgaggacttaatatgaataatattaaggtaaatgtgttgtattataaagggtaaatatattaatttggattttgtgttttgtaaaagttatagattgaactatctgttttgttaaatgataaaatagactctgtattttcaaaaatggtaaaaataggaccct

SEQ ID NO: 162756 - DNA, 1855 bp, Cannabis sativa
taatggttaattcattcaagaccattgatggtagaggagccagtgttcatatagctggtggaccctgcatcactattcagtatgtaacaaatgttatcatccatggtctcaacattcatgattgtaaacaaggtggtaatgcctatgttagagactctcctacacattttggttggaggactctgtctgatggtgatggggtttcaatttttggtggaagtcatatttgggttgaccataattctctctctaattgtcgtgatggtcttattgatgccattcatggatccacagccattactatctctagtaattacatgacacatcataataaggtcatgcttttgggtcatagtgatagttataaacaagacaagaatatgcaagttactattgcctttaaccattttggtgaaggacttgtccagagaatgccaaggtataaaaatattatcaatatttttcaagactttactaacaaattatgggattatgctgaattttttgttgaatttaattgcagatgtagacatgggtatttccatgtagtgaataatgattatactcattggaaaatgtatgctattggtggaagtgcttcacctacaatcaatagccaaggcaatagatttcttgctcccaatgatagattcagcaaagaggtattagttcttttcacttaatttctatgaagctatgaaaagtagtagtagtagtagtaatataaaaatggtctctttcttttttctttatcagattacaaaacatgaagatgcagctcataaacagtggaagaattggaattggagatcagaaggagacttgtacttaaatggtgctttcttcacaagatctggggcaggagcttcttcaaactatgccaaagcctcaagcttggctgctagaccatcttctcttgtaagctcaatcacagctggtgcaggctcacttaggtgcaggaagggctctcgttgttgaatgttgatcattattattaattactttgttataatacatttatatttatatatattatatagctccaactttttgtctatagtaattaataataatatggtaaagttttgatggaaggtaaagaaaaaaaaaagtgatgacaaatctactcaattgtatatcaaatttgacttccaagctttttacaaccttagcttgtttctttctagataaaccaccatttaatagtgggatttggttgttaagaaacattagccaaagtgttgattatatatgtctttttttttttctatatatatatttttcctttgaaatattaatgctaccaagttcgttcacttaatacttatatgggattgtgttgattattgttattgagaaaaacttattgtaagagcaaaactcccttgattgtggtatatgagatattgtttctctctcctttgtatttattataactaactactcaaaggctcacaccattaaagttttctgtactcgatacacgacagtttcaatttcagttgctataaatgaccccaacaagatttttcactatgtctcaataatattagcattacaatacaaatgccataaatagaaatatacagtcgatagagttgaaacaccagaaataagatgaaaatagttgtgtttttctgtatatcactagctcatacaaacaagagattaattttggtgttgaatttaataatttatacaaactttataaattataggaaaattctacaatacacccccttaaaatgaatatattgatgcactcatatctgttttagaattcgaaataatttattagtcaaattttttctcatgatcatgtacgttatagttatttaagacattctgcaaaatt

SEQ ID NO: 162757 - DNA, 544 bp, Cannabis sativa
tagacataccatgtaactgaacccagaaatcaagtttattcaatacaactgatctaggattctcccccttttgcagtctttggaaaaccagttgaattctgtcaaatgtccaaggactgccctcaatcaccctcccaatatcaacttcatggtaaaactaaaaaaggtagaggtttggttccaattctttaacatataatccacggccaggacgccacaatgaagccattttatgttgcatggctaaaaaatcgatttctctatccgtgataaatctacccacaaggcaccacctatcatcaatctctgaaagattatcatcgtccccgcatattacagtccaccaatttcttcttcctccagggtcattgaagcatagtgatcctccatatttgtgtgtgtgtgattgaaagtagccatagaaataacagtacataaacaatactaacagactaaaatactaaccatgtcaccaggacaagacagaataagcatatcagttttctgtttttaaaagtagaaaagtgaaagtattttttaaaaa

SEQ ID NO: 162758 - DNA, 2412 bp, Cannabis sativa
ggacaagttcttttctgtaagcatcatgtataattacaatgcacactatgatgatatatatttcataattttcttatttatatatcattaatttttgttattatataatttggcagggccatgaggataggtttagtgtttatgtacacgcttcaaaagaaagtccaactcatgtgagtcctcactttgttggtcgagacatacgtagtgataaggtacttgtatttcttctattctagactaatttttaatgagaatagaaacaatatatataccagttttggaagtgtcacatagataatttaaagtacgctaaaagcttatgatctcactataaattacgtttgatttatgttcattagattttatcttacaattgtttaatttgttcaatcagatcaatctatgtttgttcaaattaagtattaatcaccattccacaaattattaactcgttaattaaaaccgagtttcaaatttattatttcttttatagttgggtaaatagcggcataagtatacttaaagttttaagttattaagtggcataatcccaatgtttatttttagcggcataagtacccagtgtctataaaactataatttttctttaatttcgtcagtacaaaccttgttattttcttaaacacagaccacatataaggtttagattcttgattattgggtctagacagaaacaataagtatcagttacttccaaatgttcattgaataaatttaaaataaagtctgtactgacaaaattgtaaaaaaattacaattttattacaaacattgggtacttatgtcgctaaaaataaacattgggtttatgctgcttacaaacttaaaactttaggtacttataccactaaataaatattgggtttatgccgcttacaaacttaaaactttaggtacttatgccgctttttaatctttatagttacaacaatgtatagattttagatatcccatgtaatgtaatgagattgagtgtcatataatagcatatatatatatatatataaatttatattttcaggtggggtggggaaaattttcaatgatagaggcagagaagagacttttggggaacgcactcttagatcctgacaacgaacattttatcttgctatctgacaggtacacaaaattaattgtcaagtttgatcagactgtgggaattatgagatagattctggttaattaattatattcattattttaacttgttattaatctgtaattaatacttgttgttggtggtggtatatatcagttgtgtaccagtgcataacttcgactacgtgtataattatctaatcttcaccaatgtcagcttcgttgattggtaattatatattaagcataactttacatcatcatgatcatttgttttcttattcagttggataaattaaagttcttgttatataccaatgtgtgtatgttttgtagttttgtggatcctggtcctcatggtaatggtaggtattcagaacatatgttacctgaagttgtaaagcaagactttaggaagggctcacaggtatttttaattcattcataaattatacaacatttgttatttgataaggtgcactcctaattaattgattaacggtttttaacattatttaaaatataaaaatatgaagaactcgttattattagaatatagcagtaattgcatgttatatgtttgataagttaagctgtcacttattatagttatagtgatatattatcttttatgatgtttgagttaaagtgtcactttatcttaatttttaagtttttaagataggtcaggcctctataaatcgtcatttataactaaaaaatttgtgattaatgtattaatcacaacttatctttaattactataatttaaatatcacaaataatttttatttttttattaaaaattacatttagttacaataatttatttttgcctataataaaaagtggaattcaataagagaaaatatatatatgtccatgttttccataagattacaaaagtgggatttttgtctttactatttttgtattgtgttgtacagtggttttctttgaaacggcaacatgcaattatcgttatggcagacagcttgtaccacagaaagttcaaacttttctgcagggtatatatgcaattaattaatgtctttctcttttttaataccatttatatgatatttttacaagtaaaataaattagcagagacaacttataaacttaaaatcgaaaatttatcatcattattattatttggttaaatttgaaaattattgcaataaaatatttgcaccaataactattattattaaattatttaagaatttacccttacctattttaatactcacaatttaggcatttcttttttataggtataccaa

SEQ ID NO: 162759 - DNA, 3060 bp, Cannabis sativa
ttagtcaaaattttaagtcaatttcataacttaccaagttgactcagacattaatctattcacttcattttattttctcttaaattttaattctaaaagcatgtaaacacgtatacataaccatataatcagatacccacagtaattatagtattgaactctggtttatatttttctttcatttcttcatgcattaaactcagtagaacaaaatccttttctcaagaaagatatacaaaacaataaaaatatggacaaaggaaagaagcattgttaccaccatgggaaatttgaaataataatgaatgatttggttggtgtaatggtgttaaggtagactaggaggagaaagtgaaggctttgtcactttgacttctccacaatcactgataaaaatagtcttaagaggtctgttccagctcgaacgagcattctgagctctttcgtccccgaaaaactcagccaaatcattgaattgcttaatcctttcagctggtctgtaagttggtatggcagcaatggctgtcaccacatccaaacctgcataatccaagtgccaaatcaaactcaaacccaatatcattttcactataattgaacataaaagactaagagaaattttagaataatccataaaactgataagtcaaatacctataagactcattttggctaaggaagaacatgttcttgccgaatcaaactttaattggacataaaagattagagaaattttttgaacaatacttataaaactgtcaactgtcaagtcaaccatctaaaaagctaattttggctatggaagaagatgttcttgtcttgtaattcagacttattcaactcagacccaaatccattttcaccatatcatacattacaaaagagtaactgtcattaaacccaaatgccaattcttcttaatctgaacttcaagtacagaatccatgagacccttatccaaatccaactcaaacccaataacctactgaccctgtttttccaatcaattcccaaacccatttacaccataagaacacatcgaaatcagtttaaatgcacacaaaattcaactaccagaaaaataattcgtctgaaacctaccttcaagtaccgaaccgaatacaatgttcttgttatcaagctctgggcaaggtccaggaccggtggtgatcaagaactcgacatttcggtattctgggtcgagcttaatatcctcatcgtcgtcgttttcggagagacaaagcgagagcaggccaggtttggagtgagtcagagcgaaagatttggagtccacagtctcgacgtttcgagccaaacccttgggacgacgaacttcgccgggcttatcaccttggcggccggcgaggagaaactgaccagggaaaaccttgtggaccaaagtacccttgtaactggaagaagaggtcgtattggtgcacaatgacttgaaatgagcgacggtaagagggacgagccggccgtagaggccaagaacgacccgaccaagaagtacggattcggagcagagtgaggtgatgtcatcagcaaatgttctttcgggtcggaaatagttagggcagaggctgaagtccataaaaacccggtcagtgacagtggtgtccggcggagagggaggcagaggagaaggagtaggagcagaggttgctgtggtgggaatggagatggagagagaagtggttgtggataggaggagagagcggcgggtcaaattgagagggaggtgtttagggtcgggtcgtgggtggtggtggtgggggcggtgttgggagataatgtgggtgtggcggggaatagggggcggtggtgaggtgattgagtagcccatgaggtgaggaggagcatggtagtttggggggactttggttgttgttgttggtgtggatatgaccaaattgcacagaggggcaaatgctattggacgttggtggccacagagttgggttgtgggacccatttgagtcggtcgaactacagatgtgcaaatcaaatgatctcttctgtgaatgcctacattacgactagtcgtattacccgtacagaagctatgagcaaatttgaggtgggacaatttaggtgagtttttaagtctaattttgttttttatggtggtattgattgtatttataatatcaaaaatgagatttacatattatgttttatgcgtaattattttttttatatacgtgataagtaattgtttagactttatttttagtattgtaaattatttaaaaaaatttaaaaatttataagtgtttttaaatagctacaacatattctactataaaaaaattagactaaaaaattttattggatgctaaaacaaataagagtcttcttaaacaaccatttaagagagtctactataaaaatcctataataccgaatttttacaactactctaaataacattatctttaattagtagtccaaaaaaattagggataattacataatacacttttttttgtaaaaaaaattacatttttacgtttaaattttttttttttttttacattttttagtgtcattttaaaacaaccaacaaacaacaagaaaactatataaaagtaacaggaaaatagcaacaaaacatcatcaaaacaacaaaaaaaatttatgaggtatcatgtgttattcgttttttacttattttgttgtgaaactagttttgtttttaatttatgtttcagtattttaagaactgattttctctttattttttaattgtgtaaccgatttgagttattgcgtgttacttatttttattcattatgatataaaactagttttattttaataataattagtttgtgtcatttcatgttatttatttttattcattataacattgttatagaaacagatctatttttattataactgggttgggttatttatttttattcattatgttatagaaattgttctactttaatttataactgagacatctaactctggtgactcactacaaaaaatagctacttttagtgataactttagtcacaatataaatttttttgtgactaaatatga

SEQ ID NO: 162760 - DNA, 5475 bp, Cannabis sativa
  modified_base (3729)..(3735): a, c, t, g, unknown or other
aaaactctctcataattctctttctcggttgaaacaatctcttaaattcccaaatggtctcgaagctcctcggattggtctcaaagggggacttatgttgttatggcacgataatgttgatgttactttgcttcactatggtccgacttactttgattgctatttgtccttcgatcagcaacctgtgttccactttaccggggtttatggcgctcctgaagttagtaatcgtccacattcttggttgcttttaaaaagacttgcggacacagccccgcttctcccttggcttgccatcggtgattttaatgaaatcttgtcgaatgatcataaactcagtggctcactccgaaatgattctcagatggaagcatttagacaagctctcgattactgtcacttaactgatttaccttgttttggagatacttttacttgggttaagaatcggcacactgtgaattcacttaaggaaagacttgattggtgctttgtcaatcaccattgggaaaacactttcactctaccacagttacagcatctggacttcttcaattctgaccataaagctatctcagccactttcagcctccccacatcgattgctcaaccaataaaccagtgaagccgatttctctttgaaaagatttggttatcagaccctgacagtaaggctatcatctctaatgtttggtctgattcgcatccctctgtcgacttaattgcttcttttaaaaacaacttagatgcttgtgaaaatcggctacaacagtgacattttcgaaagtatggtaacatgaagaattcaattaaaaaagctcaacaacaagtttcttcactcaacaatgcttcggcaacctcctgggatcatgtagctgaaatcaaaaaatccgaatccatccttgataaattattggcacaagaggaagcttattggcaacaacgttctcgtgttgaatggcttggacttggagaccgtaataccaagttttttcatgccaaggcttcttcccgaaaagctaacaacaaaattaagttcctattggattctgcaggagcaaggattacatccaaggatggtatggctgctgtcattgaatcttattttgctggtatttttcagacatcagctatggatgttgaagctctcgatgcaactttgctagctattccccaattgattacacctgctatgaataaacttctccttgcgccttttacgggttctgaagttgaggatgcattgcgtgctatgggccctgataaaagccccggttcggatggtatgtccgccatgttttaccaaaataattgagaaattgtgggtgatatggttatcaaagtggttctgcagattctaaatgaaggggctgatgctactcctctcagtcataccattatcactctcattccaaaagtcaagaagccttaacgaattacggattttcgacccataagtttgtgcaatgtcatctcgaaattggtaaccaaggttattgttgctcgtttcaaacatgttctgccatggttatctctgatacacaatcgacttttcttgccaatagacaaattaaagacaacatccttgttgcttttgagcttgcgcatgccatgaaacataaggataagggtcgtcgaggtatcaccgctctaaaacttgacatgagcaaggctttcgaccgagttgaatggggtttccttaaggctgtcatgactaagatggggtttgcttctgagtggatttctttaataatggcttgtttatccactaattctttctcatttctcttgaatggccaagttacaggttcggttttgcctacaaggagtcttaggcaaggctgtcctctttctccctatctgtttttgattgtttcagaaggtttctctcgactcttgcagtatgaggaacagttgggtaatctcaatggttttgctatcacccgtcgggctactcctatttcacatttatttttcgcagatgatagtcttcttttctgtcaagctaatgaacattcatgtatggctatcaaacgagttctttacacttaccatcgagcttcaggacaattgctcaacccagataaatctgttatgtctttctctccgaacaccactttgggcatgcaattgttctttcgcagaaaacttaatatgtccatttgtgaatgccacgaagcttatcttggtcttccagccttctcggggaggaacaagaaggaactcttcagtggagttaaagaaaagatttggcgcctaatgcaaaagtggagagaacaactatttttagctgggggtaaagaggttctcttgaaggctgtcattcaatctatccccacttatgcaatgagctgcttttggttaccaataacgttctgtcatcagcttgcgtctatgatgtctaacttttggtggggctcgaatgaaaatggttccaaaattcattggcgtaactggaattatatgtgtaagacaaaatcaaatggtggtttggggtttcgctctttcattcattttaaccaagctctattggcgaaacaagcatggcgaatccttcaaaacccaaactccttgctcagtcagctttttaaaagccggtatcatcctcacaactcttttttagaagctcatcatggtcattctccatttttgacatggcaaggtattctttggggacgtgagcttctacaatctggtttacgctggaaaattggggaaggtcgttctgttttgtgtgggagtgatccttggattccaggacacagctcttttcaaccaatttcttaccgtggacctgcaaatggggtagttgccaatttaatcaccgagaaccgtgaatgggatcttccactcttgcaatcttatttttctgtgatcgatgttgacaggattatgaccatccctcttagctactttccaacatctgatcatctcatttggcatcatactaacaacggttttttctcagtgaaatcgggatatcacaaggctgccagtatagaggaagcttcttctgtttctgcaacaaagtccacatggtggcagtatttttggtctctaaattttccacctaaagtaaaaaaatttgtctggcgtttaatgcatgatgcacttccagtagccaaaaatctggtgcagaaaaaagtccttgcagatgcatcttgttcaatctgtcgccttgcgtgggaattagttggtcatgcgatgtttgggtgtaaatatgcatgatctgtttggagagctactggttttagcttcgattgggttcatgcttcgtcaatgattaatggtgattacatcatacatctctctaccatatacatcaaagctgaattgagtctaatcttgtgtattttatggtgtatctggaccgagcgtaacattgtggttcacggtgacaaagccaaaactgctattcatcttgcaggttttgcaggcacctattttgagaattttacagcagctcaagcaaagaccaagccccctccgtctactgccagagccactacttctgcttcttctctatctgcttctgctctgccgtttcaaaaggaagttccctggaagcctcctcgctctggttctttcaagctgaatgtggatgcggctttaaatgctagtcaacatattattggtgtgggagcaattgttcgaaacgttgcaggttttgttgttgctgctctctctaaatcaatagttggcaatttcgcatctcatgaaatggaagcnnnnnnnttgtttcatagcctcacttggttattacagatgcaaatttcaattgactacattgagacggatgctttaatggtttcaaatgctctgaacaatccggctgctgcttttactgcttttgatgatttaattttagacatttcaagttttttatcctttttccctagagttattgtatcacatgtcaagcgtggtgccaatatggctgctcacggtttggctaaatatgctctagagttggatgaagattgtttttggttggagtcttgtcctcctcctatatactcttgttgttgtaaatgactttttgtcctaatttatgataacaaggtattttctcaaaaaaataataataataataataataataatgcttcctactaaaagtcaaaacctgccgagtaatttcacgtgtaaaattgctttaaaaaaaaaaaaaacattcacgtgtaaaacttgaatataactacttgattatcttcttattagaaaaatctattctatactcttaaaaagggtgttatagtatcctttatttattttggtacttacagagacttttttagtttaaatttatttattaattatggttatgaaagtgtaccttattgttatttatttatttatttaaaaaaaaattatataatttataattttaaaacattttggagggtgtatatacagacttaccgcttcttatttacttaaatattgtacatatttgtagtcaaaacttcatgctttagcaaataacagaaaataatactataatgtagtacaacaacactttccaatataaatacatttatctttaataggactaaaatattgtaaattatataatataaataatcaaaattttaataataattttctaattcttaaaatttaaaatttatttcaattaataattatagaatcaaataaaataattgttcattaaataaataataaataaataattgtttataatttgatattttaatcaaataagtttaattaatagggtgaaatttggaaacatggcacataattaattaatataaataatcttcaaaataatcattgtaataatctattttatttataattataaataaaattacgtagatatatctctaactttaattataatctattgtatatatattatataaacgtaatgctagaaattaatactcacatattacatccaaaaattacacagctcaatatatagttaagatactattaatattttcaagatttaatttaattaattaattagtcattagtatatatttatatcacatatgattcatttcggcctcaagacaacttgagaggagcttagctagactgactaagttgcttaatattattaggcacaatttaatatatggtaaaattaatttggaggaaaaaatttaatatatgaataattattatgatacacgttcattagtaaattgaacggaattggatgaaaatttttaaatctagtaataatctcaataatttggcgatacaatttaataaatgttaaaatttaagaaaaaaaaaaatcttaattagacaattatataatgaagcaggcaaacgcgcaatatgcctttaaagttcaactataaaaggggatatgaagtgcaaaataaaaaaaggggaacaaattaattaattaattttttataaaagaaataagggatttttacacttggtatctttttttgccattttttcacatttttgtctttattcagttat

SEQ ID NO: 162761 - DNA, 2918 bp, Cannabis sativa
atggtttattttgtgtaataagtttaattcttgagtgttagtctgctgattcaacattgaatacttgaacctcctggagattgcagggttcaatggagggctaattttgatttattattatttaaaagaactttagaaagattatttggaagaatgatacaaaataagtatttttttttttttgtgttattggcatgtttgccccaaagttctcgctaattggcaaagtggttcttaaatacttttttgtaatcaagtccttgaatttgatttatttatcaattacttccattataacctttttaaggagacatctgctaatcgacggtaagttgaaggactatattgcaaatatgcaatgaatttaaggagcaaaattataaaaaaatatattgttaccaaatttaagaatacgaagttaagtgctattgtttataaattcagggatttatgctaagaaaatatcaaaaataattttgctaatctcaataaattcaaggggcaaccatgctaaaccctttcttttgtttgttcttcacatgtttttgcctctgttttttttttttttttttgctgtaaagattcaaaataaaattgttaagccaaagtatactgacaattaaaaactttgaatagatacaatggtgctgaaggtctccacactaaagtgactgaatttgtgaaggacaaggactgtcttgtatgtggtccgggtgttctggttgaactagattcttcattaacattagagaaggtaaccttcatcatcctatatttgaatgtgatatcattatcaggtaatttattttgttcttgacttgcataccatctgggaaggtaaagggacgtagattttgagcccacttgatttattgctagtttgattaaatcatgcatcacttaaagaaacaaatggctgacatgtttcttgatatttgttgagaatttgtgtggatgagcttagagatactttttggcccatacacctgtttagatcttggtttactcttattgaggtgacccattctatggaagccttggtcggttgagcatatcccccaaagtgttatctcttttgttctacgtaaattttaactgattcttttatgagacttgatttgtccatattatccaaaatgttgtaacatattagcttctgatggtgattgaaattcatagttagaacgaatgattttgagattgccatgtatattaagggtttattttccttgaaatctttgtgtttaactttctaaatcatgaaggtttgtgttttttttttttctttcgcaaagtggatgaaggtttgtgtttgctctaatgagtttagcattaaatacttctaagattccaatgttaatacttttcattgtcatttgtttcctaaatagtatatattttaacaaagttaatttgctggagtggtcacactttctattgagatgcatcccaagtcattatttcttcgactccaaatatttgtctggtgctttaaattgtttaggaaaagttttgccaaatccttatcaaagagggggaataggtttcactaatattccattaggataggaaacaagaaattgcctctgtttcacactgatctgtcatgttttgtctattccactctctacatgttagtttatgccgcgtctccatcaattgttagatcacaatttctaattagggtaaaatttgtgcaatgacaaatccggctgtcattcctaaaactatgtctagccaattttcaactatataagtttggtaaacatgtgcttcattgtttgtcttgttctgtcaaaacagagtaaaatgactcactgttatttatgatctggtacgatggtaattatgatcgaagtttgaaggtataattttaatgattgctagtttctgtgtgcaacagttcataagtttactcgaggaacatccaaagctgcagttgtcgaaggcgagcatcacacatcgagggaagaacctttacatgcaggcacctccagtacttgaagaaatgaccagatcaaacctaagccaaccgcttttcgaattgatgggtaaaatttccaaggatgttgtccatgcaaccggtacagtaaaaaagaatgacacaaagacctccagtctgagaaaattacgtgttgttttcaaaggagttgatgaagttgcagatatggatacagcaggtggggcataataattttaggtaccagatcagatctaattagaaaccaaaacccataaagacttttaaaggccttatctccctctatgactatggcagtatgaggataaaaaaaatggtggggtaaggttaaattagctttctatatttgtaaagttcagtttcccacagattttctttaattgcatagaactgtaaattgaaccccaagagttcattttgcagttaactttaactggattaaagatacagaattagatcatgaattaccattattggcattttggctgaccctcatattttgttttactttttttttttcattacccttcatttatgccaaagtattctactcccaaatctataaatgcccaaaattaagagtatttttgattcagatgtgatctaaaagcccttgtaaaagttattcttacttcaatgcaaggtgttaatctttaactttgacataattgtattaaagacaggctactgccaagaatccatctttattctttaatcagtgatgagtgttttttgtttatgtttgatcacatacgctcatgtgaggagggctgttcagtgtcacgtgacactcttttggaatatgtattttatttttatatatataaagaaacaagacaaattcttgttaaataaggctgttggctggaagcaaactctttacaataaaatctttatatattaaaaatgtctatctaacgacatttcttggtttaac

SEQ ID NO: 162762 - DNA, 1480 bp, Cannabis sativa
caggggtaggtagctcagtaaggacacttttggggggaatattcaaacattctccacgtgcatcattcccactagggaccactttccttccttcaccaattgccacgtcatcgtccttcgcaatccactgacgcctagtaccatgcacagcaccatgcatcgtacacgactgagtgtcgacaactaacatcttcggtctgccgtcctctttcttctttgatctgtcatggtcagccggcgcctgagaagacccttctccaacctcctttcgaaaagccagcggtctcctcttccaattgcctctagttctctgcccaactccattgagcttagctccttcattgcattggacgatttctctcctgtaagttgctgtagaaaaacaacttcccgacggtccctctaccttgatccaaggaccatacatgcgcacaactgctcctttaggtggtgtaacccatgccgttggtgctgaacaatctttatttatgtgagcaagcatgccacagttaaaacaaagatatggtaatttctcatatttgaactgaacccaaacttccggtattgaacccgacttaaggaagaatcctactgggattggatgactgagccacacatctacccaacatcggagaaaaccacaccttactgtctcctccttgcttttgccgtcggacttcaccagttgccccaccttcttggcaagtaatggaacattattttccgagagacaacaggtgggaagtccatggaactccacccaaaaacgcgctagttcaaacttcgacagtcgcacttcaccttcaatcggccatggcttcaaatttaacaagactccattcaccaaccatggtcttttgttcatgacaaaagtgcagtcagcctccgactcaaagaagaaccccagcactccatcttcaaactttttcattctccacacatcctccaagttccaaatgcccatgagaatctttttttaccacagaggcaaccatgttcttacaccccatcattttaccaacacaagctttgttagcaactatatcctctaaactcaaatcttcaaacaaatccatcattttaatctccatttcactgtccctttccagtgtcttagcaatcatactatccctagtatccacttctattgtcaccatttccttctctagttcattcactatcaccatgactcaagcagtaaagagaaaatgtgcagctaaaaaaaacactttgattcaggcaagaaacaccttaaagtcacaaaggactagactcacacccggagccaacttcccattgtatagtttttttaaagtgtggaatataatggatccaagtgtctccactaggttatgttatttctatttcgagattatatactgttttttattttataaaaattatttttattttgaaattatgttatttttccatttaaaattatgttatttctatttttataaataaataaaaaattaat

SEQ ID NO: 162763 - DNA, 4857 bp, Cannabis sativa
tctttggtattcaagaacgaggattcacagtagtctgccgcatggtgtagttgagaacgtaaatctctcaattccttcaaacatgttcatatataacagaccaaacatataaatatttaaaaaaaacataagtaaaaaaggataacaatcgttaatgtctaccttcagagacttgtcaaagtgttcagcgtcattaaactcgccgacgaaatctttctgcggccacaacttggagttctgcatcctcttcttcttcttgttgttttttttggtaagaacagaaagaagtgataataataatagttttaggatgtaagtaacggcaacaacggttgagctggttttgccttatccttttgagtttttttaaataaaataatttgatatgaagataagtggggggagctaagctttttggattgtaatgagtttgagagtgatgagacagagaagtcggtgattcggaattggagctaggctcgtgataatacactcactatgtatagcatggaaaaaccaaaactctaaaaagtgatatattctataaacgacaaatcaagtttcagccccgtgagtttgtgtccctcaccttttttcactttctcttaaaaaaattatatatgtacattcatacgtggtgtggacaaatataaatatgtagatgaaacaatcatgaacacaacaaatttaacagactacattaattcacaactaattagtaacaataatgatagcataatttgcttgtttttgttagcttgtttaaagcattgaaccttttttttctttccacaaaaaatgatatcaattacactagtgttgggttacaagatgagaggcctagctaagttctaactccaaaaaaagaattaagactctgccaatagttggcggtcccacattggagcgagccagtttggggaatctggagaacagaagctacaacagatcaatgtgatttcccaaacattgcaaggattgtagaagaaagggccttgacaaaatttactgcagatactgaatcatatatcgaaatcaatggtgcatctaccgagcttctctgcttgctctattttagcaaggattgattggctattagcgattgttgatccagccaaaatatctttgagattctggtatatcttcataggttcaccattagtatgtttgtctttgtctttgccattggtcagtgattttgacttgatttcagattggagagctggccatgcaaatcaccaattgttgtaatgatgaagggtcatgaaggattttagaagctttcatgaataacatatttgattttattaagatatgaaataacaactaagaaaccagtttgcacatgcagctcataactaatttaggggatgtcaatgagttgatgcaaaaatcaattgtgttaacatgtcaaactaatttagcaaacaatttcacttaaaactatgttcacctttttgtttaattttattatcttctctgatcttgcgtgacttagcacgcataatacatagccaaggtctctcttcttcatattcgtgttcggttgatataggtatatgccaatggcctttttctgattcctgaaaatatatttcaccacgtgaatctaaatcccattaccatggtttgtaaagtatacgcaaagatagacacagaagcaaccttttcttaagataatttaatattattattttcgtatgtgattctttttctaagatatataataatatggacaaaattggagttctattgtacctggattacaacagagcaaggaggcggcatgtgaaattctggaccagcatcagaaaaagtgaagcgcacctatgattttggacagataggcaccttaatgagaacaattgcaatagaatatgatatcctaaacagcattatttttggcaaaaagaagaaagtgaaactagaacatgtcatccaattccacataattctgttcattgagtacaagctcaaacatacaactaccatacttaacaatttttcttttggctcaatagagcttttattactcacttgatgcctttctttccatctggggaagaaatcatttccaaggagttgaaatgtgtgatctcgcatctcatcatttgtcaccagtaagcttttgaactttatagctgcatacaaccagtacctgaacaacaggttaataaatctttcctcaaacgaaagaaaaaagaaaaaatatatatatttaagttataattatccatgttctcaatgtgcttataacagcacaggagaactattagctagtgtgtgtcttcttacaagaattgagtacgtaatagatcaacgggaagaagtagcataaaagtatttgttccaaaggggaatcctagacgcgcaaattttcaagggaaaaaagcttgttctattatgataatcatacacatctacaaatctaaaacgtatcataatatattatgtataagtaaagtgtaatgtctaaatgtcatgtctctcaccaatcatcgtttgagcctgtaggtgttgcatatagagcatcagcatttttccacctatctacgaatgccctgttggttggttcattcatcttgggtccagtaacacgtctgttatgcagaacaatgagtggccatttctttgaaggaaacttctgtcttatgccattagcaacagcattgatctacaaaattcatcaagaaagagaagaccaataattatcactaaattaatagaagaaaaacaaaataagttaactataatagcgtcctacgttttaaggccatcacataacttgccttggatggcctgaatatcttttggctgaaaagtccaacattagctccatcaatcactgcttcaaaaggaccataataatcaagccatttctgcaaatttaattttgttccatcatgatatgttaaatccattttcccaattagtatcaataagtactattaaaagacttgcatacttgaaatttctgaaagtttgaatgtttctctttctcaatggctattgaagcaactgattcagcaaagttttctgtttctttgggatcaaggtcaatagtaaccaatttctccccacaacatctgcacaaaccatcagcaccaatacttgtttgcaacacagaccactttcctcttcctagccagccctggccatgccagccaccccctccactctcaattgctttctttatttgcctttcatcccattttgttttccccactcttgaagctgctatgctattaaaccagttaataatcaaatctgcagttgagggtgagaccttccttacacttgcccttagtttatgcaacaagtaatataccttatcccccttaccaactcctacactcaccctcaaaagagcctgtagttccggctcttctggatacacgccatgttccaacatatgttgttcgacagcgaatgctttatcaatttcaccactactagagaaagcagacaaagctggaccataggaacgaagtctaggatttatccctaatgacttcatttgtttcaccatatcaaaagccatgtcaccattacccattgacattgccattctagccacagaggtcaatgcagcttcattcattgggatgttctcagaacacattttctcatagatctcaaatcccctctttcttgcatattgctttgcttcttcatctacccatatattcttatcttctttgttcttgcttccacctttcacatgtgcattttcatcttctccttcagtaggatgactgagtccatccaacacacgataatttcgcttaacaaatccgttacaaaaccagtttagtttctccctttcgttgaaattaccatccgaatcatcgagcctattactagaacttaactcatcactctcaacaactccatcacttccactagtattaccatccaagtctcttgatttagccaagtccaaagaacttgacgcagaaacctcaccagaagagtccatagtatccaaagtcctagaagcactcccacttttagcagggcgaacaatacccacagctgcagaagaacagagatataatagtacagtataatgatactgcccaagcttgattccttctctttgagccaaatcaaacaactgaattgcactcatgacatctcctctctttgaacacatatctaatttaggtctaataggaacttcaagagtagtatcttcttctttactttttctggacttttttcccttctcttctcccacctgcttaccacttttgacactaccaactttactatccttatctctagatttcacagaagaattcccaccattcaattccctcacttttctcaatccctgatttcttctcctatttttgggtttgttgaagttattttcagtcttttcctctaaattaacatacttttttccagaatttttaccaaccttatcaacatcatcatctatagaccttaaatgagaaaccccattactatttcgttttacagttctggaatgtatagtagtttttgtatatggtttttggtcagtggcattcaactttgcaacaacatgtctaacgttatctttaagtagaagaagttgagagaggtgagttatgtgtttgagaggtgagaaaatgagaaaacgagaagagtaatggaatttgaaaacatgaagggtagatgggtacttacagaaattaaggggcaaagtatgatgcttttgatgcagagagttaaaggtgaaggaggaggaagaagcggaggccatttgtggccgttggaagctcctagtcaagctcatatggatacgaatatataatagattatatgttagataaattaacaattaaagatcaatttgtatataacata

SEQ ID NO: 162764 - DNA, 1863 bp, Cannabis sativa
ataagatatgaaatatgatcacttaaccttagtttgtgttctgaacctaagataggtacatattactagtgttgaggattttccaatgggaaatcattagtcaaaagtccaaaaaatcattatataactgtagaatttgtcctaatttaagactttttcaaggcaactatgtttgatggtattggaagaaagtttaaattaaactgtattatagttgttggcatttactctctttcttagatatataaatcagataaatcttctctatgtatttattagtaagagtgaatataatcactggaattgaaactagaagtcttctctactctttaaaataggaaaatgggaagagaatgaaaaacaaatgacattgtttcaaacattttttactttaaatgttttataaataatcaataaaatctacttttcaagcagtctcaccatccaattcatcatgggagagtgcaaaactgagtccgaaacagagtttttttttttactattttattttttaagtttcaaataggacttgttgaagaaactttctcagaagtgaaaccataaacaaaaatatttatattttcctgctgtaaatacatctatgtaaatatttgatcatttggtgcaaactatttgtttaattttcaaccatttataaacatttcatcattcaattgtcaacagacttcaagaccagaatacaatcaacttctggtgaagaagcctgaaggaggaagtatttggccataattggagaatatagaagttgaatattttgtatagcactaatgtttgtcattactcttgaaagtttcaattgtctaaaagtttgtatttttgaatgtgatcacttgattcaatgacaatcaagtttgaaacattagcatggaactaatcactggaagcagagtataccccatcatgtgtttagctttcaattttgaatcaatgtaatgtttggtagtacaagaaggaaagacactttggtttcctcaacatcaggttataataataaatcaaaagaaattagcattttgtgaatatcttatttatactgttataataataaatcaagtacaagaaggcaacactttcgttcaatactgctattttttttcaagcaaggataggtttaatgtacaacctttgtttaggccttcgtttagagattgagatcaaggatttgaagctttcaaattatcttaatggtcatttgcttgttctattcgaagtactcacttgaccaacatcaaggaggcgagttgcaaactagtaaccactcttcaccgagtagtatatcgacttctcatgctgccaaatagttagccaacaatgtcccctcctactttgtcgatacaccaacgtttcaccctagtgtgggaacggtgaagctgaatacagatgctgctattttggggaacgagaagaagctggggttaggggcgaaactctgtgaccatgaggcgatggtgcttgttttggttgtgtggccttcttccttaaatcttgcaccagatgtttctgagatcctttttcattctcaaagggattgaactttgtaaacatctagggtattttaatcattgaattggattgttttcatattgtcaacgttttacaagcaaaatgttgtgatgattcccatttaggtactattgttagtaaaataatttgatttgtaatgatcttttatatgtctgatttgttcattggctaatagtgttactcactctttagaacatctctaatggtactttctatcttgttagctaaaatagttagaaagttaaaatagagtcactttcataaatatagctccaatcatgctttttattttaattagtatttaattattttaataat

SEQ ID NO: 162765 - DNA, 1555 bp, Cannabis sativa
tcaatcttgttgtcatacatcttttccaaatcatttggtatctcaggattaaaggaagtacagagatcagtaaagtacccattaattatacctgagatttcttttggattctccctcagccttccttctttatcttgcgaacaccacactttgttcctccttctcctaatagctgctgaagcatagaaaaattttgtgcttctatccccaagcttcaaccaatattctcttgatttttgtctccacattgactcttttttcttccaagtttcttcaagatccaagtgaatattttgttcctctaagcaaaatttctcacaaattggctgttgctgtagccaatggagacgcctttccaagttgcaaatagtttcatcgagattgtcgaaatttcgtttcctccactcttgcaaagcccgcctagttttatcgaagttttgtagtaaacttcttggatttctagtgttgtccttctcccagactttctttatgtctcccctacaagagtcttctttcgctcacgcttcataaaatctaaaaggaatgaatcctttactcttgaacatgtgagtatcaagaagtattggggcatgatccgatacagtaataggaaagttcctaattccagcaagtggtaactctgttacccagtcgattgatcctgtcccacgatccagtctttcaccaactaatcctccattattaaagcgcttattctgccaagtaaaagggcagcctttgtacctcaggtcaattccccccgaggtcagacataactcttccaaccatctagtatctctcgaagagactttatttcctctcatcttctcttcgatgtttagaatacaattcagatcccccaagactatccacggctcattacactgataagccttcgaagcaagtctcaaccaaaattcttctttgtctttttcatagggcggaccataaactgcatataatctccaagagaaattgatctgggatccataattgtagcttcaattaagttgttacccttgtcataatggagactttaatatctctactccagaacaggcagattccccctgttagaccatttgccgcatgagtttcagttccagtaaacccaagtcttctagatatctcctccatcttccctttatccaccttagtttccatgagaaacacacactctggcttttgttttctcacccaagccattaaggcttggtttgtcaggtctcttgcgaggtctcgacaattcaacgatagtaacctcatttagagttggggggcatgctaagggccgcctcctcacccctttgtaggttttgctcacattcaacatgaacatcaatcaagtttagagaatcttccaacatttttgtgacgttatccttccttttcctttccttgtgtgcctggttccttgttctcgaacctaatcttgtgcctactcctcttcttctcttattaggatatagaagcagagaaaaatagagctttattcattgtaaagtgattgaattaatacaacagtggaaaggaaatagtccagtatttatacacc

SEQ ID NO: 162766 - DNA, 1819 bp, Cannabis sativa
ttttcaggtggataatattagtaaagcacttcataaatgtggttatcaaatgcgtggattcgaaaccatgtacaacggtcacactggccggcgtcttcctgctatgatcttcctcggaccaacgtattaccaaagattgaagcatatggtggatgataagatccattcaaggggacgaggccccgtgcagattcttacaaggcagcctgctgaaggacgatctcgtgatggaggtcttcgctttggagaaatggaacgggattgtatgattgctcacggggcagctcactttctcaaagagagattgttcgatcagagtgatgcctatagagttcatgtctgtgagcgttgtgggttgatagcaattgcaaatcttaagaagaattctttcgagtgcagaggttgcaaaaacaaaaccgacattgtacaggtaaataaatacgattcgatcataggtccaaatctgatttatcttcctttctcttttaaccccgtaaatcatttatttatctatatccaggttcatattccttatgcctgtaagctgctattccaagagcttatggccatggccatagctccgagaatgctgacaaaggaagtaaaaccattgaaagacctaaagaagaaaggaggctgagaaaaacccgccacaagacacttttcggctatatttttctttgcagagttgtgaagaagacaagttgtgtaagaagttgaagttgtgaagatacgattcggttaagcaaaaccagtcaaaggagttggtatgagagagaaagaaagtagcaaagcaattatatgaaagtccaaccaaccaatttgattttggtactaaaatcatttgagaacaaagaattgatttaaggattaagcaggtgttgtattatgaggttatactaagtaagtgctactgcatcagattttgagggactttataggagaagattcagattgtaatatattttgtttaatcatgttcatttatagtaattaagcatcaaaatcaatattgaatttatggtttagtcattgattgttctattttattttattgtagcaactctataattattgagaatttaaagtggaaaaaagaaagaaaaaggataaatatttctttgccattagtggcaacacttctctattcttattttattttaatttgttgggaatgttgaaaatatgtctatgaaaaggggactatatcttgagttttgttttctttttaatttttttatgctacaaaaataattatgagattatagaatttgttgtaaatattattctacttttactcattttcttgttgaatttgttgatatagcactaattttttggaggtaaaaattattcttatttaacaaaatataaaatattaagttaataatgatatgtatgtttgaaatatgtaataattttttgccttcaaacttgtttattttttagcaaaataaataaattgacatgtcttgaatttttcaaactattaaaattagttactgaattattgaaattgtttgattaaagattttagttctattttctttttttagagtttagcataataaataatacttatgtactataatttaagggttttaagtttaaacttaaataaaatttcaccattctctcatcagtgaggtagtctcattgaatttagtaacatttttctaataaacgcttgatatgaatggaaattcaaacaattaccatgttaagcctttgttaataaaattaaattcaacaatttcaatagtttacacatcatctataatgaaaagttattcctaattaacttctttttttttttttt

SEQ ID NO: 162767 - DNA, 3979 bp, Cannabis sativa
  modified_base (3774)..(3776): a, c, t, g, unknown or other
cctcttttaaagacacatctacagtagtaatacagcagaaaacaaagggattacaaacagttggtggataaggtttgtgaaaattacaaaaaatagtccggggtcttgcgagtgttgtctggctcaatttgccgaggtgctgggtcaaattgaagaaaattctggtccatattctccccaatctccagtatggcagccatattcccacaacggtaacaatagtttggagcactaaataccgtcacaacattcttctcctaaaaaagttccattgaaagtttataatacttacagattgacaaggctcaatgtttaatgatggataagatgaaaaacaacttcatttttggttaacaaacctggcaccaattgtatccttccatcacaagctggtgagcccttgaaataagggaaagtccattcatatggttaaattgagcagctatgtcctgtccaaatgtgtaaccagcaccacgaggggatattccccatccgcagcggtcatctggatctgaccacaaaagatcacacataggtccttcatgaggaacctgctcgagcaacaacatacatgtcagacaaataaccatgcagcgagatgtacgccaacaatgtaaaaggcgcagcaggaaaaataattcagtgttcacaatcccatttagccaatcattggattaagacgagcattaatacacatacctcctgtattcgatccaaagctcgaatgttatccaatgtatctaaagatggtgatagccctccatgcaagcagaaaatctaagatacgggcataagagatgatattgttaagaaatgtataattgtacaaacaaaattaactgaacaaaagtatcccaagttcaaacctgactctcgataagagctgtaaggggtaggtaatcaaataaatcggtaaaatatttccagacatttgcgttcccatatttccgcaagcattcatcataaaaaccatacctgataagacggccaaaaataaagtatgacattgagcaaagagaagggaaccagtatcatttcaaattctcaatactcgtgcactatcaattaggatattagaatgatgtcaatgggataactgagatcaactatcatcaatatccataaaaactaaagagtctatcatcaagtaactaaccaaatttaatgaaaggaaaactgaaacacattttttccatccattactcgcccaaaaaaatattgttaacgagctatgaggaatgaataacaaagaaataaaattcttacacttgagtaatttgccgactctcatggtttcctctgagaattgtaattctatctctgtacctgacttttaatgccaccagaagtgtaacagtctccactgaatagtacccgcggtctgcaagttcgcagcattaaattgagaaaaactatcgttagaggatttgaaacgtcaatataatggatgcagcttgtgttacatgatccataatccgttttaccaacaacgaaacacatatgatatatttctcaccaacactttagcatgtatttagatcatggattttggggaaaaaaaatcctatcgagagaaaatgctagataaatgaaaaataaaacagtttcccaacaacttgaaaattctttttttcagacttctctttataatgctaagtcttccattttcttttcctactgttctttattaagtatttctagacattaacaattaaccaatccgatagataaaacagttcaattacaaccgatcaaattcgttcatcttcactttccagcaactccaattctaataacatattgctccacagaataagtgaaaaacgatattataatattccggcctccaaattcacaacaaatggtccgcataattttcaattcaatcaacatgccgaattcggaaacaatgtacgaaaagaaattataaatacaaagctcacttcatcaatcaataaacacaaaaaaaatgggaaaccaaatacagattcaaatcatttgcgtcgaatcaaaaaacacctcctcaaattaatcaaaaataaaatgaaaagttagatgataaaagaaaaattaatttcttagatgaagagtgagaaattaaaagactcacctacataatctcccataaaaaggtaattagtatcaggtgcattcccgcctatccgaaatagctcgatgagatcgtagaactgaccgtgaatatcaccgcacacagttaccggacacttaaccggttgaacgttccactcctcgaccagaatcgccctcgcctgatcgcagagcgtctttacctcagcctccggcaacggcttacaccccatcagatgttcgatctgacggtctagatccgcgtgagaaggcatccttgctttttagaccgtcagatttggcaaaatagtctagccttgccgattccgcagatcgcttcccctccaacttcggggctcaacaccgaccgccgatcgaacacgacagatagacttatgatctgcgaaaaatcgttagtacgtcaaatttttatctcgaagcacaatgagcgagaaaaatcggtttgaaattcggtaagctttcgaccccttgatcattccttgttcccttttatttttttgatttgtctcgaatgttttaaaataaaaaagaaagaaggaaagaaacagaaatagcggaaattaaattgaacgaaaattgtatttacgtaaatgtgaggtggaaagagggaaatggaagaaaaggagggagggattggaaagagactgcgaaatgaaatgaaattaaatgaaatgaaatgcaaaatttgttttggatttgagaagtttggtttcgtcaaatattgtagagaacgaaattttttctctcccggtggctccgctgagtcaaaagaattgtgctaacgacacgtgttagtccgctcagttttgaaaacactgttccatactcccaccattcaatttatttatattattatctttctttaatattagtctgaattgggcaaagtcattgagttgtcttggtcaaccatattcatgattttattaatactagattaatactatgtttgtatgttcaatgcaatatattatattcttaatttttaatttttattttggttaactatatttttagttgtacaattaatttttaaaatttttatacatagtaattaatttttaatttttttaaaaaaataatatttaaagttttaaaatgttaaaatagtaaatataaagtttaaaaatattaaaattgaatatacactctgttatccgaaaattctacgatcggacacttggtaagaccaaagtgggaacatggtttctgcgcgaggcatacaagaggattaaaagaaataactcctgaacctggaagggggtaagaagtaacggattccgggagcagtgtcctcagctaagggacctagaaagcgatgcgagttcagggagatattggacacattagctcctcacaaaatggcgctccataggcggttacacatttttcaaacacaagatcagatattgttccctgtaccagaccatgataatgcgcgtacgcacccttgagcatgctttctgctcaactgcctaagtagagactatttcgtaaaggagagacctttagatgaaacgtgtccaaggtcgtacgaaggttctcatcagtcgctctacgctgtacgatgaggaaagttcccccagtggatggtcagattgtccttttgtagtacaggccttagtagcgtatggaggatgaaaccctaggtaggtaaagggtatnnntttaccccatgtgtgcctataaatatcctcgttcttacgaaggggggagagacctttcgtgtgctatcaccctgctaaaatctaagcagtaacaccttttgtacaagggtttttcatacagtaatactctgtaatcaaacactatccgcccaaagaggctaataatatagactcgtggactaaggattattaacgcctgaacc

SEQ ID NO: 162768 - DNA, 1546 bp, Cannabis sativa
attaattcaaagctttggtttagttattttgtttctctatggctcccttaccctttctttctctcaagcctaacactatattggcttttttgggattcatactctcaaatctggcccttctttcaggtctctctctctaaatctaatcatatataatatatgaatacaattaattacattcttaattatacaatttatgtgccaaaactaatgttagagtgtgctagtttaagtctagattaattagctttaatttttatcaaatcatatatatattataataaataatagacttgaactatattaggagtcttcaaattatggaaaacattatgttttccaaaataaataaataaataataaaaataagttgtttgtttgtttgtttttgtttttgattaaaaacaaactcaaaatatcattataaattggattatagaaattaattaagaatcctaaagacaactgagtatgtatatttattttaaaattaatttatttaaattacgcgattgaaattaattacacattattgtatgtaacatacagacgcacaatcaataggcgtttgttatggaatgttaggcaacaatctaccgcaggcatcagaagttgtagctctttacagatcaaacaacattggaagaatgagaatctatgatccgaaccaggctgcattaaatgcgctcagaggctcaaacatcgagcttatgctcggtgttccaaactcagatcttcaaagcctagcaaacccttcaaatgcagcctcatgggtacaaagaaatgtgctcaatttttggccaaatgtaagatttaggtacattgcagttgggaatgaagtgaatccagtgaatggagacacagttagattctcacaatatgttctgccagctctagttaacatattcaatgcaattagatcagctggtcttgaaaaccaaatcaaagtatccacagccattgatatgactttgataggaaactcatttccaccatcagcaggggcttttagaagtgatgttagatcatatattgacccaattattgggcatttagtttgggcaaaaacacctatacttgctaatatctatccttattttgcatactctggaaacccaagagatatttctctttcttatgctttattcacttcaccatctgttgttatatgggacaaaggacttggttaccaaaacttgtttgatgctatgttggattctttttactctgctcttgaaggggcttggggaggttctctagatgtggttgtgtccgagagtggttggccatccgccggtgcattcgggactagtttcgacaatgcaaagacttacctttctaatcttataagacatgttaagggaggtactcctaagaggcctaatagacctattgagacttacttgtttgctatgtttaatgagaatcttaaggagcctgaattggagaagaattttggcttgttttttcctgataagaggtcaaaatacaatctcaattttggtggaagaagaatttgggatagtgttttagatgatgaattcaa

SEQ ID NO: 162769 - DNA, 3845 bp, Cannabis sativa
aagtttagaggcctcattcatagcatcattagattaaggaagcaaggagaaaagatttttgagatcagtatctatactattaattctattacctaaactattataagatttattccacttctgaatggcaaaattacaattattttgtttattaagaaagctttgaatagaggaagcattaggttcattatttttatgattctaggaatcacaaacagtttgaaagaacatgtaatcggttaaccaatggttctcaaacataaatctcttgtgatgagtctttatcatagtctcatcactctaattagctttaaaactctatggtcagaatagtagaagtgtaaatggtacaaagtggcattaggataagtactgagccatgttttattaacaatgccccaatctaatctctcccaaatagaagcatgcttccaaatatatttattaccgacataataaagggggacagagaatacttattaacaaaattttaaaagtgagtcatagcataatgaggaggacgggaattactactacggtcacttagagaaagatagtcattaaagtcacctaatataagccaaggtaaaagaggagctgaatcataaagtctatccaaaagtttccaagtgtgaattttatcatttaagtaggaggaaccataataacaagaaatatgagtagtaatattatcatcaaaagttgtaatacaatatatatgattcaaggagtaattcaaaatattgacattgacctcctttgacctcctttctccaaaataacaacaaaccccctttcataccctgcctagggacttcaaaagtataatcaaaaaacaacttagaacttaaactatcacaactactagcaacaagcttagactccataataaacataaacataggactattctttttgaaaataagggataaattacggaatgctcggggattccccaacccatgagaattctaacacaaaagtctaatttttttgggcggggttgcaatgcaacacccgcctgaaccaaagaagaagcagcatctgaggtaacttcagcaataagagggccaactcgaggccttttgaggatgttcttgagagagtcgcctatcatgaccgaatgaggaataaaagctggtcttttggaaccagcaatagcctttcctttagccttctccgtaaacctttcctcctcctcatcagattcagaagtgtcttgatgaggaacatggatagtgatggcagcagtaggagaagcactaaccggagtgttacaatgaacactgacaggcgtgaccccagttggattgttagagtaatgataatctatcatagtaggaaaaacattcatagcacccctatcattactaagattaggggaccggttatgaatgttttgagaaatcataccatccacaccagcagtatgggcaattgggcataagatgaagaaccatctcccaagtctttagtagtaagatattgacttactgcagcagcaagattatgatcgatagtattggtaggcaagcctatttcatcaaaagggatggagttggacagatcaaacagattatgtttgaaattggatttagcaggggctttcaaaggaatcttataatgaagtggagggggataagccatttcatcacactttttcaaataggaaacacatttagtcaatgtgtgatcaaacattccataatggaaatagatattgggaagattttcatacttgaaattgcgccatttttccttgtggatatttcgggaatcaatcataatacccctagtgataggtttcgagacatccactaaaatcctcaccctaagaaaaagactagaggctttgaagatagttattctatcagcttcaagaaaatccccaacctcattccctatcattttggcaagactataggatttcattccgaaaggaatggagtggacctgaatccagaatggggagtatctaaattgattagggagaagggtatctaaacctgcgcggtttgcactagtgactaaacaatggtcaaagtgtcagggctacccttcaagaaccctacgcatgtccccttcacacccaaactccaccataaagagtccattcccatactcagagaaaatgatgggagccctagtgatccaagcatttctcatggcctcctcaaaccatttcatcttaatggttcgattggtaaagacccgaaaaaccagacaataaccagtaataggctgagtattatctcctacatcaagaggaagctcatgaacaatggcttccttctcagtaagattaagagcttgggacatatttttagttgtatgatccattttccagaacaggaagaagcataacaataaggatctccacataacccaaaatcttaaacaacaaaggttagagatatacctgcatgtccaacgcttaagggggaagtcatgagtggtagtctcttccgtcctctgcatgatctggatgcagatctcagaaatcttaggggtaatcatcgcccttcttcttggaagagccaaaatggcgggttccatttatggtgagtttcaaacgattagaaaagaagaggaaaagaataaagaaatatagacagatcaattaattttagatattcaaacagatataaaatgaagaaaatgacagtaggtggaggaatatgaaaggatagtctattaaatgagagcagagagagataaaaagacaaacaaacatctctcagattttaatcacaattaaatacaagagtaaagatctcaaagaaatcaaattaatgatgatggaaaaaacaaattaaaacaattaaccataaacaccattaaggcgatcaaacaactggatagaacaagaaacccaaaaaaaattgcacactagaaggctcgagagagagaaaggttctactttttacatggaacaaatcccattaatttgattttgaccactatagcttttgttataagcaatagttttcatttcacagttaaatggtttatatttcaatgatagtggtttccgtttgtttggttaatagtttctatttcaatttttgttgttaatggtttaacggtttttatttcaatgatatttgtttctatttcacgtatatgggtttttatgtttatttaaatgctcgttgtttctatttttaatgttagtagtctccattttagtagttaatagtttctatttttgtgatatttgtttctatttcacaatagtttgcaatttgatgttaaatggattctgttgtgatgttagtgggtttccattttatttgttaatattttccattatgtcttcatttcacatatatttttttatttaaatgttactcaattttattttatagttaaatggtttccattttcaatattagtggttctcattctgttggttaatgatttctatttttatggtatttatttctatttcacataaattgatttcaatttctatttaaatgtcagttgtttacatttcacaaactatagtttctgtttttaaagttaaattgtttttattttttgatattgaattactagttatttttatttcacaaactatagtttttatttcgagatgaaattgtttctatttttgaaggttaaattgtttcattttattattttaattttcaacgcgagttgtttctattttcaatgatatttattttaatttcacatatgtatatatgaagttaaatggtacttgtttatattttgaggttaaattatttctattttttgatgttaaattgtttgtgtaacaccctaactagcataggcatattacgtgatttttcaacatactgtgcagctcgttgcta

SEQ ID NO: 162770 - DNA, 659 bp, Cannabis sativa
atattatatgtatacatataatataatatagagaattaccaatgtaattttttttcttatatgaagttagtaatactatagattacttgtaatataaaacaaactagtgttaaaatttatactacatacattcttttacatgcataactttggaactcacccaggacttccaacacaaacgcaccttttatgtccacttcaagtggctgtactaggtacattcaatttatatatatatataaatatatatatatattctaggttggacacttaataataacacagttatgtaaaatcaagttattttggcatattgacttaactttagttttggtttgtcaaaaatgacttgaagtgaaatctttatttaattattgatgtgttgtgtttatccatcaaaaccgagtatataatctatgataatctttttgaatttttactcatttctctttttaacagcaatttgttattattttgaattgttattattacattttttagctataggtacatttagattattttagtttagattttgaatgaaatgtatgcataaatttctctttggttacgtagacttactataaataattactacttttagtgacaacgttttagtcataatatattttttttttgtggctaaatgtgacttttag

SEQ ID NO: 162771 - DNA, 2712 bp, Cannabis sativa
ttagttctgctcttttttttttttatggtttttcagtttaatggaagttttggggtataaaggaatactattttggtaaatagggtggggtgtggttataaaaataacatttacttggggtaaatttagtaatagggtataattataatttttgggggtgtaaatataatctcccttattatgatcatgtatttgtataaattcttttaaaagtaatatttttgttaaacatatttataaaatatttaatcagttttctgtttttttttttgaatgaaattcatctttatttaacttgaacttcagcaaccacaataggaagcaactcagttgggacatcccctaaactgaaaacacaatcaggataagaattagaagctcttgcaaaagcatgagcaactgagttcgctgaccgtttaacgaaaaaatagaaatatttctcatagtagcaagcatttccttacaatctttaataaccaaaccaaataaagaaatcatgtctattgaactgcgaatagcttgaactacaaccaggctgtcagattccaaaacaacatgatgccatgagaaggtctttaaccaactaagagcttccctcacacccattgcctcggctaaagaaggatccacattaccttggttaaggacagtttggccatgaataagcaccccatggctatctcggatcacaatgccaaaaccaaaactatgagaattcttaaacaaagccgcatccacattgaccttaatactattatgagtaggaggcacccaatgctccaaaccatcgcctggtataacaccagaaacagatgactccacaacggagttttgagcatttcgccattgattaaggtaagctgtagcagatgagacaatatctgaaactctaacagtttttttgttccaaaccacccaatttcttgcaccccaaatagcccagcagatagcagcaattaaaccttttttttcgctatctgagttgagaaaaactgccttacaccggtccaaaaaactagcaccctcaaccacttgtgtaccgatccccaccctattccaagcaaggctaatcacttggcaagttaccaaacagtgcagagtagtttcattagcattttgacagaaaggacaaagcaaactaacctccacacgcttagtacgaagctgcgtcaaagtaggaaggcaattggtacccgcacgccacgtcaagtttttgatcttgggagggatttttaatttccacagatttttccaaaagacagaagcttcttcctcactccaacgaccgttaagcatctgaagaagattgtaggccgatttcaccgtgtaaagacccgatgagtcaccgctccatatgatgtgatccgtacattcagacacttgtaaaggaatttgcagaatgaatttcttgtctctttcatcaaacaaatcattaataagttcaatgtcccaacacctcaaaccatggatcattaaactattaacattaacatttgaaagagccgggtgtgaagaaacaacatagagttcgatagggttagggagccaagcatcaccaaggacacttatgttgttgccgtcccctacacaccacctagttcccttggagactaattgttgtgcctcccatatactcctccaaacaaaactaggattattacctaaagaagcattgagaaaagatccttgtgggtaatacctggccttgaagactttggaaaccagtgagttcgttctagtaaggagacgccaaccttgttttcccagaagagccaagttaaagtctcttaagtttctaaaacccattcctcccacatccttatgcttactgagtttatcccatgccatccaatgaattccactgttgctcttgtttgaggatttccaccaaaactttgccatcagttgctcaatctctctagtaatctccaagggtaacaaaaaaacactcatagcatagctaggaagggtttgggcaacagttttgaccaaaacttccttgctagctcgagagagaaacttgccttcccaaccttgaagtctcttacgaacccgatctttaagaaaacccatgatagccgttttgttccttcccatggtgctaggaagccccaagtaagtactattctctgtggcttgtctcatctgaagaacgtgatcgatgtgacttcaggtaatctcagttgtgtttgtactataaaagatagacgacttgtttaagttaacttgttgaccagaagccgcttcaaacttggatagtaattcacgaacttttaaagcttcttggagagtggctttacaatatagatagctgtcatccgcaaaaagcatatgagaaattctcggtgccctgttagccactttgcaaccgtgaagccaaccacgagcctcatacttcttgattaaagctgagagaccttccgcacaaaggatgaaaagatatggtgagaaaggacatccttgtcttatacccctggttggattaataggtcccatttcccttccaccatgaataatagtgtaactagccgagataacacaagttaaaacacgatccacccagacactatcaattcccagcttgagcaacacagccttcaaaaagctccattcgatgcgatcataagctttactcatgtctaacttaagagccatatagccatctttaccatagcgtttcctcttaagatagtgatgttgggttttatgccc

SEQ ID NO: 162772 - DNA, 2708 bp, Cannabis sativa
aaaccatgtcagaggacaagaccaaaaattggcgctttgttcgcaccattattttatgcctagacagaactttgtcagaagtgtgccttgcaacagtcacaataaactcggcaacaccatattggaccctgtatgtccaattagaaggtagataatgcctccaacctttctttagttcctaaatgaaacactcgtatccctttccatgtatttggttgggatacaactgatgctgcacctcaggctccgaagacactgtgtcctcactgctcacttcccaatcttcaaagctagaattcgagagattattgctagacgaagacgagcttggacagagtcgagggtggtctttgtataaaagttgaaccaagtcctggtcaatgtggtgcttgcctccccaaaaatcgttagggttcatctacaaaaggtgggagataagaaaataagagttggtaggagaaagggatgaaaagaaagggtttcactcaaagttggaattcttaatcccacaagttcaaaacttcgattggtacatggtattttttagaatctcatgaacgagtgtaaatgaacaattttaagtcaaaattgatatggaatcgaataatgagacgttatagttaaacgttagctaaagttttaaaccctagagctatatattctataattagtcaagaacaaacagagtttatggaaagaaatccatagataatacatatatttatttgcaatcatgtaaaagcaaagggaaaaatgacttactcactgtttgaagctttctcgatctgcttggacgatagcattaggggttttccagcatgttcttcaaagatttgagaaaattttgggcaggaatttttactctggttctttgagagtaaaagtgactgaaagaatgcccaaaagctttaatcaccttttataagcaaccaagaaaggaaaataaatcattttaaaattcaaatatttaggtttctctccaaaagtgaatgttagtattcattacaaggagtacaaccatcacacatgcattatcacttagccatcaatgtgtgatttgaggtagagctttcaagtgatatttaatgcttagacaccgaagagacccttagtcaaagtcatgttagatcaacctcaaccgtcaaagacacgcgtcacccattcggacaagattcctaacggaatgaagtccacgtgcgaccaagaaggtctggcacagacttaagggcaaatattatcctattttttgtactatgatgtggcactgagctggatgacacgtgtctcatattttcctaattgggcagaaggttatactcctaacagtcaccaaagattagtagaatggtccatgttgtctgcacatagcaggatgtccgagcagagtcacctagggacatttgactaaagctcaatcaggtgatcaactcgcatgcaccggataggatgtgcgagttggaaatttcaaagataggcatctttactttcaagacacgaagataatccttacattcgtgggattagattaaagaataaagacaatgagcctcagttttccattctttgcattgtaattatggaattaatttagtttcttattttatttattataaattaagggaaaccattcttcaagtaataagctcctataaatagtggttcaatctcactattctagggacaaaaatttgattcagaaagaacactcaaaagagaaaagagcgatctaagagagagttactcagcgatccattgtaagagttttagagagagaatacttcattctttgtctctcaagtcaatacaacaaaaatgagagtaggctattactattctcacggggtcaaacttctagaaattttggtgttctcttatttcttttgctttctattatttactttatctaatcgttttatcttgattcaatgtcgttggctagaagcgaggtcaacaatgactgatcaaaaaatcattcccatccacaaaaaaattataacaaaactattaaatattagatttttatcttattactaaaatctggccaccacagcaacccccaagaactcacaatcttaacaagttaaaaccttaaaaaaattacaaagtaaaaaataatgcaatgtaccagaataaaattattaaatatcaaacttttactttaataaatactgagattcaacgtttttatgtctaaaatctggttgtcaaagctataaccaccacaatccccaccaacacactcactctacacttaaaagactaaatattatcattctaataccagtaataggttttttggtatggaaaatgagaaattttgcaaagaaaatagtggacaaatgagattttggggctgaagaggcgatggttgaagagggttcgtctgagtattttgagagaaaatgaacttttgctaaagaagacaaagtgagccttttggtctcgctgaaggggttttaagggcttacaatgatagttattatgtaatacctatcgtcataggggacacgtgtaacgaatcgcgtaataactgtcgctataggccttcaacgcgcgtatcctttccaatcggcttacaaaaataaagaaaaaaagccaaaggcatatataataaggtacttgttataaatattattaattatgtggatgtccaaatctttcaccattaatgtaatcaacattccctttttcttagtttccctttttct

SEQ ID NO: 162773 - DNA, 2745 bp, Cannabis sativa
tctcgaatgagactatccagcgatttgatctttctatgtggccaacgaggaatcccgaattctctacacttcttctttagaactgttaatcctactttcagatttcttgaggcttccactattgggagatcaaaatatttggctaaatcggataatgcaagtcttgctatgtctttacttgctgctcttttcttcttcttgttattctcttccatcacacctgcaacacaatcttcttactcaaacaaaactccaacattcttttcccgcgatccaggaaactaactataacaactgttatgtgatatccctatctaaaaccgaaatgaaaaccttatcaactattcttatgatgttataaatggtaccactaccacccaagagggattcgaatctcaaactctatgggagcgaactacatgtctgaccattcgagcaagtgttcccactaggctagttttactttcacattatttgcatatgtcataatcaaaatcaaaacttgattgagttattgtctaaacaagctaatatgattctatttctatggcactaatttgcaggctgaggtgtttgtttgtttacctgatgaggattgatcaatttgctgatcatctgaagattcagaaggtgtgtctggataaggaagacaattaagatcttgatcaaggacaaaatagctttttctccttagaggtttattttcattctcattggatttctctttgtcattatcatctttggctgtggtggccatgcatctcatttggaaaattgcttgaagatcattggccagtgatggaattgacctcagcttcggatttctagaacatatcatccaaaaaacataagagtggcacaacaagttcaacaactacaaaggctcaatttttagcagagtccccaaatacatacatacataactatttagtatttatcattaatccaaattagagaacacaacacaataacaacaataacaaaattgtagtgattagagaatttggggtaacactttgaaaagcaaagccaattgtacaaaacaagccaatatgacaactcaaaagaggtacccaaatgacataaaagcaaaaatcagattgaaattgaatgagagaaagagaaagagggttatacttggaaggtttaaggagagaaggaattgatgtgagataaggaaaatgaggatgatgggcatggaaagcgaatatgcaaacccataaaccattgacaaaacatccttgagaatgaaaaacatctgaggtttttaatccaagaaaaagtgggttacacatagcattatccatttccatgtatgttccattgattgagaatacaaactctctttccacttctctttccttcccatcatcacatcgatacacatgcaagcttcttatcaactctgtcaaaaaaaaccaacaaacaaaatttcataaagttcaaaactttaccatctgaaacgtatgaaaattaaaactttacctcgattcagagtgttcttgaagattaagagagagattaagaaatgggtttgggatgaagaatccatgtcattgtgaactaatcaacaaagtttatttctttatataaatatctttaattaatttgaaattgcatggtgtttttggtcagtttcattcagttcctacttcctagagtcctaccaaaattaaaagttcttttttttcactcattagaaaattaccaaaaatttgaagatgtatatttttcaagtgaattaatttcacttggatactctatctttccataacaacaaattcttgtcataatttcatataaataaaataaattgtagtattaaataaaaagacaggaaaagtggagtagttagttttggaacttgggagagtttatggaatgaagtgaaagaaaagaggtagttttgaaatttgtcatacattagtaatgactgcactagagagtcttttactgcactagagagagtcttgtaaaaaaagaaaagtgggaaattacataaatgggaggatggttaggggcattggggaagggcatttatggaaacaaagaaaagaaagagaaataagttagccatgagttgcattgcatgcttgagaagtggcagagagagaagtagtgaagaaagggaaactcctaccctaactacattggcctattgtgacggttcaacttattctcttttcctctttttttgcattttataatatatttgtactttttatacaaacaatatcaacaacaaaattaaattaaaattatggtgagaggaggaaacaatggaacatctaatcttatattgtaactttgctttttatttttggaggtcttctccgtgaggagtaatgccagtgccagactttgagacccgagtgttagattaggtcaaattcttatggaacttgaaggaaaaagaagtggaggttcaagaatttttttttatgtctctattattgtaacgctctaacaattaggcacgctatctgaggtaattaagaaaccctaatctcttaaacgggattactattaagataagcgcgggaaaatttaaactttaaatgaaaccataataaaaataaaacttgtaataactttaactttacaatcaaaaattcatgtttcgagatcccaaaaatatttataaaatactacaagtcttttccactagccgacctaagcggcaaaatcagagttacaaaagcatatcactggtagaccccaacccgcttggtcgagtgtggtccg

SEQ ID NO: 162774 - DNA, 2771 bp, Cannabis sativa
tgaaatttttcttaatgggttttagatagttagtgtcatttactgttatgaaatttttcttaatgggttttgatcatatattgagatgtgcctttatttttttcaaaaaatgataaaatgctaaattaagtaagtggatctttgtttcagtacgttattagtgagattattcaaatagaaaaagcatttgtaacttgttgcaggtgatgccattatctggctattttgtgagcaagcttttgaacctgccatcccattatgcagctggtttaatattggtcggttgctgccccggcggtatacccccctgtctttcttattttgttattccaatacttctcttactaccttgtttatttatctacgttttgggtgaatggtttcaggtacagctagtaacattgtcacttatattgctcggtaagtgaactctcagatatagcattaatttcatcatcaaatataagtttctccaacaagaagatttagtgaccaatctgttttttcagtggaaatgtggcactctcagttttaatgacagcagctagcactataacagctgtggttggtaaaccaacttttgatatcttttcttgcagtatcttcttttccttgattcttagattgctgcaattcaacataccttcatttacataggaacttttatgttcatttaggacatttgcatattataaccttttcattagtgtatcttcaacaaaactatggttatgaagaaaaagagttatagatttatcaacttatatagtaccaagccaatctgatgttgtgaacaccttctacaaagtatagttcattttcacccttcacatcaaggcagcatcattttcttttgtcctcttgccttaaattataacgccctttctcaattacaaaactgttttacttattcaactgtttcctttcaacaaactgcatttctgtttcaaattggtttagttcatgcatcattcaatcctggcatctgatctgcaaccaaaaacctcttcgtaagtttatttcactttccttattttttgattaactaaccctacttttaaacctttctgttgcagataatgaccccctttctgacagccaaacttgctgggcaatatgttgctgtagatgcctctaaactactattctcaacactcgaggtaagagcttttggtactggacgtgtgctacatagttaaaccatagtttgcatcgatttcattgtacgaattttgaactttgaaccaggttgtgctacttcctgtattggctggtgcgtttctaaaccagtacttccagggcatagttaaaatattttcccctgtgatgccacccattgctgtggcaactgtagccgttctatgtggacatgccattgcccagagttcttctgcaatcctccaatctggccttcaagtagtgatagcttgctctcttcttcacatttctggtttcttctttgggtacatacttgcaaggatacttgggattgatgtggcatcatctcggaccatctccattgaagttggcatgcaggttagcataactccactaattcatggttcaaccagatccttttatgctttctctgtgctgcttgctcggttaattctcatactactgttttttcttgccgtttatttgtaattcttatgatgaagtatgtaatatgcagaactcggtccttggagtggttctggccactcagcacttcggaaatcctttgacagcagtgccatgtgctgtttcaagtgtctgtcattcaatattgggtagtgccttggctggagtttggagacggagtgcaccttcccaaaaccaagattaacatgtccatgtagaaatttagatcaaggctcaactccgaaatttactagtaccactcctcgtttgaactactggaattaaatcaatgcttgtcctttatgctgcttttcttctaaataaagcctgttattgttaggcatttttgtcttgttcttggagagacatgcttgctagcaagccaaatgtaataataagggccttgtttgattaattatttatgtgttgttctattttatctaaatccaacgttctttgttgtaggcttatagctaacattactggcattacatagcgaagccatcggcagtgcacaataagagtgaatagaaacccaaacaagagaaacaaatttaggtattcagcaaaatttatttgcttatatctaagatagcaatgagtaaagaagactgcatgcgtgcttattaatagaagggtttacaaaatcaagagtaaatagtgtatcttttaaaggagatttatttttgatcttaagtatatggtgagagttgattaaattagggtgttggattaagtagcatcgggcaaaactctaattaaggtaataatatatgtacagtacaaatataatatagcatgggggctaggctcgaaactctaaccttagtttaacaaactcaaagctcccgccaagcccgcaaacgagggattggtagaatgtcacccttattggaattgagcctatgagactcatattgccacttcacattggttgtaggtgtgctaagagttagttagggctcactttattaaacgactcactttcgagtgaacacgtcttacacattatattaatagcatgattgttacactataaaaaaatataaattttcttaattttttgaaatttttacatgaaaaatcctttttacacactttattacataattaccctcacacgcctattactacatttatacttacaa

SEQ ID NO: 162775 - DNA, 2013 bp, Cannabis sativa
ctaggccttgaactcttttggttagttagccaatattatttttatcatttccttttgtgggattatattataggtatgttttgttttgtgtcacctgttatcctttctcttgaaaaagaaagtgcactcaaatatacatattattattatattacatataaaagtgaactgtttggccagcaggaaagagcatcattttctcggaaaccactttctgattcctttttgtcctgtttgatttctcatacacatacccttttctttcatgatctccattctcaacttcctatgttttctttgaacttttttctctcaaatggccactcttttgaagctgttttcaccaccaccgttcaccaaaacttgccaattatttcattcctctactcctcactctactttctcggaaaccaaacagatatattccagaaaggaacgccacagtagactccagagtagtaaatatggaaactttctcgacttacaaccggagtcaaagctcgaatctttggacttcgatcttccgctgtgggatccatctgatcggtctcttacggacgtaattgtcatcggaacaggacccgccggactccgtctcgccgagagagtctctagctatgggattcaggtgtgttgtattgacccttcacctctttcttcttggcctaataactatggtgtttgggttgatgagtttgagagcttgaagctcgatcattgtttggacaaaacatggtgcatggcaagtgtttgtgtaaatgacaataaaaccaagtatttggacagaccttatggcagagtcagtaggaagaaactcaagacagagttaatggagaggtgtattttaaatggtgttaagtttcataaggccaaggtttggacaattgagcaccaagaatttgaatcctctgttgggtttgatgatggaaataagatcagggcaagcttggttgtggatgccagtggctttggtagcacatttattgagtatgataagcctagaaaccctggttatcagattgctcatgggattttggctgaggtggatagtcacccctttgatttggacaagatggttctcatggattggagagattcccatttgggaaatgaaccttatttgagagctagcaattcaaagtttccaacttttctctatgcaatgccttttgactcaaatttgatatttcttgaggagacttctttagtcagtaggcctttgttatcttatatggaggtgaagaaaagaatggctgcaaggctaaggcatttgggaattagagttaagaggatcatagaggatgagaagtgtgtgatcccaatgggtggtccacttcctaagattcctcaaagtgtaatggcaattggtgggaattctggggtggttcatccttcaactggatacatggtggctcgaaccatgagtttggcgtctgagttggccgacgcgattgctgttggtcttggctcaaccaggatgatcagagggaagccactgtatcacagagtgtggaatggcttatggcctattgaaagaagatgtttaagggagttttactcttttgggatggagacccttttgaagcttgatctaaatgggactcgaaacttcttcgatgctttctttgatttgaatccttattactggcatgggtttctatcttcaaggttaacctttggggagctggctttgttgagttgttctctctttggacatgcctcagctccttccaaggttgatattgtaacaaagtgccctgttcccttggttaaaatgatgggtaatttagcacttgaagccatttaatttaattttggatgatgattatatgtagacttttgttaactgcaatatcaagttctttttcattactaccatcttgaatttgaacatattatgcagttagtgatagagaaacgctaaaaggtaccggtggtgcatagcatcctcttaatgtatcaatatcgctattgatccaattaagtatcaggttcatataatttaatataata

SEQ ID NO: 162776 - DNA, 1730 bp, Cannabis sativa
atggccttagcttctgctacagcagggggaacaagcccaacaattggtttggaaaaacctgctttaacccgattgcaattatccaaaacaaccacgccaacactatgttttttgcattgtggatcaatggcggcatcagtaaatatcctaagattacccaatttagctgatttcacaagaacatgaggagcagaagagttgttatttgatgtttgaacctgctgcacatccaaatacttgaagaaaaagttaacactcaaattatacacttccgtaggaggaagagtatactgattaaaaagatatgatttctttggttccaaagtgcccacaaaaaataatataaaaatactaatatagtctttatccaaatcctaaacaaaacctataaaaaaatttatttatatctagatgtttataattattatagtatatagcaaacctggatgatcgccaagcttttctcgatctgtagcaatctagcagggcatgcttggtagtttttgggccaagtttgccaaggggacaaactggagaatcaattacacattttttgaatagagaggaagctataggaagagcattagacacattctccaaacaaaaattttaacttttgggggttttagaagtccaaattttggtccaaaactttttggaatcaaaaaaggaagaggaggagggaaggtcctgttgcgagagagccaaatagtaagcagatttaatagtgaaaaggccagaactctcccgttcccaaatcatatcatctctattataaaacccaaaataggaacctcaagaatatcattaaccatggactcatcaaaataagctctgagtttagctagatcccaagaacctcaatcattaatgaattaagacaataaacaagaggagggaggatcatttgtgttaaaaaatttatgcttatgattaagaatccaatgatcatccaaagttctaatacaatttccatctccaactttctaaataagtcccgaagccattaaatctctatcccaaataatacttctccatgtgtaggaaaggttatgaccagggacagccttaagaatagaagaacggggaaagtatcgagagctttaagaaccaaactaaggagggaagtgggatttttaaggattcgctaagcctgcttagcaagcatagcctgattgaaatgtaccaaatgatcgaaaatcgagaccccctttaaatttggattgacacataaacttctaggatttccaatggattttcctagaagcccctgtagaaccccaccaaaacatggccatcatagcctcaatacccttacaaagcttaatgggtaacctgaaacaagccattgcataagtaggaatggcttgaatcacatctttcaaaagaactttcttactcgtccttgaaaaacatttagcagaccaacatctaaggacagaagcaaccttatccttgaggaaagcaaaggaatggtacttagatatagagagacatcgagggagacccaggtatttatagataaaaggtctatctcaaggttaaaagtatcaaaaaagagagttttggcctcctccaaagtattgggagagaagagaatagaggactttaagatattgatagcctgacccgaggccctagagtagacattaaaaacctcttgaagagcaaaaccggaacttctatcagtagaacagaaaataatgctattattgttgggttttgtgccc

SEQ ID NO: 162777 - DNA, 2094 bp, Cannabis sativa
  modified_base (643)..(644): a, c, t, g, unknown or other
catccttgatgctaagaaagggtcaagggcctcctcggtgtggaggctttactttggggtagagagatcattctgaaggggtctagatggagagttgggtcgaggaaaaatattaatattgtcaaggataggtgactgcctaggcccttaagattcaaacaacttattaatctggatatatatcaaggtggttgagttttgactcgcgaatggagaatgggatgtggagtttatcagtagagtcttttatgaggatgatgcagactaaatcttgggcattcaaagtagatctctggagatggaagacaaagtgatatggcatttttcaaatgaatggggagtacaatgttcgtagtgggtatactactgctatgaaggaaagaattttcaacgagaactctgactcaaaatgcaccaagtgatggtggaaacacctatggaatgtgagagtaccaccaaaagtcaaatagtttttgtggaaagtgagtcataggtggctcccaactaacaacgttttgttttacagaattatggaagttgacaaaaaaaggaagaaataattaaccatgctctttggaggtgttcggctatcaaagaagtgtgggaaaagtgtggtttgtacaaggctataaagaaatgggannacctagatttgcaaaatttccttttggctatgaaggagaatatctcgagtagagttttcgatctctttgtgatggtgtctaggcagctttggtatagtagaaatttgtcgatgcacaataacttttcccctaaatatggagatgttattgaggtagctataaacattcttgatgagtaccaaagccacaatggaaaaactgatttgaagaatatacaacaggctgcagatgggcaactttggattcctccagaggctagaaagcttgtcattaatgtggacgcttctattgataattcgaatcacagtagcagtgttgggggcattgttcgagatcatcatggaaggtgtgttcgttcctatcacagattctagtataactccttacctcctcttgtggctgagcttaaggaaatcaaagaagctatctctattgccaaagatgcaaatatcaacgatttttacatccagtccgattgtcagaatgcgatctctactgtcaaaaacatggctacattaggcagggacatggaattcctggtcgacaacatcaagaaaggcctggctttgagtaggtgtttaggggtcatttatgttcctagactctgtaataggatggcccattgtattgtaaaaaatgccctacttgttaaggattttactatatgggagggaggttttacttcagttgtctatcatgcctttatggctgatttggccttcccctaagttctgtttcaatgttatttctttcaataaaaaaaggagactttttctttttatttagtaataataagaaggcacgagtactactaggcacgaaaaatttatatgtttgggcacgacacaatgcaatgttataaattgataggatacagcacaaaaaatatatatttaagcacaacacgacatgagatgcacgaaaatatgatacaaaaatacaaatagactagtccaaaaagtacaacatgcaacaagctcgaaaagcatggcacaaaacattagaaacccctaaaatttaataattataataatatatatgtactagtaaataagtcgcgcttcgcgacagatgtttaagaaaatttaaattatacaaataaaataaattatgtcttttatttaatgataattgttgacatcagatttggccaactaacaccgaagttatatttatgactaatatcaccacgtgtacacataagaataagtaaataaaaggggacacattattttatagaggttcgacccccttagatagcgggtaatgacctacatcccttttggttgtattgatatagagatcataccacttagataacaagtgttgtggagtctagagtggctatcttaagattacaaaagtgagaacaagtggcaaatctcaagtaaaagagatgagggagacttagtctcttctacactactaggggcatgtagaagagagagag

SEQ ID NO: 162778 - DNA, 1356 bp, Cannabis sativa
ttgaatacaacattaatactttaattctaaaactaattcatctttccttaaaaaaatcatcttttcaatttgttcaagaaaataatttatgttcatttatctttttcttattcctttattattacatttcacccaattcatatatctttgagtgataatatgttaacctagggtttaagatttaaccgattcaaacttaacattccaatctaattcgcaaagtaataattttttatcgaaaaagaaactcatatttgtaataatctccgccatgccccaattgcgctcctttccctagcaacaatactctataaataatttattccattaaacactctatagtctatagggtcaaatccctatcttgagtttctaattaacaagctaggtagccaaatgttagtcataattattgcaaattaactaggaaatcatgcaagtcatgaccttgatctaaaaattttactttgacagtcacacacacactaccctagctaactaggtggggtaattttaatattttatgtactaagcaagattaatattgtggaataaataaagtagtggttaattttgtttgtggggtcattaatttaattaattaagaaaaggcccacaaaagagaaaaatcatcaattacattttgtaggttaatggcatgagaggtgatgatgagtccttttggtccctcactcactctctttagcttttatacattttttttatagtctctgctgaaaataaaactcgatttaatcaaaaacttgtttaaaatctcaatgaagaattgttacaattcaactttatagctggtttttttggggaccattttcttaaaaataaaaaataaaaaatggtgtgtgtaatgtgtatattattgggtgagattctcttggatcgaccaaagatggtgttgttatattaggtgtcgtagattctcgacaaggatggagctggtctttcgctatcccctaattatgtctctcactcatatatacatacttgtattaattattataattaaatattaaatttaattgtttggccatctacaagactacaaccattctaaaacaatataataattattatataaataaatatatttcaaatgataaaaaaaaactatttatgatgttaatgtgttgtaccgtttaaatattaaaatttatttctttattttaataacaaattacttaaaatacatctaaaataaaattattaaaaaaaactcaaatttaaatcttaacttaaaacatatatattttttttttgaatgaaaataaattttattagacagaaatatctgctaaaacaatggattgaagagcaaggggaacatcactctcagtaaaa

SEQ ID NO: 162779 - DNA, 3416 bp, Cannabis sativa
tatatctatatcttgagttactaaaaaagaggtgtattgaattgatcaagaacaattaagccatatactcattagatctatagtatatagcatagtcaagtcaacctaataatctttattaatatttattacttaaattctttgccaaatcttccttttctactaatttaccataatttatttatttattttaataaatgatcatcattatttacaatgaaaattaaaatcaaagacacaaaaatccaaaattcgagaatattattgtcgaattattaatgttaaaataggaaaagattaagtagtttccaattttacccctacgtgtgaaattaactgaaaagggtaatttcgtcataagaggacaaaccaaaccgagtacataaaggaaagagactggctaccactgttggagcttagtgtggccattaatggaggcttaatatttagataagagagattgagaaagtttcagagaaaacccaaatcgatttcgaatgggatttactctttcttctttttcttcttctaagacgaaaagctctaaagagagttggggtatgggtcttcttctggttttttttccagaagataattccgccattgttgaaaaaaacatgctttttaactcttcttcctcttctacaccaaactcttcaatttccgcttcagtaattagaagaagcaattccaatcgtcttcttacaaaagcccaatccaccatttcaatctgtgctctactcgtcttcatcactcttctccttttcacactctcaactttcgaaccaaacagtaaccgaactcaccaacaacaaccaagaagattcctttctcaaaaccctgaaaatttccccaaacacaataaacccagaaatgtcggtggcggcggcggcggcgaccgcgattttctcttctcatcgtctccgtggttgggcaaaatgtggaagcagaaacccaaattgagctcgaagaatcatcgattcccgtcagctcttcaaggattaggaactctttatcgaagaggaaccagagcaatggcagatctcaccgtcggccatatctccgacgatttaaaactgagcgagcttcgcttatttctcagaactcttcacaggtcaggactcacagcacgaagcgacgtcgttttgttattcgaatccaactcgtctaagttcgactcagtgattcaagaagaaaacgactcgtttttaaaactcgttcaaaaccacaaacacttgaacaaaacgagtcgccgactcagttcgagtttcgacttgactcagttcaaacccggaaagaaagaaactgcggagactttttggggtaagaaaaaccgtaacattaacaacagtaactcgaacgagtcgactcagttgagttacggatcggtactgggtttcgaagcttctgaactcgacccggaaaactcgctcgccggtttcttagaccacgttccgattaatatgagaagatgggcatgttatccgatgttattgggacgagttcgtcgccatttcaagcacataatgttagtggatgagaatattttgatctttctcggagatacactcggcctggttaagaaccggagccccgagtcagtatttctgttctcgaaatcggatttttccaaacacaacaagaacaaaaattccgttaactccgccgtcttggtcggcggagcaaggggaattcggcggttatcgaatgcaatgttgacggagatcgttagggcggtgacgacgagtcaagaacacaagaagaagaagagttcactcactgagtcggcgattcttaaccaactcgttgggaacgagtttttacttaataatgtgaatgtgaagttgattaaatcggttgactcggtacctgagatgagttcactcgctcaactcggtcataactcggtctctttggtgcaacgtggtaatagtaataatgatcgtgaagttattaattctattattatgaaacaaatttgttcttctcaattagattcatctgtttatagtgattgttagctaaaaagaaaatttagaataaggtgaaaagtaaagagcaaatagaaatttttaataatattttagaatttattttttttattaatttattattttgtacttttttttttcttttgggttaaattatattttagtgttaagaatatttaagatttgttcttaaatgtatataataatattgataaggaatgtaaatttgattttttttttatatttaattttaaattgtttatcatttatttatcatgagatgaatggaattatttaaaattgttagaagaattatattgataaaaactactataaaaacggcgattaagacaaaaattaatgtttagaagtaataaacataattattggtttaaattttgctcctttaaattattagttggatttaataattaattattaaaattctaagtacatcaaaatgaaatgaatcttaagcaaatcatgcaattaagaggatagctaagagtatatcttaattttaccctattgaatttatttatactttactaaaatcgttcactataattattaaattaatatttgtattgtatactaaagaatataaaataaaaaacattaattattagaaagtaatgttgatagttgataatttgatgtaagctgtttttgtctaattaacaatgattattgaaaggttagtattattgacttttgttgggtactatttgatctttattcatcaattttggggtcatactctctctatatctctttctcctttggcatgcacatataaagttttggcttttagaacaaccaatatgaaaagaaatggttaaaataattacatattaatcaatttttattgggtttctttttttaatattatattgagtgctttttcttcataataataatagaaagaaaaaaagggaaattagagtagaggaaagagagagagtgagtgagtagtcatggatagaatgtgaggcaactaagcttagggagctgtggaaatgcattgatgaaagccatgtgattgtgatctttctttctttctctacgcgtttatatatatattttatgtatatattttgggtttaatttagagatgcttttaaagcttaaaagcccttacaaaacgtgttaattacgttccttttcttttctcttttcacttttacacccacttctcttctcccaacataatcaactattaattaaccttattcttccataaaaattagttaaaagaaaaactttaccttattattagagcattggtataagccactatttaaagatgatactttaggattggttaacgatatttcatgaagaaaaatgttataaggatatgagaaatgctacagggcaccagtggtgcctaacaccctcttacgtgtcaatattattattggt

SEQ ID NO: 162780 - DNA, 863 bp, Cannabis sativa
  modified_base (825)..(827): a, c, t, g, unknown or other
gaaggaaaatcctttagaatatgtttgggggggggggatattcagcatttctggcacgtttgaaataaggtcccccaggatctcaccaaccttgtccttgctggaatctaccgtacagttcgtactcccaacaattccactacgctgcatgggtacagtaccatgcaacgtaccagcagggccctcctttttttcaagtctccgaacgccgctgtggaggagctggggatagactccggccgacgctcctgtcattgcttccaccttccagggctgcggcggttctaaaaatttaacactgacccttcgtcgttcaccaccatttcacgtcgagtacccttggcagtgaagcagttgcctcgggcaccatccaccttaatccacggaccgtacatccgcaccgcggggccattggatgggcgaacccacattgtaggagccttgcactcattagagtctaccagtctaccacagttgaagcacagaaaaggtagcttatcgtatttgaattgaacccacgactcaggatgggcaccaactttgagaaaaaacccagcagggaatgggtgtgtaacccagacatcaatccaacaccgcgaataccccctctaaccacatcttccttctttcttccatctgttttaatgaaggttcccactttcttggctaagatgggagcattaacctcagagaggcatcgtgtgggtagcccgtggaactccacccaaaatcgagccacttcgaattcatacatgctaacctctccctcaatcgaccaaggcctgagattgagaagaactctgtgttagaaatattttaccaggnnntagatttactaccatgtatgtgttggaatttatttt

SEQ ID NO: 162781 - DNA, 1964 bp, Cannabis sativa
atgatgatgatcgagatttgtatgtgttagaggaattgaaaactcttatagttaaagaaattagacacaggcgatttttactggttcttgatgatgtgaaggaagtggatgaagagagatggaaggtggtacttgagatattactaaagggtggaaatgggagcagagttattgttacaactcgtcatataagggttgcacagattactggtagtaatatgaagaaacaagaatatgaattggatgtgttgaatcgaaaagattctctgaaactattgctgcatttagcaaacaattctgagtttgatgaaattggagaaaagattgttgaaaagtgtggtggaatcccttctgtgattagagcagtaggaggaatattgtcttccaaacatacacgaatagagtgggaagaatttgatcgggagctaagtcgaaacgttttaaattcttcattagaactggaaaatagaagtgaatctgaagttgttgtagtgctttctttgagttatgatcatttaccatctgttttgaaagattgttttgctttctgtgcaatttttcctagagattatgaaattgatgtagacacactcgtatctatgtggatgtctttggggtttatacaatcagatgaagatgtggaggaattgggttatggatatttgagggatttaattcgaagatcgcttttacaagaaactaagaaagatgagtatggtaagattaagaaatgcaaggtgcctaattcaatgcatgaagttgtgaggaaagttactcagaaaacttatgctactctaagtttgaaggaggatcaatgtggtcgtagacatgtatcgtttgattttcatttggattcatcatggcatgtttcaatcccatcatctgagttaagaaagattaggagtttgattttgcctagacaatatgtaagggcaattgaaggaagatcaagtcaatcaatttgtgatgtgattccgaaattgaagtggattcgaatgttggatttgcataattctggcatcaagaaattaacaagttctattggtgagttgaagcttttgagttatttggatctttctcacaatgtcaatatcaagaaattgccaaattctatttgtgggctatattttctagagactctgaaactcaaccgttgcagtaatcttcggaagctgcctaaaggcattatggtgttgttcaatcttagacatcttgaaaacaagtcatgttatcgtttgactcagatgccaagaggactaagtgaactatcaaatcttcgaacattatcagaattcgggctgagtaaggagcctactgattttccctcaaagccaaagggcaagctcgacgaactaagtagtctaaactacctgaaaggcgagctcaaaataaaaaatttgacaaatccaaaagatgataagacagcagcagcaaacttgaaagagaaaaaagatcttttatctttgattttgatttgggatattgatgcttgtgctaatgaagctgattatgaagaggcactagaagatcttaagccacatccaaacctgaaagagctgtgtatatctacttatggtggtagcaagttttcgagctggcttccattgcttaagaatcttgtgaaattatcattatcgagatgcaacagatgccattgcctaccgcggctggataagttgattaatcttcaagtattggtactagatgagttgatagagcttgaatatgttgtggaaaaggcatcaaagaaccgatggagaacatggttttcatcattgaaagagctgagacttagtaatttgccaaagctaaaggggtggtggaaagatgcttcaaaaaatgctacatttagttgtgtttctaaattggtggttgaggattgcccctttctcgcttccatgcctttgtttccatggctagaagaactactagtgctcaaaaacacaagttgggagccattcaaa

SEQ ID NO: 162782 - DNA, 4731 bp, Cannabis sativa
agtcatcatgccaccacttgttgctgctaccactgctcagcaatctctatctacaacttctctactaggacatgcctcccctactcattctactgcaacaccagaccctccattatcagatggtgtaatatcagtggctccagcagtagaaacatttggtccaatagctacattagaagctccagttacatcagacgatccaggtagtttaattgctcatgtgtaagcacaaattcccttagtggcacctattgatactctcatacttccaacttatgctcatcctatgtgcactcgtgctaaatcaggcattagaaaacccacgattttaatggcagcattgattcctacttttgttcaggcaacaatgaaggatcctaaagggttaggagctatgggaactgaatttttgtggcagttaagagaatagtacttggattcttgtccatttacctcctggcaaaacacctataggctgtaaatgggtcttcagagttaaagaaaatctagatcgcacaatttttaagtaaaaggaaagacttgttgccaaaggttttcaccaacaagatggtttcaatttcaatgagagttttagccctattatcaaaccagtcacaatctgagtggtgctttctattgtcatctctagtggatgggctataaggaaattagatgtcgataatgcctttttgaatagtgaactacaaaaggatatctacatgatacagctacttggttttattgatgaaacatgcccaactaaagtatgcaagttaaataaagttatttatggactcaaacaagtgccaagggcttggtttgacaaactctcaactattctaattaactcaacttaaatttttctcggccaagacatatcattctcattcatcaaagtcactctaacatcctgcttgtatgtgcttgtatacattgatgacattttaattattgatagtaatgatatttcaatgtcttctcttgttacagatttgagcaacatctttgcacttaaagatcttggctcattgtattacttcttgggaattcaagttcttcataatgaaaatggcatcctactgtctcaaaataagtatcttaagacttattatgcaaagctcagatgcaaggagttaaaatttaaaactctcctatgaatggtgggcttaatctctccaattatggaagtgacactgttaagatctcactttgtagagatccataattgtgcacttcagtatgcttgtatcactaggcctaacattgcctttagtgtaaataaggtttgccaatttatgcataacactctccaatcacattgagttgctgtaaaacatattctcaggtaattggtagggacacttgaccatggtcttcaacttcaacatatatcctctctgcatattcaagcatactatgatgcggaatggattgttgatcccgatgatcatcgatccacaataacctattatgtgtttcttgggaaaaattagtaccatggcattgcaagaaataatctgtcatttctcactcatcaacaaaagctaaatttcacaggctcgcagcaatggtgtttgagattacatggatctagtctttgctcacagagctaggtgtccaaagtagtctggttcctactattcggtgtgataaccaaagttctttgatgcttacagctaaccctattctacatgttaggacaaaacacattgagataggcgtatattttgttcgggacaaggttctaaataatgaaattattatcttccatatttttcctgcttatcaacttgcagattgtctcactaagcctatccctagtagccattttctttttcttcgaaaaaaactaagggtgctgagtactcaaacacttactttaaaggggttgtcaatggataaggtgttagttagttgttttgttgtaaatgattattagtttttaagagttatttggctccttagccattttgttatttttaccccaacatgtttaagcttgtatataaacttttatatagctttacaacaattaatgagaatagagttcttttcacaattttgttttatgttattcaacacttgtctctggtgcttggaaacttattggacattataatccagaaattacaaaagctttggctcttcgttgtggttcagtgtggcccacttagtttgtctcatatattatttgaaacagattgtccaagcactgttcgcaagcttcaagattgggtgcaattagattcacctttgggtcttatttcgattgatatattacatttttgtaatagatttcaaactgtttcttttttgtactatcttagatctgttaacgtggttgttcattcactagctaactatctcattattgctaatgtttctattggttggtggcctgactacgctatttgtatcaagaactttagtcaatgatatttctagacgtcaatccgtttagaacagttggctcttaggtgttctttaaggttattcttcctgaaaaaagaaaaaaaaaataaagaaataataataataaaaaagaatgatcaaggcaaaaactcagaagctaccattaaaatttttaacttataagaaaattcgcaaattaatatgcttaaaattttgagaaaaatattaaaaatattgatttttttaaaaactagttaggaagcacgtgcttcgcacgtgagtggctcttaaaactatttaggtatggctattttaaaaaataattagaattttatctcttgaacttacaacaatataaaattgtatcatttaaaacgtacaccatgttaaaaaaatttcgtaaactcttctgtttagagatatagtatatttgttagctatcattcttttttatcatctaaaatttgatgtggcattgttaattagtatttttttttctcccgcacattatctacttctaaaacatgcctcctcttaaaaaaatttaaaattaaataatttttcatcttttattttttttaaaaaaatactcttacctaaagtgtattttttatcaataaatatattattgttaatttagatgagaaacttgtatttttattttttttatacttaactgaagaaattcggtaagcaatacataaatatgattttgtaaatatgaagacgtttgaatctatgtttaaacataaaattttaggaaaaaaattaaatgttcttagaaatatttttggattttcaatactactaataataaataataattaatacaaaattaattttaaaaaagttataaaaataggcataagtaaatagattgtttgaaccttatttctggcatattaaattattatgaatttattgaaaacttggaaaatgtttttaaaaaactatgatttacattgtcatataaaaaaatcaaaattgaaactatatggatatcgaaaatacgaaatgagtatttagtacatataattttaaagagtggaacataaaattttcctaaattaattatattgctgtattattattattttttattatttataattgtatgtttatttatttattttttgataagttcactttgtggctttgattataaatttaaaagaataagaatattttttcatttgagtaataattatttatttatggtattattatagttaaaaagtaatcacataataaacttgttttatgttgttcaaaaaaaaaaaaaataagcatgctttatatttttttataaatagattatttagaaaaaaatctttaaaatataatatatattatgagtgaaaaagatattaactgtttaactccctcaaaataattgaagggcttttttttttttttaaattaattgttgaaggattaaaatttttgacacttttattatagttatagatgttttaacaaaatgtacaaaggggtcttagcaaaaaaaaaaaaaaaacaaaactacaaagggtcataattatgaatataatgtttatttttatgtttaacaaaaatttataaatttgttacaatacaattttttggaaatagtgtttactaattagtataacatacattataattttgtaacaatatttacaaactaaattaaaattattacaaacgttgtagaattgttacaaactattttttatatttttgtaactaattgcccttaccatacatttaagtttttttgtggtaaaattagtaaaaatgtctacaatgtgaaaggtcaaactaaaatttattttatttaaaacccccttctttttttttttctttctctaaaggatatttcaatgatagtaactcattttacaaaattaaccaaaaaaataaataatactattttttcccttttttatttatttattaataaagtgtttataccattttgaatcatgtgtttgatgaattactagtttgaatcacatatttttttaaaaaattattttggatactactgtatttaataaaagattacaattagggtcaaaatatttctaaaaatgactaaaatacctttagaattgaaagatttataccattttttattttagtataatgacaatctttcaaaaaattattttgtaacaaaatatatgtttttaaataattagaatatatatgggtgtacttttaatgggcaccaatgaaggagtgaaattagaaaattttgagtttttatgcttaattttgtatctaattaaaaaaaaaaaaaatcgattatttttacatcatatgggttgagattgt

SEQ ID NO: 162783 - DNA, 1718 bp, Cannabis sativa
  modified_base (316)..(319): a, c, t, g, unknown or other
ttgaagcggggacgttacaacccttaagtatatactttaacaggaatcatacaacggtaaattaatacaacaaaaacttctagtaaaatgtccaactcaacaaataaagtacattacatatttcgtttagagattgatgacttacttgtttagtgacttttggcgctagaaacttgttacttctattgttagtttttttttgataaacggttgtaaattatttcatatttatttcatttattatgttcatatttaagtgttgattttgttttatgaagatgagaggtattctttatattatataaatatatatatnnnnatatatttatatatatatataatcactttagttaggaatagaaacttcacctaactaagtgcacttccattaatatctttattttatcaaactcaatttatcttttattttatctcaaatttaccctacatgtgtcttttcgttattcaattattatttatttaactaaataaaagaatatatgagagaaagaaaaagaatcaaaaacaaagtacacaaaaaataattaaatatataaaaaagctctaattaagaatcatttgtttcaaaaataacaactgttttatttcttacacaccaaatatgtcaaataaaatcacaaagaaacataaaaagaaatgattcaactatctttctttctccatttttcaaattgttcatataaattatcgattttaaatatcaactattcacataaaaaactcaattattttccatatcttttgtgcactttaagaatagtaaccattttgataaaaatcactatccattgtggggttggtgtcccttatttgatggattttgtatatagtaaggtatcatgtagtaccaaaaagaatttgggtaaccaaattaaggtgacatttgacataaccaaaaggaaaaaaatttgaatctatttgggtttgtggtgtgcagatgatctaggtggtgcatccaattgtgagccacaaatatattggttcaaagttgtggggtctcaattataatcaattttacaaagagaccaacaagagagagtgagctaggcattgagacatgaaattagagcctggtattcaattgaataatgataatgttgttctcttttttaactccattctaattatagatatttcaaataccacctatagcccatagattggtatatggaaagtaatatgcccatggatttgaattcattatcttattgtaaggtttttgagattagaatgcatgtgcttatattgtcaatgctattaaatcaacttctgcacttgtaaactattcaaaagtggacaccaattttgtcttcttattttgctgtaaagggcagaaactaaaacattattcattacatttcttctttttttgaacaaataatatgtggccatggtgcaatgggttagaagtttcctgcaatgaagtttcatttattgtttaatgatggaattgttaattaagacatctttgtaagattgtccactgtagtttggcatgttttaaatctaaaaacaaaaaatcttaagagacttggagaggcaataccataggaatttctctaacaatttcttcaccattacttagtagaaagactccaattgagaactagtctcatttaaagccctttagcctttggctccttgtaacatcaccgcttcaagcctcaatgaatggaggcttgaagcggggacgttac

SEQ ID NO: 162784 - DNA, 6800 bp, Cannabis sativa
agcccgggcactgactcagcctctgtcccgaacctgaattcgaccccgaatctagacctaacttaaataaaataaagaaaaataaaaatgaactttacataacacacgtttattttctgtttttaaaattgaaaaaataaaattaattacagaacacatttttatttttaaaattttattttaattttcgataaaaaaattagaaaataaaaatgttattaaataacacatttatttataattttttattacactagtacgacaacaacttcttctagaaaacctaaacacgtgtcaacaatctaaccccacatctacccgttaactacttgatgtttaaatgctctcgttatatacatataaacgccatatagagaaaaggttatacatcaacccaattttgagtcagacttctacactaagtaaagcatttatcacaataaataaatggattaataaagtcaagaaaagagtattcatcgaatttgatagaggacctggagtgcctagagtgttatagcattacaacaaatggtttgtttttgttttctggtggatcagacaaggaagataaagagaagcaagccagccgctggaacttgctcccggtgcggcgctggggccagtgtcgccgatatgaggactgagacaaggttctgttatgttcccttttattggaaatcttggagagctatcatatgcactttttgtggagccattcttaaatcatatagataaggtttttatttgtcttcaaatttaaagaaagaaatcaaagtactcgcatgtataataatttaatagttttggggtttacgtcattggtattgtaatatattttatttgtttaataatcaagttaaatacatgtatgatatgattttatgatttttatcccctaaaattgagtggttccttttaaggaaaaaaaaaagaaacacgggtgatccattttttcttattagctaataaataatgagcattttcttatggataataaaaatctcataactgaaatcttgaatttagttcaagtatgaaaaacatccatatttgtgtttcaactgttgaaggttagttcaagcaagtgatatctgtcatgctcctcctaaggctgctaaggcttgtgtgattcttatggttgggaaggcagttcacatgtatggtccttggataaaaagtgattcaagtcgtggaaactactttaccatggtgggaaagggaagtgtgaataaggtattttttttcttgctggaatggccatgaataatgtcaaggaataaattttctttgggatttaaaaaagaagtctaattcacaaagaagaaagcttttaccacttccaccaattgagcccattcataaaaaatattagaaagagcaattgcggcctttaccatcaagagtatatctatactcccgttctcccatcatgacatattaccttgaaaaaagacgaccattttaaaagacatgctcctcttatggacatgaagaggagagttgatgccatgttatttgagattaaggcattggagagagattggtaaaccttgttcagtactaaaaatattcggaaggttgggttgatcatggatcgtgccagcgggtgtatgctgacacttgttttgtcgatgagtcttagcgctggctttgttcttcttggccttgggcgacttcttgcctatgggcttgcctccgctgttatgttataattccacttccttttcttatcagaagaagaaggagagttggattttgcttcaacaatgtttgattcacctttcctggacttatccttgttaaggttttcaaacacggtcacctcgttcaacaattgagtcatgttgaactctagcttattcatcacatagtttgtgatgaaagctttgaagcaaggagataacaactcaagtatcatactcatttgagtcctcttgtcaatgatagcctcacgtgtctctgccttatgcattaattcaatcatgtgcaatacatgagttcttacagggacagccttattcatcttacaattcatgtagctacgactagcatcatgtcttgtttgattagactgctacccaaacatggcttgtagagaatttaatatttgagatgcattctccatatcttcatgcgtcttaggtggaacatcgtccatgcttacaagcatgaaacatttggccttgttgtttgattgaatcgaagcatcatatcttccctgatcatttttcgagcattaccagtgggctcctcaaggtgcacctcagttagaaaaaatttgtgattatcacaaactaacattaaatttttattcgatttctatttatgaaagttattaccattcagcttctcaagtcctagtaaagtagtaaggggatttggcatggtaggcatgtatgaaataaagtgacacaatgattatacaagaataataattatcattttacaattactctaaacgtgatgcatgagcgcatacaagtaaaatacataaaatcttgtttaagttattgtacgaaaaaactctttgataattgattgattccttagggggacaaaatctaagtcgtctcgaagctagactatacttctttggtgttgaccaatagagattgtcggttacattgagatgtactccttctcccactcactattttaggttaatgtgtttgttttattaatttctataattaatacatatttactactttaataattatgattaatttatttataatataagccttgaattataaataaatttttagtcataattatcaaatatgaatttactctttaattcttaatttaaaaatatttgaaattaataagttaattttaagttaccaagttaattctaaattaatcttagccagtttacatgctttcagttttgaaaacaaaggtaaacacataaacacataggacaatcctatatcatgtttctactataagatgcatgataaaataaaactgtatgggatttctatgtatgacatattattcacaactgctcaagtggttgctggaaaaggaaaggcgatagttgaggagccagaccaaggagactcctccaatgaggatgccccatctttacttgttcgtgagggtgctcctcctaaagttaagtgtagcttttccaataattaatcttgtttactctttacttatttaaatatttaccaagtattttcttctgggcagctatgtcaaacaagtcagaaggtatgctaaagagggaggtcagtgatagttctagccagaagttacctattaagtagccaaggttaggagatattactctggttagcattgctctgagttcgcagacaccccgcctggatgctaagaagagttagtggttataaccataaacatcctcgactcttcccttatgactaagaagttctctaagactctacctctgacatcttaggcaaaagatccaatatcttttaagggctcgttttggactaatgcgaccaacgcttaatggcacaaccttcctaagccaaatgtcactccacctgctgtgcaacctataaccaaaaaggctaaggaaatgggtagtttttaccaagatcgtttaatgaccgagatatatgagtagctctctattgctgtggatatgctagtggaactcttggttggtggagtttggaaagaaataacaaggttgggtcaacaatttaaattttttatacggattatgtcatatagataggttaacttgctttattgtttctttttgtagtctaatatgaatctggcttatgcttactccctagctaagtaagcaactctcaaaaccagcatgttcaccaatgatctgaagaaggccttggaggaggccaaaggtgatgctgaccagaagagcattcgacttagtgaaatgaacaagcaactcattgttgtggataaaatgatcaaagtcttaaagcagcgaattgaggatatgtcgtccactactaagcaagaggaggacctggagtaggagtccaaaagagtacaggagctcactgatgtgatggaaggactctaaaaacttcttcaaaaccaggaggctaagattaaggagttgaccaaggctcttaagcaaaaagatgaatcctctttgaaggagaatattgctcttgaggaagcattggttgctgagcgggaggcacatactaaagatgttgagtatcatgaagaaatcattgcagaactgttttatgaattctagaaatctaacctcgaggctaactttggctatcttgaagatgacatttgtgaagacatgctcgagtattgcgagatgaggaaagctgaggatgaggcagaaaaatctgtcaagacaacttatgaggaaaatatgaaatctaatctttcttttatcgtctagaattcagaaactttggttgctcatcatgaagagcctaggataacgtggcctaccaagcaacttttaaacttggtttacttttatttatgtttttcttaagacaaatagatgcctgggtagcttttaagccttgatttattctgcttctttatcttaatatgaatatatttggcttttcaattttgtccttgaattttatcatttttttctttctaccgatgttggtgtaggtgcacccaagtgactgagcagacttttgactcttggtcacttcaaatcaacaagtttcttatttgtctattcgactcttaagtctaagcgaacctttttgcatggatgttaggtatgacttgctataattttttaatagaaatattaaattaaaaaaaattgaacaataattaatctttattcatttattggtcggtatgcattgttactgaagtaacgtacatttattgaattataaagagctattacatgatctgttctaatctttagctaattaaaataaaaaagacttttgagcggtatatctcatctgtaatccctaacttttgtccactgaacgtggcatgtccatgtaagctaagaccaagtacacataaaatgtagtcacaccaatagtaggacaaatcgccttacaatgtatggcaaaactgtaaagcagcaagcgaaacgagttaagtgagttgtcaaggagctgtaccaccatgtctggctggccaaggggagcatataggctagcagagatgagcttatatggctgtctagggcttgggcacaagctggccaactacaaggtgacttttagacaaaggaagagtccgtttgaccaacgaagtctgccctctacaaggaaaaggtattcaagggctagattccacctacaaaggttggcctctagctacaaaggttggcctcaacctaccaaggttgtccatcaccaaagtttcccatcaccaaggctgaccatcacaaaggttggccatcagctactaaggctggccaacacatgcaaagacctggccaactcttaacaaagctggcagaaacttagcttgtcagtccatggcaggaacatggctggccaatctttaacctgcaggcattgtattgtcggccagcctgcatcctgtaggtgcatcaccggccaacctttggcctggtaggatttttatgtgcatctctcattcatggataacaattcaagcaacgattttggccttgaatgcccacaaaaatagagggaaaatatctacttttgatgggtaatttatcatttatattttattaattaattatgtaaataatagctttattacctatttctaagggatattaggcatgtaagctctactatataaagagcattacctaaacctaaaaagtctatgttattaagtcttaagccctaagacattaagtcttaagccctaagacattaagcctttaagctccctatcctctcaactctaagtctaaaaccttaactctctcttctcctctctcctacatgcctcgaaggctctctctcacttgatacttgcctactttattcatacattgtaatcttaagagagctactacaaattccacaacacttgtgatatgagtagtactatctctggtatgaatacaaccaaaaggggagtaggacattacctactaactaagggggtcgacctctatagtatcttatgtctcatttacttttctattcttattgtatagcacgtggcaagtatcaacatgaaatagacttccactgtcagtggccaaatctaaggtcaatagtttagtgctttcattgagagagagttgttaatttatctgatcaaatgccataatttaaaacaaggagaaatttggctacaacttttgtctcatcgggtcatcctcaagaccctatgacgacagatcttgatgtttgtgttctagtcataactagaatctctacaaacccaacaaatgtggccaaccctgccatcttgacaggcaccacaaacctagccaccacaactagtcaggtggacattaccaacctagttggtcttaatggccaacctctactgcctagggatgaccctccactggcgcctcgtattgaaggaatagctaacatggagcaccacggtaggatctggtcttcgatattaaactggagagatggggcaaagaattggtgagccagccaagaattggtgagatggggccaagaatctcgagttagccaaacttagagaggccatctgtcaagttagccaaaatgaagaaccacacattgttcgctacgatgcatttgcagaatagagacttaaatatctgaaagggtaatggcggcaaaacccccaatactttccttttgctttcgttaaacccccacaacccaaatttctgcgggtaaaccccc

SEQ ID NO: 162785 - DNA, 3712 bp, Cannabis sativa
gggggggggggggggaatggttggcttgggctgaatattggtacaatacatcatttcatacaaattgaaaacacactccccttcaaaattttatatggtagcgatcctcctttgataagatataagaagggttctacactgctatctacagtggatgagatgttaggagggagagatgtgcaattagatgatcttaacatgcatttgcttcgagcccagcaaaagatgaaagaatctgcaaacgagaactggcgtgatgaccaatttgccattggagagaagatatttgtgaaactgaaatcttattgtcagaaatccctagctgtttgaagaaatgagaagctttcttcacgctattatcgggctggagaagttgcctacaagctgtcactactttttgctacctctatacacccagttttccatgtctcgcagtttcgtcgggttcatagaagtgttcattctataccagtgctgctgccacaattgagtcctaatctggaattgatggttgaaccgaccgaattgttgggtcatgcttagcccaatgggaagggtgatttggaggtgttgatcaactggaaggatttaccgttgtttgaagctatatgggagaattatcacaacatgcgacatcagtttcctcaattccaccttgaggacaaggtgaaagtttgggcggcgagcaatgataagccaccaattcgattcacttatactagaaggaattgtaagtaatgagtggatttgaggttgagttggttttaagaactaaataatattatgatattcatttattttgtttttgttttgagtgactttctatttctattttgatttattttgggaaagttatgtgggattaaaggagaggaaagagaagggaaaattatgtcttgaattattgtgattaagcttatgcttgggggaggtaccaggtttcttgaataaccagggagtttttgttacttttctgctgtgttaataacttccctcatatttcctagtaatttctttggctggaacagatacacttctggtgtgtattagcatgatagacttaagatacgttttacttatactaggatgggtaagtgtctttagcagctgatatgagtgggaggcgtgttttggtcatttctttgtatagggtgaactgcttttgttgagctgagtgtgttgtttgttgattatgcaagaatttgagtctatactctgcatcactgatctgaaggaacccatactgttgcttttagtttccattcaataatagctcactacttcttcatctgtttactgtttcattaaaattcaggtgctggtgaaagattatcgtaattggtgttgtagttttgctgttggtttctattctatcgagcaggatattatccaattccactagcatgcccgacccctcaactctataattctcatcgtcagctttaagaaaaaccataggcttgcccaagaatgggtctcctctcaaagtaattgactcttctcctaattggaatttcttgatttgtattttccaattagttatgtcaatctcaagagtggcaagctattgaatctttggcatcgcatttgagtggcctaatcccaatgggcaatggtgagaaatctccacttacttgagaccataaagttgtagaactacacccctacaaatgctttttgcctccgagtcacttggccccacagtctcctgtaaaattcagtctttaacacgggcagcaacaatttgttaaccaaatctattgacaagaaatgggttacttgctggtcttcaacttatgtaacaattgttgctggtctttgacttatgtaacaattgttttaggtgtagttagcctaatgactgaatttaatgacacgtttcaagttcaactttattctcttgttcttggttaatctcagctgcttcttcatcctcatcttcatcacgagttaccaatacattaaacttctttctctccaacttgtttccataatatcgctttctatcacatgatagcaaataccctgattcttcttttcttctatctccaaattagtcaaccaattatattacgtaggaaattttctagctaagttccgtcccttggagaggacttactttcttacaaactggttagttgttgggtgtagcttgctgtattcttggtatagctgtaaatgacaagttgtttccaatcttttgagctaattccatgacatttggcagcagcgatattatgatctgttgatctgaaattaattatttccgatcttttgatctgttgttgttgactattagagttgcttggcttttcctctcttgatgtgagaacgtaagtcagtagcgtgcaggaatgccccattgcaaacttagcttattattaacttactagatccaccaactaaaaataaaaattttacttaaaaacaaatggtctccttgctcttcttaaaaatcttcctgacgagatgactaaaaaggttatcttctttctagaagactaaaacatcgcacattaagacactgtggctgccttctcaaagtcaattttacttgtcacccgtttgctctaaaggtgtttaaacttaattactttgttgacaactagactaacatgcaaaatttgtctaccttacccactagaaaagtttggctaattaggaattttatccctcaatttttgatatgtaccaaatcttgctctccgaattttttagtccattaaaaattctcctcgaactattatgattagtgaattgaattttgtctaattttactagcggaagctttacatggatgaatgttcagagggcacaaattggtccatgtcaaagtttggaggcatgatttggtagatatcaaagcttgtggggcgcaatttagtacatggacaattgtcgcgttagtaaaattgaacggaatttgacagaagtcattgaatccaataatctcaataattcagagaacttttaacgactaaaagtttggacacaaaaatcataattagttgtctcgcctaaaacttcccggactcttgttgagaaccttagatattatattgaataagttattaatctagttgataggccacttcttgaatcaatcttttatcgaaataaatgtctcgtatttacttaactttcaaaaaacctatgaaagcaaagttgctctgtacctatgggaagcagtgcatataaattatggattccattgttgactattgctggtgactcccctcatcaaaagctttttcaaagattttcaactttatttaagggggcaagcaagcaccacaagaaaacgattgagaaaactcagatctataagttcctggatggtctcaatgttgagtttgatgaggtggggggaggggttattgcaaggcagcccctgcctccaattggtgaagtattcgctgaagtcagaagagaggagagtcaaatgagtgttatgttgggaaagaagacacatacatctgttgttgaaagttcagcgctcgccaccatggaagtagcatataacaggaacaccccattcgtgtagaaaacttatgagaagtcatgtgtttgatgtgatttctataacaaaccttgtcatacttgagagacccgttggagaatccatggcaaaccagcaaattggaaaagcaaggtagagagaggaaaggcaggccgaaccccttctgcacatgaagctgagtccagccccttc

SEQ ID NO: 162786 - DNA, 1338 bp, Cannabis sativa
attaccattagattaaaaatcaaaagtttgaaaaatacccacacctaaaaaaaattctatgtaaatgatgaaagatatttatggaccatagtttttatacaataaagccttgtcgcgttttaggagaaaaaaaagctatagatcccacagattggaaaaaccactctcaacaatgaagaagttgcaaatgataaagagttccaactaggaggtaacaaaaatacaagcaaaattttgtataaatcaattttttttgttgggtcttttcaggaaaaatcaagttaattgttcattaacaataataatatttcttcctttaattatatgtatttagctagtttaatattttttccaataattattaaattatagcagccaggtaggtaattaatctcatagttttgcaagagcctttgaggatttttttttttgtcttggtttttaatttttgaaaggtcaagatagaggaagttaagaaattatttgggaatctacttttgccaaatatcctttccagtattataggcttttgtatatagtgctacccatgtttccaatttattattttcttttctttaacttttcatgggtcggtggatgtcaatgtctaacagtacactaatatatattatctcaagtaaattttcatgaaaagaaaaaaattaataataaaaacactatacccatctttagaaatcagatatttaggttggaaaaaaaaaatcgaaaacaaaaattatttaaaatgtgatgagaatatatttttcataaaacaagagttcaatttgataaaattttatcaatatcagatatagttataaaatatttcaacaggagaaatgatatcaaaagatttcacgaaccacagagttggcttaggggactctttactttgtaagaatggtactcaccaacatgttatgtactactatatatgttcaaaaagaaacatgttatgtactatatagtataattgtttttttttttcttgaatacatattatattgtataattcaattgtaacgtgtaataatataatggattaaataaaaaaattaatccaccaaaatatttctctctttcctctattactttctctcaaatattttctttaaatatgagatccaaacaaaggtcacgagctttgagcatttgggaactcagtttttacttttgcttttagaagtaaaatattaggattagtgatttcttaaattaattaatatcattctgcttatagagtatcataccctaaataaaatagagataagttgaaaaatacctctttttatatccattaattaaaaatattcttttttttgagtggattgcttaata

SEQ ID NO: 162787 - DNA, 4012 bp, Cannabis sativa
ttagctagtaaatttttattagtacaaaattaaaataaggtactagttaaagttgaggttagtttaagtggccataggtgggtgtgtgttggttgaaaatcctggttcgagttcgaataaagcatgattgtaatatataaatgcttaaataaaaaaaaaattagaataagataaataattatagaaaattatagtatgcatcttctacaaatgaaaaataaaattataaaaatagtaatagttatagaacttaataaaaaagatacgaatggtaaaaagaaaaaacaaattatacaccttatatttatgtttgtattgacaaaaatttaaatcaccatgttaaaaacttaaatcttattatatgtattttattatattatgacattgtgcctttgtgtttagaacaagtttatgtatttttattgaataactattaggtgaaataagattcaattaataatctaatgtattagttattagttttaactattagtattggtgcaatttaattttttaatcatatacaatactctaatttgtatatttttttcttctcccaatataaagaaatcaggtggtggcggtcttcaccgtgcaggtcgttggccgactgggttaggagactaagaccccaaaataattccccgccaaacgtgttctttgaatttggactggtggttttgtcatagtcgacaccttctcgctgtgtgtagcctcttggctacaagtctagctttaaaggtctctacgtccccttcaacatttatattcttcttgaaaatccacttacactctatgggcgtaatatccttaggtggagtttcatattctcagactttgttggtgcgcattaaatccatttcttgatttatgacattgtttcacttgtctgagtcagggtcttccattacttctttataagtcaatggatcgtccttgtatgtgtcagagataagaacatgtgcttaatgttcatagcggacaggttgtcttacaatcctcccactacggcaatgtactggggtttcctttacaggaactgtggtaaccgttgtcagtcgttcaactaatagtgttgaaatcattagttcagaaatctgatcatttcatttcctcgataaccacttaactgtgtggtttgtgaattttcatatagtcatatttaagaaaagtagcatttgtcaatacaaatactttgttgtcttgatgactatagaaatagacaccttgagtttcatctaaatatcctacaaacatacacatttcagtcttaggagcaagtttcctaaacgtgggtttaagaacatgagcaagacaaccccaaatataaagatgtttcaaactgggttttgtcccatttcataattctattggagtattacttatgctctttgagggtactacattgaaaatgtaggtagctgccagaagtgcgtaattccaaaagttcagtggcattgatgagtaacacatcatcgatatgaccatgtctaacaaggcctagtttcttctctctgcaacaccgttctgctgaggtattctaggtattgtaagttgggacaagatccctaattccagtaaatagtctttgaaatcagaatctaaatactctccaccacgatctgatcaaagtatttttaataaattacccgattgcttttcagccatagccttgaagtctttgaactttccaaaagtttcagacttcttggccattaggtaagtatgattgtatctagaataatcatcaataaaagtgacaagtcataaacaccttgagctttaatattaataggtctgcacacatcaatgtgtattagcttaagttgttctttggctctattgccttttcagccagtccttatgttgcagaattcttgaagccaagtatctaaggggacaagacatcctcaagtgtaaggttaaaacgtcagaatcttggttctggaagagcgtagtgaaagcaacaagcatccttaggagaggggcatgcaaagtaattactgatggaaaagatacaaacatctgggaagacccctggatcacacatggcaaagagttctacccaaaattggctaggaacccatctcataattacactttggtgtctgagcttctaactcagtcaggtaactgggacactaacaaattgcatgacctctttaatcttgagacggttgctgccatattgaaagggggtaaacctttaggacaggggaaagatcattgggtgtggactaaagaaggaaatggtcgattctcgagcaaattggcctacttaatccagactcttcaacgataacctcactgtgaggtggccccttcgctttggaacaaactatggaacagccagattcttgagcgccacaaatttatgtggtggagcgtcctttcaaacgctctccccgtaagggctgcgttactcaaacgatttcatattgctgacagcacatgcccgatttgcggcacggaggaggaatccattgagcacctttttccttcattgtaacctggcctttcacctatggcgctcatcaccctggggcattttcccagtaactggtacagggattcgtatgtgcgactaggtgaaatttttgtggaaccttcaaagcagagacatagatgcagatgaggttttcctttatgcctccattgtaatcgacacgatttggggagtcaagaacgataaggtacataatgacaagatggataatgtgaatcaatgtattgactgtatttctcactctccgacccctcccgttgcgtgtaaacctccccccaagactggctcaagttaaactgtgatgttaaagttggaggggagcatatgtgtgttgcaattattgctagagaccacctgagtaaggtggcttgggtgcacacggccaaactggacttttctgatgctcttcgtggtgaagccgcacggtttgtttggctcttgatgtttccaaggacaaagggcttaggtttatcctggtagaaagtgattctaaggtagtgtttaattctctcaatgacttagaccctagatgggaaattgaaaaatactccttattttgtaaaagaattgcttcatcttatattacttgtttatttgtattactgctagaacctgtaactttatggcccacaatgtggtaaaatgggcttttacccataaccaatttgagtgaattgatgttgatactatccctataaacattttttgtaacgaccgagaggtctaatttttcattaatgaacgtttatcttcaaaaaaaaagaagctccaattaactagattatttattaagtctcatcaaccaaataatctttgtttattaattatatgattatttcactataaatatagaattgaactcttagtaattatataattatatttactgaattttattgtagtatccattgatataattaattccagtaattagcgctccatgtgttggttcataattagttttgttcaaattatcattttactcttctaattacttctttatcctttagtaccattaactcccttgtggaagtataatttagatcccatctaaatttgtgcacaacttttcagttctagaattaacacttaaaaagaaccaacattcgatctgttaggaaagtcaggattctataaatatagatcatattcccggccatccatattattagattcccaaaataacgaatgaatcaaagaaactaataacatgaacatgagtttatgattcctcaagatttaggctgatctactattgatcatcattatgatatgaattagatttttttagtaaacaacatgttggataaagacaacttcattcatatcaatcattgtcatatataatctctattatatacaacacattcactttgatgtcatactacatccgtaatccgaactgagcttacttggaccaaagaacgggcatcagtgaattatactagcaactattgattaaagattctataactttaatatgttgttgactgttttattcatagc

SEQ ID NO: 162788 - DNA, 2623 bp, Cannabis sativa
tattaattgtaactaaatggtatttctttgcattttaaatagaataattatttcaccaaaataataaaatagttatgctattagaatgatattttaatacttaaaaatacaattaaacaaataaatattaaataaaaactatttattttctattacattctaatttattactgctaacgaaacgacagtattttaattaaattaaaataatttaatcttggaaaatcttattacttttttatttcaagatctatatgtagataggaatttttaaaaattgaattgtgtatgttttatagtattccaaagtatagatttgatagattagtgccacaaaaagaaaagtatcgatggatagattaaatggatctcatattacatatgggccatattaataaccttactagctactattaatatttttttttttattttatgcccacgtatagtactactggaaccacagactcaaaatactttctttttttaatcaaaagaataaactcaaattatcaatgtcaatgatatatattgtaattgagatgtacagaggggccataactaataaattatacggatcatggcctactgaatattcgattggattcttatgatgtatatacacttacatatacatttcgagttaataattttggaaccaataattttattggatttagtttctttcaatcatttgctcaatatagaaaaagcaaaaacatataagaaaaagaaagatagaaaacgaatcattgtgtacgtaccatcattctttagtctttcgtcaatctttgactgaattaatttaattacactaggggtttataaacataaaaacgatatgttgtgatatcgattatatattactagcacatgaactgtattattatataaatattgttatttttacacaatattaataataatagcaataaaagaagttataaagtaatacacgggattggatgatgataaaaaagtgatgtcgttttgattataggatactcccaaataatcagttgtagataaatagaatcaaaataaatcaaaagccaaaaccaagttgcataatatatattttatggtgtgactacttacattgtgtccacccttttgaaacggcatgtgacatcacacgtggtgcacccagacaaagagaatgtgcaaatgtaaattacgtttgcaaccacttaaagtacacgtcttctatattatatattactcatttacattaattatttacaataaggattaaacaacaaaaataaaatagtactatgctctgtatatgtagtatagtaataatattaatattaggtactacgtacacattgattgtatgtatttatcattgtaatctttccacattaacaggtggccacgtccacgccacgtggcaataatttaaccgcgttgatgatcattcatgataatcttcacgtattatatgtttatagatggactgtgagatatgcttttatatattttgaaaggcagtttggtgaaaaaccagtgatgaatgtttaacaaaatcgccggtcaatcattcatgaatatttattattaatgtccagaatgatccatttatatatggaaatactagaagataccatccaacattacaaaatttcatcattaataatttaattatcatgttttacattttttttaatttaataattattaaaaaattactaactattattcataagatgtgtcatttcctaacgtacgatattaaacactacgtacttagtgtgcattagtcaatctatttacaatatattttcacctttatgtagatattgagttgcaaatatatagttgtaacctatttaactaaataaaaaggaaaaaaaaatttaagttgtaatttcgttcatttaattaaattatctatccataattgatcgtaatttgtttatacataattattattattaattaaaaatgaaaaatataatattcatatttttaagtttgaaattttagtctaaattaatattttttggattgatttaaagtacttgttcaattactaaaactctattatcataagttaagacttagttaccattcaaaatgacgccaacattaaaattcttacaaaaaaaaaaaaatatatttaattgaatcaacattaaattaatgtgaagaatattaaattttcattcctaatgaatatatgagatcacacttattaataataaactaaaaatcttccaataaaaattgagtaaacatatccttattatatttaaactagaataataaagaataagacgaaaaattttgttcattttcgacattaaatattgatgaaccataaaataaggtatataacaaaaaaagctagaattatgcattcaaatctgaaaagaattgaagatcatgagattaaactgttaacagaaataaacttatttttattttatctgagaagtttttgagccaaaactttttctatatttagctagatcaatagtgattttttaaaggttttttaatattatttgacttttctaatcatatcatacacacattaagtatatatagagaaatttgattttctatacttaaaaaaccctaaaattattttcctaaacctaaatgttatatcata

SEQ ID NO: 162789 - DNA, 2770 bp, Cannabis sativa
caaaaaactcttacccatactgagtccacaaacacccatcttgcctattccttcttctgagtctaaccagtgtaagagactgcgtgcttctccaatggttgcacttcctaataaaagcaagtcactaacacacaagagtcttgcaccacgctgtagtgaaggacgcctttgtccataaaaggggctgcagtacattttttaccttcaattaaacaaagtaaataaaggtatatttttttcagttctaaagaggttatgcagaagtgactcaagtaagttgtacctctcaagtaccatagttgcaatattttccttcaacaatggccctccaagacgtaacctcctttcaaatgtatgatctccagttcctacaagtacagtagtttccaaagggttccgctattatgaagcaaatttaaaagttctttgcaatttgcaaagtcaagtatggcacagcattgagcttaggcaagaaagactacttcgcaaagagtaaaacatagacctttcactaaaaatcactttgaaaatggtttagttttcactggagcccagtaagtagtcagtaaccaactaaaccgtaacaaattgaagaccattccccaagcaataatgtaatcacaaagatattgccaaaggtttgattttcatattttctgtatacaagaattgactaacaaaatagttggaacgtggaaccaaagcactaatctcagttaaaattctccaagttttcacaactataaactgaaaataagatactatcattaacacgtgagccaaaaataattaacaagacagcagcaccaaataatcttattctaaccaattatcaaatgtcatacttaagcgtgattgctttacatttatattatctgtgttgaagaacgaaactaaaaaaaaaaaaaaaagaattgctgtttcaattaaaaaagaaaagagtgatactaaaatactgatcaatataaatgaacatattccctatcaaaccaactgaacaggacaagtcacaaaacaaaagaaggcactaataacaaaattattatttggttaaaacctttagctgtaaataatcagaaagcaatctcctctggaaaaatgaacttgaaaaccaatctcatgtgtgcaaatatctaccaattaacaatctttcttcaaattcttgtttatacccagtaatcaaaacccaaaagtggatacattttgacataagaagcaaatgaacaacacaatgagaagaacacaaattcagtgattttccccacaaggcaatgataatgtcaagtatttcctaacaagttctaacaaaaaaaacccaatctatcattcacgtattatcataactataacaaacttacacgtctcaatttaactccattaaaaaaataaaactatcttcagcatgatgactaagtgaatcaagaaaagaagaaaagtcccctcaattcttaaacagtttggagttatggaagggagtgaaaaaaaaaataccatgttgatacctgcaaggtgaacgacacaggccatcctgtgagatggaactccttttggggtgagaaaagcaactcttgcattgtgacactcaggaggcaatgcactaagaagttgctcatcgcatgaagtcctaaagaccccttctcttaaacaagccgtcctgctttcccagactgttttccatatgggttgaatggaagtgggaggccaattctggccagccatgtctggaaacaactgcgtaatcatcctctccagcagctcaagctttgaaccaccccaccctccagagaaaaatggtgggcttatctttgatctgtgcatcaatgcaccataaacatggtccaccacataatggagcaatcccagattaactgtaaccattctaacgacaaatccagaaatctataaacgaaaatttctgaaaatggggaacataaaaaaaataaaaaaaaaataaaaaaaaaaaaaaaacggttttgaaagaaccccagaagctacaaatatattattaatcccaatccaccttcggaaccttaaattcttacaaatagataatggtccattaccgaattttggaggaaaagagaagatttttataatatttctgcataaaataagtgtagtcctgtatatgtttagatctgaaatatccctactgttgttgaaacaatagaaaaaaacagaagaggaaaagaattatatacataaaaagaataagtaaaaataactagatttgaaagagtgtgaagataaaatgagtagtcagagacacagaggattaagaggaaggaggtatcgaggtgtcgatcaaaataatatttgttatatgaaagaagaaagaggatgaagagaagaggtaaatagagatattaaattaatttaaataaataaataaaaacaaaatattggagacaagttggctaggtgccaatcaacaagaaggatatacctgcgatggactgggccctcttagcatttctcccatgatatctatcccttatgagaagtagtggtgttcacaaaattaggggtgctcataaccgcttaaaccgcccacaccgcactgcaacaaaaaaatacgatttgaaattttttatcgtgcagtcgcagtttgaatttttcttaaaccgcgcagtgcggtacagtttgcagtttacaattttgaattgttaatatacgggttcaaacagcatcgcaccgtatattataaaaataccaatttttatatttatttaagttcaatatgtgaaggcccaacccaagcccactaatt

SEQ ID NO: 162790 - DNA, 5873 bp, Cannabis sativa
tttgatttggtctggcagaggtggcatgctggatggtcacaggagaaagacaagctgcaagaattagaaatttgtatttgaaaaccatacttagacaagatgttgctttctttgataaagaaactaacacaggggaagtggttggcagaatgtctggtgacactgttgtcatacaagacgccatgggagagaaggtaccatatatctcgtaatacaaatagaaagaaggaaagaaagactatatgtagtagtcttcatgttttgatgaagaatcttatttattttgtaggttggaaaatttattcaactgatatccacattcattggaggcttcgtaatagctttcttcaaaggctggcttctcacccttgttatgatgacctctattcctcttatggttatggccggtgcagctatggctttgattataagcaagatggcgtctaagggacaaactgcctatgcaaaagcagctaatgtagttgaacagaccattggctctattagaactgtaagtcatcattatcaagtactaaactcaacagtgtttttcagttaccatgttagcacgtttattggttttgttgtttgtctaggttgcatcattcactggagagaaacaagcaataataaactacaacaagtttctcgtcagtgcttataaatcaagtgtttttgaaggcacagccgctggacttggccttggtttggtcatgtttgtcatctttggaagctatgctctagcagtatggtttggagtgaagatgataagggaaaaaggatacaatggtggtgatgttttgaatgtcatcattgctgttttgactggatccatgtgagttgtgattttttttcattttacatatccatatactactcacagatagaaagatggatagataagagcgtgttttatcctcaggtctctcgggcaggcatctccttgcatgagtgcatttgcagctgggcaagctgcagcgtttaagatgtttgagactattagtaggaagccagagattgattcatatgacacaaacggaaaagttttggatgatgttcgcggagacatagagttgagagacgtttactttagctatccagctagaccagatgagcaaatcttcaatggtttctcacttgagattcctagtggcaccacaacagctttggtcggccaaagtggaagtgggaaatccactgtgataagtcttattgagagattctatgatcctcactcgggtgaagttttgattgatggcaccaacttgaaggagtttcagcttaaatggattcgtcaaaagattggtcttgtcagtcaagaacctgttctatttgctgctagcatcagggaaaatattgcctatggaaaggaagatgcaactactgaagacataaaagctgcgactgaacttgcaaatgcagctaagttcattgataagttgcctcaggttcgttctattttcctcaaatttacaaacacttattcattaaaacatggagtaattggtgaatgtaaacttttggacaattttttgctaagtaactttccctacaagagatcaaatatatttgataggatgttaatatgtcagcaaggttactttgcaaagaattatcacagagttatttttcagagtggcaataagaaaaggtctattttgtgaaacccctcttaaaacattgtaagtcttacatgggataggaatgtaaaactattttcagggccttgacacgatggttggtgaacatgggactcaactctccggtggtcaaaaacaaagggttgcaattgcgagggccatattgaaagaccctcgaattctacttttggatgaagcaacaagtgcacttgatgcagaatctgaaagggtagtgcaagaagcattggacagaattatggttaatcgaaccactgtggtggttgctcatcgtttgagcaccgtgaggaacgctgattccattgctgtcattcatagaggaaagatggttgagaaaggtacttgaacttttattatgattaatttagctaatgtaaagatatttatgtcacttaacattttggaaactgatgatactcaggctcacatgatgagttagtcaaagacccggaaggagcttatagtcaacttatacgcttacaagaagtgaacaaggaatcagaacaaacaggtgatcaaaacaaaactgaaattagtacagaatcgtttagacagtcaagtcaaagagggtcaatcattcgatctctgagccgaggatcatcaataggaaatagcagtcgccattcattttcagtctcatttggtttacctactggaatccatgacactacaatgaaagatacagagtcccctgaacaagtatcagaatcacctccaagtgtctcactcatccgccttgctgctcttaacaagccagagatacccgttattctcataggagctatagctgccatcattaatggtgttttgcttccactttttggggtgcttatttctagtatgataaaggtattctatgaaaaatctcacaagcagaagaaggattctgagttttgggcactgatgtttttggttcttggtatcgtatcgttagtcgcaattccagcacgtggttacttctttgctgtagcagggagcaagttaattcaacgcataagagtgatgtgttttgagaaagtggttaacatggaagtaggatggttcgatgagccagagcactcaagtggtgcagttggggctaggctgtctgctgatgcatcaatggtgcgtgccttagttggggatgcactcgggctactggttcagaaccttgcatctgctgttgctggtttgctaattgcttttctggcaagttgggagttggcacttataattctagtcctacttccattaataggagttaatggatacattcaagcaaagttcatgaaaggattcagtgctgatgcaaaggtattagttgctaaatagaaattagtcatgttggaactgatcataatattgcttaaatttttaaataatagaagaatatttatatggttgcaggtgatgtatgaagaagcaagtcaagtagctaatgatgcagtggggagcataagaactgttgcttctttctgcgccgaagagaaagtaatggatttgtacaaaaagaaatgtgagggacctatgatgacagggataaggcaaggtgtgatcagtggtttaggatttggggtgtcctttcttctactcttttgtgtctatgcaacgagtttctatgccggagccagacttgttgagtctggacaaattacattttcagacgttttcaaggtaataatcagacttgacaatataaaccattgttaatactcgcacacacaaatttatatttatataaatagtgagagaaagagaagaattaatagtaaggtattggtgatttttggcaggttttctttgctttgacaatggctgcagtgggaatatctcaatcaagttcctttgctcctgattcaagtaaagctaaggttgctgcagcttctatattctccataatagaccgcaaatcacagatagacccaagtgatgagtctggggagaccttaaatgatgtgaagggagaaattcatctgcgtcatgtgagcttcaagtatccattaagaccagatattcaaatcttcaaggacctcagtttaactattcattctggcaaggtaataaacaataatcatttctcatttgacattactactagtagaagttgagctgtttctagttaactaatatgtttggttttatttggttcagacggtcgccttggttggagaaagcgggagcgggaaatcaacagttatagctttgttgcagaggttttatgatcctgactcgggacacataacattggatggagttgaacttcagaaattaaaactgaaatggttgaggcaacagatgggattagtgagccaagagcctgttttgttcaatgacaccattcgcgctaacatagcttatgggaaggaaggcgaagcgagtgaagctgagattttagcagcctcagaactggcaaatgcccacaagttcattagtagcttacatcaggtgagagtctgagacattgtgcttgtaccattgtatgtttatgttttacataatattagttagttatttacagttgattaaatgaaattcgatgaacagggttatgatacaattgtgggagaaagaggagtgcaactgtctggaggacaaaaacaaagggtggcaatagcaagagcaatagcaaagagtccaaagatattgctattggatgaggcaacaagcgcgctcgatgcagagtcagagaaggtggtgcaagacgcgcttgatagagtgatggttaacagaacgacggtggtggtggctcataggctatccaccatcaaaaacgccgatgttattgctgtcgtcaagaacggagtgatagtggaaaaagggaagcatgacactctcattaacatccatgatggtgtttatgcttccttagttgcacttcatatgagcgccaagactgtttaaaatcattcgtttctttttttcgtgtttaatatatttcatataaatacaaattaattttcaacgatatatagtaccaaaagaaaaagtgaaatcttcacaagtagttgggttgtttataaatgtaatcttattgtttgatcaatttaagaaggtggtgttatattttggatcacaacacaagtcactattgtcatctcctttcatagtgtaagagaatagtattttttttttcaagaatggtaatatattgattactaattttaaattaaatgaaaattcaacgtcagcaatgacgatcaagtgtgtccaaagtcttaagtagattgattgtgcttttcataatgtgatttttaaaggcaggcacatgcaatgaatgaatgaaattgaagatagcaaaagtcaaagcttggtgtgtattggaatcttaccttgcttgtgcctagattgcgctgccatagtgcaccatgctgccctaccaaacacaacacgagtttctttttttctctttgataaggcaacacacaacacgagttgcttgctcatttaggcatgtagaactacactgatttagatctttatttttattttgttattttttgaggtatctacctagagtgtgaagaacaagattggtactagcggcaaacttagtaatgttgtgacttagtgaaaaaatgcatgcttagtttgaaaaaaaaatggagtattattttcatcctaaaaatttatatagtcgctctattttattatttatatttatatttttacataaaatataagaaaattatatggtgctagtgctgtaaaaataagaaaaacaagtaaataaaatggagtattatttgcattctaaaaatttataaagtcgcccaattttattatttgtatttttatttttacataaaatatgaattgaattttttgacacgacatgagtctaggaggcatgaacacgacagactctgttattatcttaaatattagacatataagacctagattttaatcattagctcaaattggcctattttatatctaacttctcatattttcaaaaaaaagttatttgaaaaattaataatgttaaaatttgattcaattttattatttagctatcatcaaataaaatacataatttatttcatatatatatagttttaaaaattttaaatagttttaaataatttagggttttgatacagtgttggtgttttgttttctgcttgtctttgacgtcgacgactgtagctgggaatggcgctggtgagggtcgacttggctggggatggggtgtggtgagggtcatggttggggtgtgtgaagaagacgaagagg

SEQ ID NO: 162791 - DNA, 1470 bp, Cannabis sativa
  modified_base (1437)..(1445): a, c, t, g, unknown or other
tttctttcccttccaaataatgtttcacaaaacacttgattatacatctattaaagtctttagttgtgcttactaccctaattttagaccatataataaacacaaacttaattgtaactcaatgcacattcctatggtataaccttgtccataagggtgacaagtgcttaagtgttgatgggagaatctatctatctagagatgttaattttaataagcatggcttatcattttgcactccttcctcatcatcatctgattctcatgccactcccgagtctactatatcaatttcacctccgatacataattatttttcccctcatactatcatttcctcttaaagcagcacatcttcctctactcatgactaatatatttatatgcataccactaacaacaataatagttcttctagtctcttttttttactgaatacaagtagggtgttcataaaatcgcatatactgcacaaactgcctgcaatatactacatcacataaaaaatacaattcgatacacattgttgtgcggttgtaatttgtatttttgtcaaaccgcgcgctgcaatttattatgcagttttaaatttaataattacggttcaaactgcactgcactacaatacttgtaaagtaaattttaatttaaatttcaaaatatattgatctaagtcttctccaagtgattaacattgagtttgtgtatgtaaagtaagatttaaatattatatctttctttatatgttctaaaagctctatatataacaataataataattgtcaaaaaaaaaaaataataataattgacatacttgtggcgtttaaaacattaaatattatttgtttagtttttttatttcatgtcctaaaagattagatatatttttgtttgaattttgttatatcatatattagtgtgttaatatctgtatttttatttagttagttaatatatagtttatttatttaataatagtataaaccgcccacaccttacttttgcggtgtggtttttgtgattgtgagatcttgtagggtggtcgtggtttaaaaaattataaaaattgcatgtgtaatttagttcgaaaaaattgtcaaaatatatatcgcttgcactgtgaatactcctaaatacatgtacatctgtatcaccagctactgataatgttgcagcagatagatcaccaacttcccatttaaaaatattactctaggccctttaaaagcttgagaccaccctaagtatatagaattaaaggtaaaattaaatttggagaccctttatataaatagttaaatcattattaaaatattaattttagtgttttagtgtagtgataatactttttaaagttttaaaaaatttaaaggttcaatctttcatagatatatatatatatatatttaattttcgaaattcaataaatatattctnnnnnnnnntttttaagttgctaattatttaatt

SEQ ID NO: 162792 - DNA, 812 bp, Cannabis sativa
cagccggaaacccccgcgccgccgccgcacttcacgactgttactcaaacttcgacgacgccgtagacgagatccgcggctctctccgtcagatgagacacatcaatgtcgtcggagccgtggccggcggtgaggttttcaggtttcagatgagtaacgttcagacatggatgagcgccgccctaaccgaccaggagacttgtacggatggattcgaagacgttagcgattgtccggtgaaagctgacgtcatcgaccgagctacggaggttaaaaagcataccagtaatgccctcgctctcgttaaccgttacgccgagaattccgttccttgatatatatacagttttattggggtacgacgtcgtttttggttactgaacaggtactaatatattgtagaggttttagaaacactgtcgttttgtatgataatgttgtcgtttttgtgtttatttcttcatatatgtacacgacagagtaagttatctgtctatggataatttaacatatgaatgagttgagtgagaatttttcttatttttgtaaattatttaagctttgaaatggtttttttttttttttttgatgatgaatccgagttgactcagttcagttccatagtgaattacgagttccgagttcaatgtggacctaatatatatatctttttctgtcgctttatgtaatttttgcccgtgaaatttaaatgttgtctgctgttgtttaggaaaggtgtgcaatcataaggtttattattattattattattattattaaattattttttaaaatgaaaagtttggtcaatt

SEQ ID NO: 162793 - DNA, 1434 bp, Cannabis sativa
  modified_base (1322)..(1345): a, c, t, g, unknown or other
tttttttttttttttatcataactaatttatttcttttttaatttaataattactaaattattaaataaaagcgtaatttaaatattttttattatcttaacaacaaatatcataactaataaaattacccttttattaatttatcttcttctatttttctattttctctaagtataaaaattctcataattaacaactaagcccactaagagattaaaatacattattatattgacattaggtcgattaggtgaggcctgatttgtgagatactcatcatccgtacggtaccatttgatagtgacaggtgggcatgcgctgtcaacagtgtacaatatatgtcatggtagtggacattggacaaaaatgtatgtagctttttacgttatccgcctttctcaagtctggtgtaggtccctaattttatgggatttggtattagaggggtgccatgtaagacaacattcggacacctcttcaatcgcctattctggattaccatgtgagagtatcatgatatgttctattaagcatttctttctctgggtgagataaccttctggaatctaaaaatgctcggctttatgaagatctgatctagcttgtcatttgatccgaagtcatggttggactacattgtgggctgacttattggcctaattgggcatgtgaataggcctatcttggttgatttttttaaccttgaaagtacatgtgtcgcctttatggaaacatgtataacatttacccccaagccttcgggactcaagagttgcagaggcttccagttgtcctctggatccccttagtgcgcaggaccatgaaaagcttgtgccctacgaaattccatagcaatgggtcgcggattgtggctgacctttcaatttctatgagtggagtacacatgttgctaatttattacatctgtgcacaccacgcgacttggggaagcgtgttaaatctcgaatcacaaaacgacgcctagtcgcttcaatgaaacttcagaggcaaatgtcatcattaataacactcaatcttttacatggaaatcaatggaaacctttggtattcttggaccgttggatcttaataaatgtgttttctcaaatgcaatatgagtcgtcggatcatgagcatgcggatcactaccttgtatataaatggggcaaaagtcgactagttaccactttttctatttcagccttttgagcacaaattttttgagagaaaaatcagaccaataactcagaaattttttttggtgaatgtctgacgtagccactgagtgttgggaagtttttaccatgatctagatttactnnnnnnnnnnnnnnnnnnnnnnnntaaatatgaatatctctaaaataacaaaattaaacacataagagtttaaaaaaccttacattggttgcagcggaatataatctcctttc

SEQ ID NO: 162794 - DNA, 2331 bp, Cannabis sativa
atttaatccaatattgcatgtcatatgaatatgcatgtttacaacatctgtatatattttctgtttctcagttttttttttctttgaaagggaatttgtttgtcaagttcaaatatcaagtcttgctgcagctctacataagcttcgagtgacatattcagagaaagaaaaaaagagggcgaataattaaataaaaatgattgaattacactagtgtagagaaagacatttcttaaataatacttgtaatacacagtacactttttttattttttccttagctttatctattgaggaagccacccataatgcagtggcccagtttctgatagataccccaaatattgccattcaaaaaatttcagaataaattattattaaaaaaaacaaacagggtttctttctgaaggtgacattgaaatcccacatatataatctatatttatatatgtagacaacacctgctttactatcaatgaataaattggattataaaaccttccaactcttatatttttatgggcacccattccaatttgaatgtattttttattatttataaattaagtaaaataaaataagttgctcgattaattacttgaacagttttgtgtattagtttatcatgttatggatatgggtaactctttatgtacaatgtagaagaagatagctttggatgtgatatttgattatatttcagcacagtgattaatgggtccactacattttaaaaaagaatagagttgagagagatagagagtgagatgacgagccatattgatttaattatcatgatggactttttcaaactcatatctgttccacaccatcataaattagtcatttaagcaattaatttataaatgtgacctaatccttattatatctaaatgtgaagctatttggggtgttaaaaaacagaagaaaaaattgagagaaaaaagaaagaggttaaataagaatccaaattaacctcaatagccccaaacagatgagttctaatgttagggggacacggacaatgccatcatttcatctctatcttttctttatcaaacacctttatgtcctcatcagtcaccattaaaattattttttgtgtactaaataaattatacttattattgctgacacctactttgttgttattgatacaaacaaaaccaagtatatatatggacagagatcaatactcctgacatgcattgtattgtgtagagtataatttaatattaggttttatttattaataaatataaaaaattgttaattaattataaaacaaaattttaagataatgttaagcaccataaatacttcataacaatgttattgatcaagtccaaagatgatgcatttatcaactatatataagtgttttacatgaattacttttcaacatataattaatgtatattaataattgcttagttaacttccattaatataatcgcactaagtaatacctagtcgaatacattacattatcttttcctttcaccatgtatgcctagagaatataggtgttaataacaagagaatgaaaatcatgtcatgtcatgtgtagtagtagattattgtaagaaaataattaagagtttggtaggccaacacttggggtcttgtgattgaaggaaagggcaatgccaattaagtatcacattatttgctatctattatggttttagtggttacaaagtagataggcttttttctcatagtagggtatcttcctctagtgtggtcattggttgctatatcctcaaaaaaaaacacttggaaattctatgttcacctctcaaaaataagtgtaccatacatctctttgtattttgacacataaatagttttattattttatatatatcatagttatttattttaaatttatgaaaattttaaaataatttaaggtgttaaaaataaaatttaaacaatttatgatatatgtagttttttttttattttatgcacgtgtgaaacaaaatattctaaaaatactatttttaagagcgtacatcgtaaaaacaacctatgctatatatatgtatatcttaatggttaggttcttatttataatattcgacttagaagtttcattaaagagggtggtttcgaaatagattacccaatttgatataatcataacataagaatagacgtatctttgtcaataagtgaaaatacatagtagaatgtattatgtcatgctaattatgaaaaacaactcctcaaaataattaaaaaaaaagtctttttggctcttcacttcaaaatagtgttaacatctttatttgtttttttttttaaaaaaaaataaaacattta

SEQ ID NO: 162795 - DNA, 1254 bp, Cannabis sativa
ccaaattaaatataaaaagagattttggaatctgactatggggcctcaaattattctacaaagcacagtccaaaaaactttgacgtatcatggacaagtctaattaatcagttcattatgctaatttaaatttatgtatgtacttagctggttagccgaacaaaatataagttttagtaaaatgatcacctgctgtttaagaacaattcctaaacccaaatctaatttaacggaaataacagtaacatcaacataacatgtaataacttctttttttgataaatttcaatcacactcgtagcatttatccaattaccaacatgtaattacttcagagaaaccatataaattctcaaaagaataaggaacatccaaatgacaaacaaacaagccaatcaagagaaacccttttcagcaaacttgctaccaatcactaccagccatatcaagctcaccgcaaaattgtatcccatgaaagaaagaaatactcaaaaataaaaaaaaaaattactaaatcattaacccttttttctttattccatatgcctatctcattcaaaaaatttattcttttaactttgggatcattcaaaacttttatgacccaaaaaattccttacctaacccaaaagttcttaaaacctcaatcaactacatgtacatatatgcacagaaacatcagtaaattttcaacgtttaaaccttcgtttgattaatccatttgtctttcaaaactttaaagatccatatcgtcaaaaagcttcttttttttcttccaagtaccaacaaattctaagttctaaccaaacccaacatacatactcattcgatccaacaaccacaaaccacaaaaccatcgaagcccgtaaattcacatacgaaaagacgtacctgtgagcatgagaatagattccggcggaaacttaaacttgttgatcagcaggtacttcatgcacttggcgtcgttgatgcaccccttgagttcgtgcctcgagaacttgtacgaaatcccacaaatcacagcccttttgcgcccatgcgcgttcgggggaggtcccggaggcgcgtgtccatacggagacgggggaggaggcgcgtgggccggttgacgaggctgcggcgcgtaaagtgaggttgacgatggttgagcaggaggagcggcgcgtggatcggcgatgtaagtgatggcgtggcagagggcacagcgtatggatggggctcccggcggtagctgaagcggagtacgacagccgg

SEQ ID NO: 162796 - DNA, 2293 bp, Cannabis sativa
  modified_base (2252)..(2265): a, c, t, g, unknown or other
atttgttctggcagttggcacgatatcatttgtggtgccggttgtcacattttggcacaaacctattggcccgatcaaaagagcacgacatgtgccaatataatggtgggcactaaaaaataactttgttcacactaatattttagtcgtaccaatacccttttttttcttgtattgttaattttcaatgatattgattattatttgaaaagaaaacataatattaccgtgataatcatctattctattgtctaaattttgaaacaaaattaataagagtgaatggaaattcaacacaaatgatagaaggttgttcattgtggaaatatgagccaatcatcgaaatatttttcttcttaaaaattaagaaattagtaaaagtgttgaaatattctttatttcattatactgtataaagatttttgcattattgcatatctccaaatctttactttccgatttagtttagcgtattaatctgattgaattcgtattattttgtttatttgatttgcattaatagtgtatttcatattttagatttaatccaatccgcatatcaacttatcaaatctaatttaatctgtgcaaattagatcggttattttacagtaacggacctaaaactaaagttgattaaaagtaaagatgtttttactagaatttgaacccttaacttttgtataagataaattaaccatcatactaaaattaatattatatttatatttatcacatttaattataaacatatgttataattaataaccaaaataatttatacattttttttatttttttttttcaagggtaattgccccgcccccctccccctctcgcttctatgtgggtccgttcatggtagagggtgctagggaccaataataacattagtcttttatatgctatgtattttcttttttttttttttttttttgacatgtatatgctatgtatttaatttgactatttcttcatgtaaatttacatgcatgttcaataatataaacaaaatgaatacacagtacggagtctaagttaggcaagttaggcaaaatcaacttcttactttctaatggccattattcgactttccaacaaactttccataaataattaatacttttatgtgattaatattttcaaatcacatgtttaattaattttaattagaatatatcataattaaataataagaacattgcgacaagttgagtcattgccagcgctatatattcaatttaaagcttagttttattagttgtaaattctgtctacgtaggaaacttaacaaactagctatatatatttatatcttagtcaaatttgctgccattgcttgggacttttttttttttggtaaagattgcttgggacctaagaatacgtacaattttttttaaaaaaaaaaaatagtgagagagagaatattattataaataaaaactttttataagttaaggtctttttcaaaaaatattttaatgagctataattatgtagggttcggtgcagcagtaccttagaaatctaggcttttttttttcttggaaattctagagtcaacttgttgaaaagagcacacacaaaaagaaaaaaaaaaatagataaataatctttaatttaattacaatcacatatggtggtggcatgcattccatctagtccatatgctatgttggttggtaacttggtactaaacaaatgttattatatgtacatgtatttttaggtattaatgatatactaatatatatatagttatgctttattttatgtttattaatttgttaacaattgttttatattatatacctcctcacatacaacattcgtagaccacattagtattatatttggtaatttgtcttaaacattaagcatatatattatatataataatgcatattatattacactgatgagcaaatcacttacgaattatttggtgttccttatatatatgtttatttaattttatttggacgaatgtgcattaggtcaatagagcattaagcacgtacgtttacttttcgaatttaactaatctttagaagattaactaattactaattaaaacgacagttgaaaaaatcaaattcacgagaatatccttttgtttgtttacttaaaaatgatccaatttagtaagttgccctctatgttctcatgttagggtatgtttttaagaatacaaatgtaaataagaatcaaagtcgcccttacgcataagaggaaattacactctatannnnnnnnnnnnnntcctcttttatttttaccctctttttta

SEQ ID NO: 162797 - DNA, 8479 bp, Cannabis sativa
  modified_base (5979)..(5981): a, c, t, g, unknown or other
  modified_base (8433)..(8435): a, c, t, g, unknown or other
tagttagggtgttacaattattgtccagccattttgttattggtgtctactatgatgtcatcaacatatataagtaatccaaggaaggtgtcttgtgtttgtttaatgaaaaaggaattgtcattcttagattgagtgaatccttgttgcaatagggtatggcttaattttgcataccactgcctgaaggattgtttaagaccgtagaggcttttcttctatttgcaaactgcatttttaagaatggtgcctttaggtttgtaatcttgtggcaatttcatgtagatatcttcatgtaattcaccatggaggaatgcattgtttatatccatgggtgtaggtgccactatttgatggcagcaagggcaaggagatgtttaagtgtgttgaactcagccataggggcatatgtttcaaagtagtcaacaccttgttattgagtgtagcctttaacttctaactgagctttgcatctttcgactgaacaattagggttatattttattctatagaacaatttgtagcttatagtgtgttggccgggaggaagtggaacaactatctaggtttcattagcttcaagagcatcaatttctgtatccatggaattattccatacttcttctttgcaagcttctgcataggaagtaggttcaaaaaacttggtgatagcaagggcagttgctttaaatttgggagaaatttttataagagagaaattttattatggggtgagctgtgctggatgtggcatagttgtaatcctacagataggcaggtttgtttatttgtctacctaattttgtggctggtcggttgtatgctgattgttattcaattggttgagttggtgattgtgtgatggtttgatcatgagcatgagtacgatcagtattatttatatgagtctgagaataatttcaatgttaggattataagtactggtttttgaagggtaaataaattcataaaagactacatttattgattgaaagatatttttagttttgatgtcaagtagtgtgtaggctttcatgttttcagggtagcctatgaatatgtaggccctagctcgatgtgcaaacttatgtggagtatgaacatgagatgcacaggctaggcatccaaagttcttaagatgtgcatattcaagtgctttattgtgcattaactcataggaggttttgtcttgtagaaggacagaaggtgttcgattgagcaagtatacaacagtttttaccatgtaactccaatagggtaatggtaagttggattgaaattccaaagctctagccacttttaaaatgtgttggtgttttctttctaccacgatattttgttgtggtctgcccacacatgaattgtaattgataacaccttgtttagcataaaaactagttagtgttaattcttttcattgtctgttcttatagatttgatgttgcttttgtaatgtatatgtacaaaaatgaaaaaaaaaattaatgataggaggagcatcagattttactcgaaggaagtataaccatgtgtaccaagagtggtcatccacaatggttagaaaatatttatagccttcaacagaaggtatatgataaggtccccaaatatctagatgaattagatcaaaagtagttttggtaaaattgttatgagatacagaaggtaatttcttttgtttggaaagatggcaagtagcaccaatatctataatccaagaaataggagataaaggatcgggtttaccaaaaaaaaaattgttgatggttgggccatataatgtggaagcatcattggtaggttgcaactgttgggtgagcattgaaattaactgatgacattgagcatgagttaatgaagaagtggggttttattcatttgagattgtggaaacttgtgaagttttgggaatactgggagatgtggatggaacatctggttttcaaatgtttgaagcagggtgttcattggatcctagttttccatatctcttgtgggaaaccatgaagaaaataacatttgtctttataaagtcctggcttttgacaatgtgtgcaatggggtcgtggccttttgtttcttgaagtttgattggcagtaggattaacatcaagtgtagaagtggcagatggattatcagtagttgtagttttagtgagaggggggtaattcgatatcctaaggttctttgtctttcttggaggacaaccatggaaaacactttattaagggaagaacagtgatcaagaagtaatatttgatcatgaattgcatgataagattcatttaaacctttaagaaattgcaagacttgatcatggttgagatggtcttgagtttgagctgctaccgcacatgtgaaattgattcgaggcctgaggtgattaattttgtctcacattgctgttaacttggtgacgtaggaactatcagattcatcactgttaacacaaattttcgttaactaaattaaagtctatttcgtgatggatttgcacagaaacaatagtagtaaaagaaaaagaaattacacaaagcttttttacgtggttttgcagttaaaattttgcatagtccacgagtctatcttattagatattcctgataaaaactatggttctttctctaaaggactttttgtccctttttcaatgtatcctgcccctatttatatttacataggaaggcagttaattacaatcaaattgatattccacaacaataatcccctgaaattgtgggatttgattacgtcccacgcaaaataaatgcagctattatttgaaaatttcatagctgtgatttatccacttttaccgagtcaatgtatacgtggattaaacatgctgtaaagtgtatcttgctggggcatctcactaagaacatagcaacaacaaccctggcagcgagctggagcttttccgaggttgataatgtaaatctcatcttttctgctactaaagacataacgctccatctgataattgcagttcttggtgacaaggtgatcttcagcagtcaacatcatttgaatgccaacttctacctgagagagttgactcgacagagcagtggatctcattgaaagatgtctgaagatgattagtgaaggtaccaggagtatgccttcctatagtgagatggatgcctcgctattcgttgttaagatccattcaactgttatgcttagtttgtataatgtatatcatacgctaagttttctaacagtcaacatgtctcgtctacatctcttcatacgtagtgaggttggtgcctcgttttgtactactgatgtcatccttataattgtgtcttctgatgcagaatggtttctcgtcaacgcatgatacaatagtttgtacattcttatctcacttaagactttacagtcagcgagtagtaaatatactctatcaactccgcattgaatgagttattctattttaatatcctttaatatcatcatcattatatttgttgatttgtattctccctggttacacatgtccttctcagaagtaccagctgaatttcgggtataacaattgcccctttaatttttttttaatgaaaagtactttttaaatgattacaaagggtgtttttgtcttaatcccttttgaaaaaatgaatgtcctctcattttggcagttttgtgatttcgaggtatatcagcatttaatgaccatcttttccacttctttttcaaatttctacccgttcgattaattgtctccctgatctaacagaaattaacccaagattataaaatgaaaaaaggaataacccttgcactacctttgccatttcagaaactctaaaaaaatttcaagcttttctgcaaaaaaaccagtccctaatttgcccgaaaccgtgcatgctatctttgtcattaacatttttccttcgagtttcatctgatttagtttttgtcttcaagcattcgaagggatcttcacgctgttcgttgtttcgcaaattgcagagccgttcatcgtcccaaaaaccaagtctaaatagtaagtgacttttctccttattttcttacatgcttttaatgttgtgtttctgggtttgattactaatttcttagtcagtacctttgttacttcatttggttttagcaattttaggactgaattgtatctgggtaaatgctagggtttaggcagaatgtagggttttgagattctccaatttaccaacttctggtttcataaatttcttccaggaattgggattgctttctctttgcagcaatgtcccaatctggttgagaattttatcgtctagaagaattcgaaataccgtgtcctattgaacttgccatcccatacaaaccaagaactatagaacccaaatccaaattacagataaatgatgcaaaaattagagaacacttagttaaaattcacaaagaagatattgctagtcgccacaaattctttttgcaggaacttacagaagacagacgccatttcttgtgagatgctgcttggcctaaacccccagtttgtcttctattcctttggctaagcctttgtttttacctaaggtcacaattgctttgaaccaggtgacttggattttgaaattatgtcttccaagccaagtaaatcaaagactccctaggtgcgagcctttgtttttaccctaatgtcactttcgaggcaaagctaatagagtcgaaggtgcgagccatcggaggttatgtaggtgatacactgaggtcttgtggtatttaatataaacgagactgtcaggttagatcggtggttgttggcgagtttagttgttatccacaagtgcggcttactcgcgaaacatctgagggggtcagtggcaagactagtacaagtggctcgatcgggattggtggttggagtctcaaacacatcagggctggagcaataatccccctgcaagactatttcaaggtcttcctaaaccatctctggcttgccccgtttcaactgaatcccatttaaaatagaatcctcgcaagcttgaaggttctgtacaaaattttaagatgggagtgccccacttccttagaaatagagtatctctactctgtcaaggtagttccggcgaggaagaatacagcagggcatttttactatcttcggactcacacaagtgatcataagatcattgtggattttcccaataaaactccttttaaagatgagttcttttagacgaccagtctccccccgattggcccaaccactttttgtataattcgtaagtgactatttgcataagacttggttaaattaatccatgacttttattctggtttatctgactacaatttttgctttatttttggcagttgtctcgaaagacttgcccctactcctaaaatggccgagcgacacaagctcctgatgggtctcccatacggccttcggtcatgtgactttcttttgaacgaggtcaactcgaggtccgtgggtctccttactgacaaggagtttacttgcgattataaatatccgaagtattcttcttgatagcaacttcgtatcccagccgaggaagaagctcaggatcgtgtcgctcgggcacaatacctccagaacacttccactcgggaagccgatgaaagagcatcccgaggtaatcaatgtggttggtcacccacagtgcttagggccgagcgtaacactctagtgtcattttgagatagtcactataacttttatacttggcatcccctcctcgtagatcgcattacgcataggtttgatagatggtatcccagtttccacgtccaaattaactctactgagtcatacttcgagatagccaaacagtacggaaccaatatggataggaaaagtcacttagacgcaagctgggatttagaaccaattgatccctatgatatattcaggatcacgggttgtagggattttagtggatattaaagtccttcttcctcgtcttctagtgattatggtaaattccttnnncaggaaattatgccccaatctccccttttatttctctttcaatacatatttaacactttatcttatctcgcagaaatgaatttcgagggtctcgtacacagcaagggaaagaagaggacgaccatcccggaggctccatcaaacattgacgtggaactccctaaaaggcataagaagtctactactaacaagaagtgagcctcccaggtcgttaatctcgaggtccctaaaactgaaacttaggatccgatttctccttggatccccgcaagtaccgacaagcctcttctcaaagcgactcaagcttcttcctcctcgagccaagccctcgaacacattgcatgtcgaggctggaaaaactggcccagagtatactgtagagtttggtgcagtatgctggcgtcatttcaaggctttcctcccccatgaatgggatttaatcaatcatggggatctaggggcgatgctcacaaggagtttgtctcacagcctctcgataggttttccttatccttatttgctcacttctttttttttatcactttcaaaatactcatgtatctttgtttgttggtttccagacttctttcctatgctttgttgcctagcagcgaggcttggaaaagataaagtatctagagggcgaggtccagaacatgataggccagcgcgaggctatgactaagcaatggaatgatgctaaactggagattacttgccttactaaagatgccgagaaggtgaagaatgaccttgatgccaagcttgaagatgccaagaaggaggcgaaggacaagactgatccatgtgtgaaactccaagggggacttgaatgcagccaaaggtaaacactgatgggaaagagaccgaaaccattgaacgatgcaacattgttggccttcgtaccatttaccaagcttgtatggaaaatccgaagatggatacgagtttcttgggagagtctgaggaagaaattcttcctttctgcgagaagactaagaaagaggaagaagatgtcgaagagcagcagaagaagaactgttcaagtctcctactatgtaggcttggtttttatttgtttttattttatttaggcaaacggtcttaagaccgagacaatggtttgccccttgtggaacttttttgtaaagacaaatttgcaaggttggatggccaactttgcttttatttcatcattcttgaatgcttcgtatatttttatctgaacttaatatatctgtttgtttgtgtttcaattcacaacttaaaaattatattttgatcaaatttaaattatgttaaggatttccattgctcatattttcctttgacattacatgagtagttaatgatctactatgtgcgcaagcaattattatctgctatgtgcgcgagcagttatcaattctgcctcgcataaacagttataatctattttaagcaaacttgaatatactattaatgatttatgactttgtatatttttgattgcttatatgaatagttaagtcatttattcatatactaggtttaagtattttttttcaaggcattttggtgtcccgtttaatactctcctatataatgtgagccgttagtattcagctttgcatgtagcttatgagttatatctcatttttaacttttgactttcctttctcatcaaaaaggttctttaataaaaaataattcatttacaatttttttattttcctttctcctcagaaaggttctttaataaaaaaatttaaagtagtgggtttgcaatatatcatgtatttttagataaattctcgttaatcaaacacatatacccctcaagtaattttaaagaataacactttgtaattacttaaaaaatgattaactttattaataatctgaagttcaaaatattacatgagaaatatgagttacagcatcaatttattggtagtaggttcgcaaatgttccacgttccaatagttctttatcagcgagctattcggctgagccaattagtaaatctcggttcctactatcgcttcaattgcataaagaccctcccagtttgggttaaatactcctgcagatgcgtctctcatatttgcaaatactcgccttagcaccaacgttgaagagcctctttttcacccttttgttgaactatcttgttactcggtgttggtatgctacattagtaatctgcgactcagtacgtttttcatcaagtagatccaaggataatttcaaaagttcttcgttttcttcttgattataaaactctcgtctatgagtagagatacttacttctacaggaaacattgcctccgagccaagtcctagcgagaatggagtatgtcccgttactgcttctcagttgttctatgagaacaaagtacctgttgtagttcgttgacctatttgttggaaatattttaccagggtctagatttactaacaagtatgttnnnttaacatcctaatatgaattctctaaaacaataaaataaacaca

SEQ ID NO: 162798 - DNA, 4463 bp, Cannabis sativa
ttattattttttaatgataggagtgttatttttggtctgacctgtaggaactgaactgctctatttcatatattttttttttttcaaaattataatctatttatttttgatatgtgataagtaataggggtaacagatatgagtgagtatagtatagattatattatagaatagtagtggctgggtttggtctggtcaagtcaaatcagtcgacagaaataagagggatgagaatggctggctctgatttcatgatcagttctcttggaaaacaaggaaaattaaggacatgatcaaaggcctgcttgtcaacttgcacaccaacttgcaaattgctatgcaatcgtcattaatattaattattatttcttatacataaaacaacaccaagttacacaacatattttaattaattttctttctctatgtattaataactacattattattcatacacatgagattagagactcttagctaattaaagaatataaatgttttaaatatatgtatggtgggaaaaattaaagccacttgcctttctttcccccaagttgatgagtaatatacatataaatttactcaaattattgcaacttggtggcagctgttggattccctccttctccaacacaattttttgtttacttattttgaattgaataaatttatttatttatttattaatagttacatgagataataatcgaaaattccaaggctacgctttttcaacccaagactacatttcaattcttcctcggctttactattagaaattttacaattaggaaaaagaaaactagtatattcaagcatgaagcatatctttcattttctttctttctttatctccattttctataccttttttaatgtttattaatgcacattcaacagttcatagtttgatttgaatatgaataaaggtttgaaaggaattaataaaacttaaaaaaaaattaatttgaactattattttttatttaaattttgggaaatggagatgtaaagttagagcctccatgttgggaggaattaattgtaattacaccgtatacgcttacgaaagcaataactatatatggatttaattattaacttgaatagaggcacatataattaatattttattggttatttagaaactacacctaattgcccctttactagttgcctgcatttttttttttctttttcatatataggcaagttaagcataattatctagttagaataataattttagctagaattgatgcatgattttacgtgagaagtttattaataataatatactataatttcgagtgtttatacactaatccaatgcgaatcttttttactttacagcactaatcgcattgtcatttttctaatgggtgtaaactatcgatcttgattgtgctaacatatatctatatagtgcaaattaagaagattttttcttagcatagatataaaataaatgccacatgatgtattcatgcgtaaattaaatatatattatcagtgtccccaaataatcagaatgattttataggaactttagaagaaactaatatagtgtcacaggggcgaaaagttgtaccatattaaatgattgacacgctatttataaataatttacagaaacaataaaattaaaaaaaaattatagttcaattagctaatttaaaatttagcctgatcatgaattgttaaaaagtacaacattgaatcaatataacaaaattcaaaattaaaaagcagtaatgatactcacacatttggttcaagttcaaatcacattgatataatcaattgtcagtcaagtatattaatttgacatgtaacgtttcattattatctagctatctatacaaactggatatctgagtagtatagcaactacaataaataagggatcagaaataatgtataatattatagatgatgaaatgaactatagctgtgcagcaatgtctgattttgggacagttatcttcctaaaaagtagtctatcaattatgtaaaattatcttagggttgactaaaaatacctcgaataactacccctatattatttataattccgagattatatatacttaaaataaaaacatctgaaaggtaatctggtaattaaggattcattcttaactaaactaaactatattaatcatagttttaccgtaattaacaaatcaaacccatcaaccaaaaaacaacgaatttaaacaaatcaccactaataaaattgactaaacaatttataatatataatagtggcacacttaaaccttaataaatgtaaaaacaatatctcaatgatatatataaaatatataataaaaggggttttgatggtaaagtataacaagttataattaaacatatacacaaaattatactcccatcacctccaaccatttctaccccatgagaaatctacaaagatcatcaagcttctctgatcatcagaaaaaaccctagctgctagttaacaaaaaaactcttaacaaatctccaaaacgggtaatgataatgaatgatgatatatatatcatcatcatcatgataatctgtaatacagacgaaaaacaacccatatagcatggaaatttcaaaataaaaaagaaaagaatgaaatttatatttatatatatatgtattaattatgaaagattgttatgacattttgggttggccatgtttttcggcgatctgagcaagcgactgaagattacaacgtacaatggtgtctacaaaaacgcaggtctcctccttagtgttaccttgtggtacgtcaacgacgtatgattcgacgacaactgtccccgtcccattggccgaaggatgaagtgtggtgacggatcggtagttattgagacggtgatcccctcccacgacgctgaagctcaacacgtggcgctcgtcgtcaagtatctccaacctctccctgctcgactcggcaggaaggcccgaaaccacgtggacctcgcggagggtgcccacgttgccatcaccgtcgatgacgtggcagctcttgagaaagtgtttgtaggcctgtgggttatcgaaccgtctcaccacggaccatacagtctccacagccgcatcgatcgcttggaccacgctcgagcagcactggttgggtcccaccgagtgggcgtggtggtcagccaccgattccggaactgcgaaatactttgctgcgggaacgatgtgggattgcttattctggcatccgatcacggtcgggtttctggggttgattctgtggagttggagtgaggaaggcatagcttttctttctttttttctttttttttttttttttggttctgagaaatgtgatttctctcaaaccttcacaagagatttaaggtttggttgataatttattttagaatatatatatattgattattatacgagggagagagagagagagaaagaaagatagttttgtttgtattttaatgatttaatattatatataatgaatggtttcccacttgtattagttttggtgtttcctgggagagagagtatgtgtaatactatacggtgatgtgatgatgtttatcgcagagcttacgccggtctccaccaagtggattgtcaacttgcaaactccttttggacttagtttagctttattaattatcccttttctttacttttatctacaactttgcccttctcttattctacttaatattattccttacattttcttttcaaggcattccttccaatgtttttcatatttattatcgtgtgtatttagctttttgccgattcttttaatttggatgattgtactattcatgataatccattttctaaatataattaaatatatattattgaaaaattctaatgcaccttctaaaatgagtctatccatgtatttttaatttgtttcggtatttaagaaaattttttaatttaattttttttatagtcatatgttgtacttatttaggacatcatacaaaattttgagaaattcaaaaaaaattaacacgctcaaaatagaattcaaacagtctattttacactcgtataaagtaaaagagtatcgcgtgtaacagattgtttgaaccttatttttaatgtgttaaattttgttgaatctctcaaaattttgcaaagtatcttaaataactacaacatagacaaccataaaaaaaaaaattgactgaaaaattctgccttcttggaaatatgcctcatggaccaagatctagccttgtgtggttctcaactcatctgtttcaacgaagattctctcttccccacggggaaggtccatctcccaatcacccttagccctaacatgaggcgaagtaccttcaaatagtacgtgtacaaccccaaatggctagctaatctaatcctagtgcccaaactaaatgggactttaagagtttgtattgacttcatgtgaagactcggtttgaccgagtcaaacc

SEQ ID NO: 162799 - DNA, 4538 bp, Cannabis sativa
gttttcaaacttggtatcagagcacttttcacaccggtggtgtccttcgttgctcattgctccatggcagaacaaactccgattcgttcaggagaacagagtgctgcaagtgcagttgctcaatcctctgttccttcagcaagtgctgctggaacccatattgctagcacattaaaccaaccctttgcccttaaactcgacagaaataactatactctgtggaaaacaatggtgtctgccattgttcgtggtcatcggctggacggatatctgaaaggtaccaaggtgaagccgattgagttcctccctggggatcttgatgcaggagaaggaaacgttgtgataaacccagagttcgaaacgtggattgttaatgaccagcttcttcttgggtggctctacgggtcaatgaccgaaaccattgtgactgaagtaatgggttgtgattcagcttcaagtctgtggcaagcgttggaaactttgtttggagctcattctcgcgtgaagatggatgagtatcgcactaagattcagacagccaggaaaggatccatgtccatggctgactatcttcgtcaaaaacgacaatgggcagacgttctggcccttgcaggtgaaccatatcctgaaaaacaacttgtctcaaatattctttctggtcttgatatagaatacttacctattgtgctacaagttgaagccagagtttctacctcttggcaagagttgcaggatattcttttaagctttgatagcaaactagacaggttgacaacattatcaggagctacaaagaatctcaatctttcctctccttctgcaaatgttgctgcaacaaaaccttttggtttttctggcaatcgaaacaaccagccaagtcattttggtcctggaaatcgtggaagtcagcctcaacagagaggaggcaggggtcctggtagattcagaggcagaggtggaaggaacaacaacactaaacctacatgtcaggtgtgcggtcgttacggtcattccgcagcgtactgttacaatcgttatgacgaaaactacatgggttcagatcctactgcatctggttctacatctggaaacaaaggtcagcaaactggtaataacaatggggcttctgcttttgttgctacacctgagatggttgaagatggggcttggtacatggactccggagctagtagccacattactactgacagcaacaatatgactcacaagactgactacaatggtgaggatactcttactgtgggaaatggtaatcagttaaaaattacccatgttggtaaaagctctttactctctgttgataacagtcatttagtcctaaataatgttctgcatgtaccagatattactaagaacttgcttagtatttcccaactgacatctgaaaataatgtgtttgttgaattttttgccaaatgttgttttgtgaaggacctggacacaaagaaggtacttcttcaagggattcttagagatggattgtatcaagttgctagccaacaaggaagtttgagcactggttctcctagtttgtctaactctctgtctgtgaaaccttttactggtgtagtgtctaaatcaagtgatcggcatgttgctgaacacaattttcattccctaaaggataagtggcacaagagattgggtcacccttccagtcgtgttttgagtcaagtgttaagcactcttaatgtaaaatctgttgttaatgaaaaagaacatttctgtgaagcttgccaatatggcaaatcgcatgctttgccctttaataccaattctcatcgtgcccaaaatgtcttagatttaatacacacagacctatggggtcctgcaccagtcacatctaacacaaactacaagttctatattcattttgttgatgatcatagtcgctatacctggatttatcctctcaaaacaaaaaatgaggctctttcaacttttattcagtttaaaaagctagtggaaaatcagtttgagaggagaatcaaagctctcaaaactgattggggaggtgaatttcagtcctttagtgattgtgtcattcaaaatggaatagactttcaacatccttgtcctcatacctcggctcaaaatggtcgagccgagaggaaacataggcatattgttgagatgggcttgacccttctagctcaagcacaaatgcctttaaaattctggtgggatgcttttcagacggctgtctatttgataaatagattgccaacacctgttgtgaaaaatcagtccccttatgaagttgtttacaaaaagaaacctgattataaatttctcaaagtctttggagttgcttgttatccttgtattagaccctatcaaactcacaagtttcaattccactcgattaaatgtgtaaatctagggtatagtgattcccacaaaggctataaatgccttagctccacaggtagattgtttatttctagaaatgttatattcaatgaggaagattttccctttaaaacaggtttcctaaacaactaccaacctgaacaagaaatctgtgttagtgtcccttcttggtcagccttgtttcagtcccacaggtcttcctctccatccaactcacaacaacctgaggctcgtgcaacaccatctcaagtccctggagaaactactgtaacacagtcgggttctcatgatcaaaaccaggtatcacaaactcgcttgccttcagattctactggttctattgatattattcctgctagttttcagcatggttcaggcagtcataacctggacagggatatatctcacgtttcagaattgcaaggtgatacttcagctgaagtttcagatcaagtggttgctcccaaaattccatctcatccgatggtaaccagatccaaggctggtatattcaagcctaaggtttacactggccaaatcagtttgagtcacaatgatgaagaaccaacaacagttgaagaagctcttagacacaatggttggaatggagctatgtcaactgaaatggttgcacttaaacgaaatgggacttggattctggtgccaagagttgctggaatgaacgttattgggaataaatgggtctacaaagtgaaaagaaatgctgataattcttttcagaggtacaaagcgagattagttgccaagggattcaaacaaagagcgggaattaattttggagaaacatacagccctgttataaaagcttccactgtcaggattatattgactattgcagtttcaaagtcttgggagattagacaacttgacattaataatgcatttcttaatggcaagttggaggaagatgtttttatggaacaacctcaagggtttgtggatgcatccaaaccagattatgtttgcaagcttacaaagtctctctacggtttgaaacaagctccaagagcttggtatgatagactcaaaagcactcttatcaactggcatttcagaaattcaagggctgattcttctttgttcttttacaaagtacctggtctagttgttatggtgttgatatacgtggatgacattattgtgacaagcaacaatactagtaaattaaatcagttcattaacaagttgaataatatgtttgctttgaaagatttgggtcctctacattatttccttggtattgaagttcacagagatgagacaggcttgtatctaaaccaaggaaaatatgtgagagaactcctacaaaggactggtatgatgcatctgaagtcttgctccacaccaatgacagtcggtaagccactatctaaatcggatggagaccctctacacaaccctactgaatataggagtatcataggagggcttcaatatctcactcacactagacctgatctctcctttgagtcaacaagttaagccagttccttcaagcccccactacagctcactggagtgctgctaatagggtgcttagatatctacagggcactatgtatcatggtttacacatcaaaaactcaaacaggcttgccatcacaggatattctgatgccgattgggcgtgctgccctgatgatcgaagaagtgtagcaggttattgtgtatttcttggggatacacttgtttcttggtcgtcaaagaaacaagctgtagtttcaagatctagtacagagtcagagtatcgggcacttgctcatgtttcagcagagatttcatggattcagtcccttctcaaagaattcgacttcccgcttcaatatacaccaataacatggtgtgacaatatgggagcaagtgccttggctgcaaatccggtgtatcatgctcgaacaaagcacatagagcttgatgttcattttgttcgagacaagattcttaacaagtgcctggaagttcgctatgttccctctagtgatcaagtagcagattgcttaaccaaaagtctcacaaatcacagatttcatttcctagttgacaaactcggtgtagttgaaacaccaccaagtttgagatgggctgtcaagaaatgaaattcctcacctacccttttacctgct

SEQ ID NO: 162800 - DNA, 871 bp, Cannabis sativa
atataggaaaggaagagaaaagtgtgttgtgttgggcagggattgaagagtggggtgggggctttttataagtgtgaactgtgaaccacaaaagattaattaagggaagattaattaagggaagattaattaattaaaatgattgaaaatcactgacacgcgcatgcactatcagacgaaacaaattcctctgtttctttaggtgccactgctgtacttttcgaccatacatacaacactagttttgaaaatacactatttattttataaagtaaaatagttaaacaatagagatgagagccaataaataaaacttatatattaagttatgtaggtaggaggggaccggtgaaaggtgtagtatttttttctttttcttttgggtcgaagattcggaagcgggccaggagaggggttctttcaacacgtttacgctcgtgtctaagtatatataatactaagtaattttctcttaaattacacacaaatttaatatatatttaattgatgtgaaaatcaatatatacttacgtgattgttcaagaaaaaaatatatgcttacgtgataaattatttttagtgagatttatcataaatcagtacaatttattgttatcttataagtgttatatttgtgtttaatttatatgtagaaataacattactcaatataaaagaaaaattaataaatttatcctcccaacctaggactatttttatagtttggcttttattattgtaaaaattctccttgaattataaaatttattataaatatgccatttatttatataatactcattaatgtaaataatttattaatgtagaattaatgtaacattagtatattagtatgatgatatgcaagact

SEQ ID NO: 162801 - DNA, 1852 bp, Cannabis sativa
tcttatatctattaacttcttgaaaatcagccagatacttcccacaccaatctaatatatcccctgctcaagccatcttggccccatgtttcatgttgttacggatggaccacaagagaaataataagaaaaagttcaaaatcttcctgatgctagtgattagaaagaccatgaagcaaagtaaatgtatcattatttttaaacatctgcaagtctccccagaattcactttttttttttccaaacctctctgctacttctacatccccataaagcatgaaacggtcgctccttgttcctctagaacacctttctcacacagggtcaactgccattcctcttttaaacaacatatagttagtgggaagccataagagcacaccttctaaacaaaatgcttaacattggcttgtcttttgagctttcttagtaacttccacaatctctccatatgctatatgctgagtgtttgattgagatttcttttactgcaaatcaaaagccaaacgatatccacttctaacaaagtattcaccatttttactgtaatgccacattattttatcatcaatgtcccaagcaccacttggtaggttcataattaattcagcatctttagtattatatactgctctcactaagtcaccatcccatcccatgagccgtctgtcttctttagatccacaacatatagctactgaggaagatatggcttatcataaaattaaaaactcaagggtctgggcagccacagatcttctaatatacggatactctcaccattgccgtatcttattccacatcttatatttgatgcatgcaaatagttcttttttccgtgtgcccaccatagatggtaactccaaatatttgccatgatttttaactacctgaacatccaaaagttgagcaaccctttgcttactaatcgccaccaaagttctaccaaacacatatatagctcagacttatggaaattaacagacaaatgatcaccttgtcttaaccccctctgaggagtgagatgtcccaaaactttaccatttatcaaaaatgagaaactaactgaagtaacacacgctataatctttcaaactcatcgatcctcataccccaatttcatcaacatcataacttggataaatttccgctctattctatcgcatgctttaaccatgtcaggcttaagagccatcttgaaaccattacggaattaaattttacgcatacaatgcaatccttaatatccgattatgggattgtcatgaattaactagccttttacaaaggcactttgtgtatttgagatgacaatttcaagggactgcctcaatttattagccaaacacttggaaaccacttcatagattgtataaactaattggtctaaattcttccaatttttttggttgatcaacctttggtaatacatcactatatataaacattgttacaactcattctaaaaaaaatgttttttcttcatatttaatagaggggccatctacattaatggggcacacaaaacacccatatgttggggtatgatctaattgaggtgtttaaaatatttttttactattcattatatatatcttctataatttgttggaaaaataatttataatagtcaaatcaaagttcaatgtaataatgtgtttcacacgtgtatgtttttttttcatacactgaaaaacaacaataaacacattgtaaaaaataaattatagctcaattttatgatgcatctcataaaagggtccatcaatatattgcaccatttatctctttcagcattttaaaaaatcggttgggttcaaataatttattttagggaaatttatatggtata

SEQ ID NO: 162802 - DNA, 8695 bp, Cannabis sativa
gagagagagagagagagaaagcacccaaggaatcggtatgatgagttggttcatcgaaaggtcggtttcttttggaggataaaaacaagtactcgattgtgcatgagaggatctccagcaaaaaaaaaaagattgtgcatgagaggagagagagagggggggctacttatgctttggttcgcgtgctttgatacaaagtgatggggtttggtttttagttgatgagcatgaaccaaagccccacccttagagaaaaaaagatctttacagaccctttttgcaggttttgttccttcagtctggttggattttggccctgagaggagagaaagtggggctcgcttttctcttatgctttagtgtctctctctgattagattctctgttttagttttctcggagaatatggaatttggagacatgggtcagtcgtaatttcacattcctctcaacaaatattggtcacccgagttctttgatttggattcttttaaaccaaatacgagggctattttttttggcgggggatgtcgttttggagctaagtttctgggttttctctcttgtatggaatgaagaagtttagtcaccacatttttcgtttaataatacagaggaacaaataatcaagatgagttctgtggaggaaaaaatcaaaaacggagttttggtagctggaacatccacaaatctactcgaggagatgaagttgttgaaggaaatgcaggatcaaaatggtatgtaccttccttgcattctctgctctattaattaaaaatttgtcttcttcttcttcagatctttactattattattcatgcaagtttttgttaaggatttcttagttttattggtttcgttttcagggtctcggaagtccataagctcagagttatggcacgcctgcgctggcccgcttgtttctttgccccaagtaggaagccttgtctattacttccctcaaggacatagcgagcaggtaagatttgcttgttttgaaatacttttgaccacctttttcttctcttactcatttccaactaaaactttgtctttatttattttctttcaagaaatgtagtacataaaattttttgtactacatgtgtaatttttgatcagccatacacattctattgcgagttttaattaatgccttagtttgttgttgtaaaaaaataaaaatgttgaacttgatatgcatgaacaggtagcagtttcgactaaaagattggcaacatcacaaattccaaactacccaaatctcccttctcagttgctatgccaagtccagaatgtcactctacatgtaaatgtttttagtactattgtaaacgtaatttgtttgcttatataagtacgagcttatattatattttgttttctttaatattttttaacaggctgacagagaaacagatgagatctatgctcaaatgagtcttcaaccagtgaactctgtaagctcttttcttgtaccactactattaatggaaataaataccaatttttctttcgaaatatagttgtatctatgtatattcatttgtttacatccatttaagttttaactttggtttaaaactctacattaggaaaaggatgtgttccctgtaccagattttggactgaagcccagtaaacatccaagtgagtttttctgcaaaactttgaccgcaagtgatacaagtacccatggtggattctcagttccgcgaagggcagctgagaaactcttccctccattggtgagtctcttaagtgaggtcacatactcacacgtactaattttgatgatgtaaacaactaaacatacattccattccaggattacacaatgcaaccaccaaatcaagaacttgtagtgcgagacttgcatgagaatacctggacatttcgccacatatacagaggtgagtttattaggaaataaattctctctctctctctctctctcttcttgtgagtaacacattacgtttcctttatttaggccagccaaagcgacaccttctcacaacaggatggagtttattcgttggtgcaaagaggcttagagcaggggactctgttttgtttatcaggtaaattctattcatctatttaacaataataacattaaaaaaatcactatatgcctgtctatgtatttatatcagagttatctatctttcttaatcttaattttgttgcacttttcttattgtcaaacataagggatgaaaaatcacaattaatggtcggggttaggagagcaaatcgtcagcagtcgacgctgccatcttctgttttatctgctgatagcatgcacattggtgtccttgccgctgctgctcatgctgcctctaaccgcagcccttttaccatattttacaaccccaggtttcctttccatcatatgtggtttttctatctcttctgtttaatatttcagtatttcgatctgtctaactgtgctgtacttggcataattgtagggcttgtcctgccgagtttgtgattcccttgtcaagattcaggaaagctgtttatgctacacagctttcagttggcatgaggtttggtatgatgtttgaaacagaggagtcagggaagcgcaggtaactttcagacttggcttgcacgagtaatgttttctatctgtctatattaacaatgtctttttttatggtcactgcagatacatgggaactatagttggaattagtgagctggatccactgaggtggcctggctctaaatggagaaatcttcaggtgatttttttttttcgttgaaagtccaaggaatccttgagtttttggtttggttgtcttcctattaaaaatgttgtagtgtgttttgtgtctactttgatagatttgagtgttgaacctcatttatttatttttgatcaacaggtagagtgggatgagccagggtgctgtgataaacagaacagggttagcgcttgggatattgagactccagagagtctctttatttttccttctctgacttctggccttaagcgaccatttcattctggatttttgggtaaagttcgttttgcttgttttacttttagcatcctgagggttttagatttttttctcactttttcatgataatttctttggttgttttagcagaaactgactggggaaatatgataaaaagaccttatattcggggtcctgaaaatggaaatggtgatcatattccgtatgggatttcgaatctatattcggaacaactgatcaagatgctacttaaaccgcaactagttaactacccaggaactttgtcttctttacaacaagaatcagcaatggccatggcagatcctattcgagatgtgaagctcatgcagacaactctcaatcaaaaagatcaggttatttgttcagaaagttcatctcttcaacaaaatgaaatgaaccctcctcaatcaaccctggaccaatctggtgtttcaaacatgaattcatcatcaaatggaaatcttcagaaaaacttcaatactgcagtcaaacatgataaccagaaagttgggggagttatggacactgaaaagacaaagttagaaactgagctatctacagatcagttaagccagttgacttcatcatccactgttcatagcagcgacgagaaattggctaatgggccgattagttcacagagcatggttaaccagctgactcagttcaaccagaaccagagcccagtccaactgcaggctaatcagtggggcatgcagccacagctggattcattgatctatctctcccaacaaaatgacctaaacccatctgacatgaataacacgaatgtctcacttccatccctagaccctgatgaatgtatgtattactcttcctgtcacccttactcttctgggattcttaggtcacctgggtcattacctgtttttggttttcaagactcttcagcttttcctgaaacacataatcttcctctaccttcaatggggcaagatatgtgggataataataacctgaaagtacaagcagagcatctcacttcatttcctcatcaagaaccatgcaattttaattctctaactcactcaagcaatttgaaagacttgtcagatgagagcaataaccaaagtggtatctacggttgtccaaatattgatggtagtaatggtggaagtttagcggttgacccttctgcttcaagtgcaattcttgatgagttctctacatttaagaatgttgactttcataacccctcagattgtttagtaggcaacttcagcacaagccaagatgttcagtctcagataaccacggcaagcctaggtgactctcaggcattctcccgtcaagacaactctggtggtacatcatcaagcaatgttgatcttgatgagtgcagtcttttgcagaataacaattcttggcaacaagtagttccaccagtgcgaacatataccaaggtttatacgtagtttaatctgactttttttttataacacttcagtctttcagtttcttttatgttgcctaatgatttgagtttaatttttctttgacaggtccagaaaacgggatctgttgggaggtctattgatgtctcgagttttaagaactatgacgagctttgctctgcaattgaatgcatgtttggacttgaagggctacttaatgatccaagaggttcaagatggaaactagtttatgtggattatgaaaacgacgttctgcttgttggcgatgacccttgggagtatgtcctcgtcttttaagagttatgttcatttgataaacgtaaggttttaaaaaatgtttgattgttttgtggccgtggtttttgcagggaatttgttggctgtgtccgctgcattaggattctttctccatctgaagttcagcagatgagtgaagagggaatgaagcttctcaacagtgctgcaatgcaaggaatgaacggcgctgttgcagaagttggacgtccttgagaaacttgttacgcgagagtactagtgtgttgttgcaggtgctgcactgcaagggagggattgatggtgtgccccccacgaagacttctgatggtgtagcttttatatctaaggtggatttgattaatgtatgtagtgtatggccaactcatgacattgttaaccagcagaccgcactagtgatatgaggtataatctgtgtttagtatagtgttctgagtttgttgttgttgataaaaaccaagaagaaaaactgttacgtatgcattaaaccgagtcacactttactacggcaacttacactatagtaggctggtctgagaaagatttcaaaggcatttcagtttaggttatgttacaaatttcttttactcttgaatctacaagacttttcaagaaaatatgtagcaaaacccactgctcaactcaatcactcaaccaaagacaatatatcattttaccaatgctcataatgttcgttctgttacactattctaatccacctctacttgtagtcagaattgtagcgtgtggggctggtccgacaatcaaatcttacgactttttaaaatgttatattttagggctactttgaccttatcgtgtcttgctcaagccctgtttttatcttgtagtgctcaagtttttacctttcgtgttatgtcgtgttcaaacctttacttttcatgttactcgtgccaatctatatcatgttgtctagctagaacttatatttttttatgtcgtgtcgttgtcttgtctctcaagctcgagtgttttatgtcgtgtcaaagagctcatcttgtgttttcatcgctcatttttgcccaatacattaatacgacctactctaaaatcatgtatgtacagctatcgtgtcatagcatattgacgtatctagttggttaaaaccaactcgactatctatgtttgtgtcaagattttaattctaacttgacctgtcgtgtttatgtatcaatccatcatgttcgtgtaacgattagatccattatacaatacgtgttgattaattttttttcgtattaatatatttgactcgttaatagactacgtcaaagtatgtacaatttagataaatgaataaaattaatgaaataaataatttatcacaaaatattaacacaattgacaatttttaatatcaaattaattatagtgtcaataagttaccctatttttttttagaaactttctttctattttattttgttgtttatgataaatcaataatatatttactataaaatctcaataatatactaagcataaacatgtcaatttgtgtcacaaaggcttatcatatcctacaccgaaagaatatcgtgtcaacgacaagaggggcaacccacttttgaatagggaaatttatacgaatatgtactttataatttatataactttattatattatatatataattttttattgaaatataatattaaaattataaatatataaattttaaaagggtgtttatttatagtttagaaaaaaaaacaataagacgtatactaaatattttattgtgattcatatgtgatatcataataataataatgatttatgcttattttaataataattttgaaaattttaataataaaaaatatttataaaaacacaaaataaacaattttgtgaaattaaataaataaatattaaatagttttaatatttataaacaaaataattttttattaagaaataaaaatttattattcattctattttgaataaatataatttaattaattttctatagaaatataatatcaaaattataaacattaatatatatataaattataaaaatgtgtgtttataattataacatttatttataacatttatttatttattattcagatgtgtgtttattatattattttaatcaatgtttataattatactatgtattaatgtattttattttatacaatttttataatatcacatattcattaaaaaaatacaaaataaataagtttacaaactaaattaaaaattaaaataagtttttataaaaataaacatactaaaagttttgttaaaaaaatcttattaacataatagtaaagaataaatatattaatatgattatgtaatatagttggtatcgaataaaagtatgatattaaagaacaactaaaatatatgattatatttttttttttgagttaattaggagatttattaattaaactcattcaaaataatagaacgcacttcagaggaacaatcctccaactgaagcacacaacctgtagagaaacaaaagtctctggccaagcaatgagccaatttatttgcagatcgtttaacaaaacataactcaataaaagataaaaccaaaaagaaattcgtaacatcttgaacaacaagatcaaactgtgaggacataaaaactttactttggactgcttggacacacaccaaactatccgtttctaacactacattgtctcaaggatgagtcacaatccaactcaacgcttctttgatgactatgatctcagcaatttcgggttggacatacccaacctttctcttcttgaaagcttctaccattgtttcatgatgatcttgaactacacagcccactccaaaccggccctctggttcatatatcatatatatatatatcatatactaaatatatgattatattaatatagttaaaattgtggaatctaataaaagcaagatattgtagtcaataattatttccatatatatattttataaaaaaaattgaaaaaagtttctaagcgtataaaaattgtatgagaaaatattaataagtttttttgcgcatattttataattaattattataaagtatacaaaattataaaatgtccttttttacattgtataacatgttaaaaattgatgcaaatttatattttagtattaaatgtagtataaaataaataaaagaagtaacaataaaaatattgagttgaataattaagacactaaatacaaatcttattggtagaggttaaaaagtaaaatttaaatactaaaattaatatgattttatttgaattagaactcatgacatccgctatatctataaaatagcttttccattataccaaagcttgtattatgttcattaatatcacttttatttagaaatatatgtaataactaagctaaaatgcatatatattttttttttccgattgtttttttcagggaatgcgactttcccacctcgtctctatgtgggtccactcctgaatatggtacatattcataactatatataattatttgtctgtatttttctttttttttttaaattaaaataaacacatatatattgtctattattttcattaaatattttattaaaataaacatatatttataattaataatattaaaataaataataatatttacactataataataataaaaaatagtatgtttattgtgtaaattatttattatttatctaattttatttaaaacttatttatttttttaataaaaaacttattttgatgttaaacacattataaaataaacataaatttacaataaattaaactaaaatagataataagcttttaaattataataataaggctaattagtaattttccccccgaactttgacatgtactaaatcgtgccccctgtactttttttgccgttagaaattccgcccgaactattgagattgttaa

SEQ ID NO: 162803 - DNA, 3066 bp, Cannabis sativa
aaaaaaaaaaaaaagaaacaaaggaatgtagtattattaaacggagagtttcacttcaattcactgcaaccaaaaaccaaccagaattcaaaaaaatgtgttttttccttcatcttcctcagaaataagaacgccccttcttccaacgtccaccgttacaggttcctttcttgtttttcactctttctttgatttttgggttatgggtttgatttttatttttattttttttatgtgggttttttttttcttggtgcgctttttgcaaatgttatggattttaagactgagaagagaaaccctgttgagattttgtgtttagccatttatttatttattttttctggaatttgaagaatatgagtcttgattcccttgttaatcttttttctgttgccatgtttgaagttttcggttgaacaatgcaaagtgttttctgaagcaatttggagattttaaatggatagaaagaaagggatttatgattttctcattaagctaatttagcataaaaaacttatctttgtctgaattttaagttatatgattttagcttaattggtcaaatgatgagcaattatttgatatgggtttttttctttcaacaaaggtaaatggagtatttggatgaatatgtttgttagtgacaacaattttgttactaaaattccataaaaacatgaactttattatgaaatttcactccatttatgttgcagtaccaaaatctgattgagggggcaaaatgtaagatcaagcacttaagaaatagttgtaaatgaattcccttttggattttgtatgtttaacattctcattacttacaatttctgatcaaagatctcagacatggatgtgtcccggtggattctagagtttctgatccgaagccctggtaaagacaggttagccaaggatgccctatcagttatgccagtaccgaacaatgacttgcgcttgaataagattgctctccttcgaaccatagagggcgaggtctctgatgctatggtcactgaaaccattcttgaaaaactggaattggtggaggcattggattcgaggcaggaaagtggggctgctgcaatggcagactccatgaagggtgcatattgtgctgtggctttagagtgtacagtgaagtttttggtgagtggtggaggaaagcctggtgagaaatacctgaatgccctgaaccgggtttggagagggagggtccgtcagttggagatgtctgggaagagtaagctgttcacgaaggaattgaagaggtgttgggatgaagttgaggctgcaatttcggacaacagtgtgtgtaagaagtttttggttatgaacactcgaaatgaggctgttagattggttttggaatacttgaaagaggcttgggcgttattgggtccttcgtttgtggagtgggcagctaaattgaccactgagcatagaggtctggtgcgtttgggagatggtggagttaggagtagaggggtggagagtgttgaggatgaaccggaggtgggtattgaacgagtagatgaagagatcgaagtgcaggaaccaacggctgtgaagttggccagtcttggtggaggtgtgagtggtatgcctgaattgataagtgagttcagggaccaggaagataggacagggacgagtaaagatcaagtttgcaataaagatgaagagatcgaagtgcaggaaccaacggctgtgaagttggcaagtcctggtggaggattgagtgtgagtggtatgcctgaattgacaagtgaattcagggaccaggaagataggacgggaacgagtaaagatcaagtttgcaataaagatacggatgttgatgttaccttgcctgattctggacctgccacctttgttaaaggtcctcaactctcagattttatgcagaaaatgttgcttcttgatatcaattggcatgtttttctttttttagtcttttggggcttgagatttgtttgtccaaatgtagttttttgttttgaaaatgtttatggttacagaaattcagagtgaaaaggtggtgaccagaaacaagcaagttgctattaacaaacggcacagaggacgagttaggattgctgaagatgagaattttgaaacaaacgaatgtgaaaaccgaaattccatctcaacccctgaagtcgatagagtacgagaagcacttaagtccagtacttcggagctacaagcagtcgtgacagatccacttcctgaggcatcacgagtggctgaagctgtagcaactgatttggcaacaaagaatgtgagccatgagaatcccttagaaagccagaaaggaacagaagcagatgcaacaaccaatccatgtattgagaaaaacaccaactctaacgatcccactcctggtaacccatctaccagtcatcagaacaacaatcctcagcccagtttgatggctcgcaatagtactgcccacacatacgaggtacttatgtttcattcaacttgggacttagtgcagggagtacttgacataaatagttgggatatgaggaatgcaaggttactaaacataacagatgatgtcaatagctgtcttggggagttggtttagggaatttctattaagtttgtcatcttacaatatattaccttatctccatttttcacttggttgttctttattaggacacaatattatagactattctcctaaaatcgtgtatcttgtttttgtagtgggacgattcgattgattcaattgatgactctgatcctcgggcaaatgcgggcagacttaacccaactaggtcaaagagaaaggctgtatctctactaaagaaggatgaatctacaaaatttacaaagagaagaaaagttaagaggtggtcacttttggaggaagacgctttaagggatggtgtgaaaaagtaagtcagtcttttatacaactttgcaaatgaattagtgttatatattgatacactattgttccaatccaatcttgaaagaattagaacacaggcatttcattgatatcaaagagaaaattacaaagttccaaacttttcgagacagtttggt

SEQ ID NO: 162804 - DNA, 1327 bp, Cannabis sativa
  modified_base (1287)..(1291): a, c, t, g, unknown or other
attaattacaacaagtaaaaccattctctatcattttgtttaatttttttttggcatcacaagaattattatccactttgtttgctgcattacttcagtaatcatcagccttgtgtcattccaaatttgctcatttctagccttccacaccatgtaaacaagagcagcaatccttgctgcgtacacacattttttaaacttggaaattttggctttcctcacccatttcatcaggctctatagtgaagtagcaatactattccacctcagccattccttcaatctgcttaggcattttgcagtaaaacaacaactaaaaaaaaaaggtgttctactgattctgtagtagtattgcagaaagtccaagcatcttgatcaatcagtccatgtttgaacaatctatctcgagttttgagtctatttaacatagctaaccaaagtaggaagctatgctttggtaagttcaatctagaccaaacttcattgctccaagaaaccttcgcccgatcctgttcaaaccaactatttccatctgcaattttataatatgtggcggcaaaggcatcatgctgcacaatgagcctaattttgtctttaagctcctccatcttcctctaataccaacttccattcataggagttttatactcccaccatgtttgttgtttagtataaacattgtgcacccacttcacccacaaattatccttctttttttcaatttcccatgcatgcttgaccatggcagcagagttccaatttggaatatacatcagacctaatccccttgatttccttggatagcaaagcttttcccaagctacagatcctgccccacacattatgcttataccaatccacaaaaaatttctgcaaatggcttcaagctctttgataatctgcttgggaaggaacattatttgacaccagtaaatataaattgatagcaagaccgatttaattagaaccaacctaccagcaaaggttaaattccttgtgttccatatcctaattctagaagtcatcttctgcactaatctactgcaatcagctacataatcccaaatacttgaaagggtcatgctgccttgtgaagcctgacatatctaatacccttctaacttcatgctcactcattccactacagtatactgctaggcatggcaaaaaagatccattcattcggatcgggtcagtgatccgatccgacggatcaatactgatccgaaacattcgaattgttattggatcttggattagatccgacccgccccgcttaattttttnnnnnatcggatctgacccgatccgttttaaatatatatat

SEQ ID NO: 162805 - DNA, 2140 bp, Cannabis sativa
ctattcccttttcaaaaaaaaaatcatggtgtttagggagggacttcaatgtggtaagaagagatgaagaaaaactgaatagttcttcttgtactagaagtatgagaagtatgagaatgtttgataacttagttcgcgggttgaggcttatggatccaaaacttaacaacagaaggttcacttggtcgaatttcagatcggttcccatttgcagcagattggatcgtttccttttcagtaacatatggaatatcatgtttccctttgtcagacaagaaatgttgatgagattggtttccgatcacagtccaataatccttgattccaaagctcccaaatgggcctggctccttttcagttttataatcaatggctggatcacaattcaaatgataaaaagtgctttggagagaaggttggtggatttggatagaatggaaggaaacgttggctggaatcacgctttagtggaggaaagaagccaaataaaaaagaaatggcagaatttaacttttgcggaagagagtagtgcatggctgaaagccaaatgtatgtgggctaaagaggatgacagtaacacgagattttttcataacatgctaaatgcgagaaagacaagaaatactatttcaataattgaagggaggacagaacgttcatccaaaagaagaagatatggctgaagtgatcatctcgttttttaaaaaattatacacttttgagaagagaaaagggagcagtattgaaggaattgggtggcaaaaaattttggaattttgggtggaacaattaggaaggccttttgaagaagaagttaaaagcacgatctttagttgtgaagacaataaggctccaggtcttgatgactttagtatggccgtttttcaagctaactgggaggttataaaagaggacctaacagaagtttttaaatctttcgagaaaggtggaactattcaaggaatcatctgttttattctaaaaaagttaaacagttgtaaagttagtgatttcagaccaatcagcttgataacgagtgtgtacaagatcattgctaaggtgctcgccaatagactcaagggggtaatggaagacactatcctggaaactcagtcgacctttgtagaagggagtcaaattctggactctgtgttgattgctaatgaaattgttgaagattatagaaataaaaggaaagaaaggtttgatttttaaaatcgattttgagaaagcatatgatcaggtggaatgagattttgtggacccgttgatgaaaaaaaaaagatgttttggagtaaaatggagaaagtgtattagaggatgtatttcctctacatcattttctattttcattattggtaagccaatgggaaagtttaacgggtctcggggactaagacaaggggacccattatctcatttctattcatgttggtggcagatgtactaggaagaatggtgaataaagaaattgaatccgagtgtatctcttgctttttagtgggaaaagacaagattcaagtcagccacttacagtttgcgaacaatactctcctctttgttgatggcgaaatctcgctccaaagattggtaaaattagttgatggcttttgtgcgatgtctggactaaaggttaacatgagtaaaagccaactgctgggcttatgtatggttgaacaagtggttgctaaccttgctgccagaatagggcgtgatatggggaatgtgcctgattaaatttgaattaggtacaaaaggcaaatacaattatattacaatgaagggtgcaaacacaatcacatagttacatatcagacacaacgtaattaacaccattttccaagacactaggagttacaatttgaaagtctaccatccatattacttcttggggaggttaaggccgagcatcggtcagtttggtcggtttttttcaatctaaatattcagattttggtgttttgtctggattggtgcaatccaaaaaccgaccgactatgtaaaaacctcttttgaaccgaccaatgtgagccagagtttggtcggttaagactagggctgtacaaaaaaatttgtaaaccgcccaaaccgaataacccgcccaaaccgaaccgaaaaaaccgataaaaattacaaaccg

SEQ ID NO: 162806 - DNA, 1479 bp, Cannabis sativa
  modified_base (1366)..(1395): a, c, t, g, unknown or other
atctccggaagaccctgtgggggggggggggagatcaacccataatgagttccttatgctagggcccttgatcatgatgaagaggtctgggaagtaagtcagctatcgacacaaagacctcatctcatggactaacctataatgttcactgaagaagatgcttggacagtgcattttccacatcatgacccactggtgattgagactcccattgccaacaagatacttgctcaaatattggtagacaatgggagtttggtgaacatattgttcaaagaagtgttccttgccataggcctcacagactaagatttgtccctgagtggtcctcaactcacaagattcaataaaaattcccacatacccatgggaaaaatatggctcccaatgattttatgccctgacacagagcacattcaaatattgtacattcgttgtggtggactgcccaacaacttataatgctataatgggatgtccgggtttggtagattttggagccataacctcgatctggcatttatgcctcaagttcccacccatgtcgcaggagtgggaactattcagagaaaccaatgagaggctaggaaagaaattgtcttgatggttcaactgaacaaggaaagaaacttgatgtgaatggaagatgagttagatccctagaggggctaagactgtgctggaacccgtggaggagatagaataaattcaaatttgtgaactagatccaaccaaggtaatttgtgttgggaaggatattgatcccaacaaaaggagtgaaatagtgaacaccatcaaagcaggttgtcatagggacatgattgacataagcccaaatgccatctaccatgtgttaaatgttaacaagaacatgccaactatctagcagaagagatgtccccttgaccctgtaaaattagaagcattaaaatattgttaaatatattcatcaattatgtctactacctagagtggttggctaacctagtcctattaccaaaacccaatgtgacatagcgagtatgcattgacttcacgaacttgaacaaggcatatcccaaagattacttccccttgcctcgaattgatcaaatggcagatgccacgtccggttatgagctgttatctttcatggatgcttactctagttgcaaccagattaagatgcatgtagctgaccaagagtgtattaggttctggatagacaaaggagtataatgttgttgggaatattttaccaggatatagatttacttacaagtatgttgattaacatcctaaatataaattctctaaaaccatgaaataaacacataagggttgaagaaaagcttacattgtttgtagcagaatataatgactcctnnnnnnnnnnnnnnnnnnnnnnnnnnnnnnttctgtagcagagcattatcaagtctgaacctggatttctttctctccttcgggtttggttaccaccgtcttactcactatgat

SEQ ID NO: 162807 - DNA, 539 bp, Cannabis sativa
atcccattatccttagggttaggagggggtcttgaggaaaacttttgtaatatatcattgtctgataaggtacaagaataaccttgattatgtatttgatgcaccctaggagaaactgaccgagttttcctttccctgagattacttcttgatggtagagaaccagctggcagaggtttgtttttatccctcgggcaagaaggcaatttttccacaattttcaaatttttaccaaacttggctcctggagagttttcgttgaccctgataactttccttaatggtttgctagcctggaccggttgcagggtaggttcactgtcgatgtcgatgaccggttgctttcctttgtccttggtttttgcactattttgtggtggtctcctcaccgacattgtagtccggcttccctcttctctgtaatactgaagttggtttctagtgttaaaacagctaaacactgttgattctgccttcatccaagggccataagctggtaccgtgttaggttatttttagtattaattttagattaagtt

SEQ ID NO: 162808 - DNA, 3746 bp, Cannabis sativa
taaagaaagaaaaagtgaataagtgaaaagaaaagtaaatcctatttagccaattttagtatacttatgtttaatattttaatttggatatataatatgcataaaaaattaaatttctcaaaattattttgaaaactaaaatagatagagatgtatgaatctgtcactgtgtattataaaattttccaaaaactccgcagagtgctctattaacgcgtataagagaaaaaagaaaagaggaagaggaaggaaaccctaatctttagtcctgcttgtcccagcccagcctctctctctcgtacgagtctcttcagacgctgcgtcaaagccgcatttctccctctctcttggcgattatttactcagacgacggtgagacctcagacctattttttggttctctcgtactcattccaagtattttctgttgatgcatcttagattcctcatgtggggcttttctttgtagttggttgctttgatttgtagatatgtgaatgtcataaacttatgtagtagatttcttgattcattgagatttcatattcggaagaacaagataaaaccaagatagatgctttacttatggtttaagtattttatacttactaattagaaaaaccttcttccagaaagggagagatggttctgccagaagatgaaattacaaggcttttcagggttagaaaaacggtgatgcaaatgcttaaggatcgtaattatttagttggagattttgagattaacatgaccagagaacaattcagaaacaagtatggtgagagcatgaaaagggaagaccttacgatcagtaaagctaagagaaacgatagttctgatcaggtagttttccttattttcttacggtttttaaaatattcattggttgactctgcgtttaagtgttgctatatagcagactgttacaagtagcatgacctgaattttatgatactaaatcaatctgtgttcttatgtaccagatttatgtgtttttcccagaggaacctaaggtgggtgtcaaggcaatgaagagttacaccaaccggatgaagtcagaaaatgttgtcagagcaatgctagttgttcagcagaatttgaccccttttgctcgcacttgtataagcgagatatcttccaagttccacttggaggtttttcaggtcaatgttgttattatatgaagtttgtgatctcaattttagtaacctgcctaaatttcttgtattttaagcttttttttttttttttcttcttttaatagaacgaattgtactatagttttagactagggttgggagatcatatcgtgtaatccatacactaggctgtttatatagttagtgtagtttgactaacctcgtcaataagttttatttaactaggttattttttgccctttgaaataattttattttagatgcgtttaagtatcaaattgttttgcaagttggatctatattttgctataaaggtttgatagaacgcctatgatatttgatatggaactatttgtgttctctatctaacatgactctatcttggtttttttaaccctttcatgcaggaagctgaattgttaatcaatatcaaagaacatgttcttgttcctgagcatcaggtcctcacaaatgaggaaaagaagacattattggagcggtatactgtgaaagaaacccaggtttgtacattgtattatttttcaagtatattcctagacattaattttgtctgctagctagatatatggtgctgacatacggttgatcactatcctgcgtttttcaagatgtgttgctgaatataaaaacttaagaaatgttgtctctactagttgcattgtgtagttgctcttgtcacgatagttttggttacatttctcgtcgtcatgcatttattagttagaaggtttcattggatatccttatcttatcttgttttccccttgctcactgtttttcatgggttgtttgttcagcttccccgtattcaagtgactgatccagtggctagatattatggactgaagcgtggtcaagttgtgaagataatccgtccgagtgagacagcagggcgatatatcacctatcgatacgtagtgtagtattcagtgcaatgtcatatccaaagggtagaaaaactatgtgatagaaaaactgaaaggtttattggcatttttcccattatatattagaatgtatatctttttttttattttactatgactaatttgcggtataaatacttaagttttatgtcaggtagtagataagtacgcaagtcatatttttggcaataaaaatacctttcgttactagtgtagaactgggaatttactatgggttgatgcatttagattttgaggtatatctagatctgggaattttgagtggaactttgtttgttgggtagatctaaattagattgaatctatatgtatttgtagacgaataggttcgaattaaaggagtagggacaggatgttaatttttgtgcaaggtttttgtgtggctttccttatatacgtttgattgatgttgtatttgtaaggttctttttgtcggttgtgggaaatttgagtagagctttgtttgttggattagttagatcaatcttctcttgttgataatgtttttgagtttaagtgggtgagtggtttcgggtgaggaaattttttaagatatttggctgagaaaaatttctgggttggagatgcctctgttaagaaaacaatggataacaccatgatgagggagatgaagatctagatttttattaatattattattattttgtgtatttagatttataattaggtttaattttaatttttatttaatttttaattttaaaatgatttttaaatattttaatgaattttaaataataaaaataataattaaatgatgtggaccaatgtgaggatgacatgtggatacttatatgtaacttaatggagagatattttatggttaaaatttatacttagttatttctctgtaattttgagataaatttaggtatttatgtcgcaaattactattttagtatttatgtcctaccactatatttacaagctatacaacaaatggttacatgtttaatgttatatttatggctatctatttctttgtgtaatcactgtctcgttcctttgtaaaataatggtatttaatattccgatctcttttgaagatcgttttgttatttgctatacactttttggcatacagttggtacacaatttaaatcactttctgcgatgcaatttaattctgagaacatctttggagggcgaatgtttaaccaggagccttgacataagctttgttagtatctttgacttctgtgtttttgttatattcgtctgctgaggcagaaaccatatgaaggaagaaaccatactatatagctaattaaaataaaacaaaataatttatagctaaaaaaaaatttagtttattgtgtgataactaaaataattatcagaaattatttcttatttcttatttgtgttgagggcttttcatctatgatacggaagtttgagcgggatggtaggcttagaggctgcaaagttgctaatggtgctccagttatatctcatatgctttttgcagatgatagttatgtctattgtcgtgcaaataatagagaggcttcgaatatattacatctgcttcaactatttgagattgcttttggttaacaagttaatttcagtaagtcctctgttttcttcagta

SEQ ID NO: 162809 - DNA, 2354 bp, Cannabis sativa
atgtcaaaacagaatgggtattaaagcgtacattgtataatttttttatattaatcatttgaacaatgtttttgctgataaaaaaacttgaaaagatttaaactattaaaaaattaaaaaaagaaaaagagtagagtgagaacggttttgttttttttttcttcaataaatttaagggtaaatagtattttggattttgtgttttataaaagttatccattaaattttttgttttgttaaacgacaatttgaatcatgtattttttaaaattgtagtatattctttgggcacaattttcataaaaataaaatttactaataacttgacctggaggtgctatggttagattggttttatatatattgcatttgtaactgaaactcgattcaagttagttatgttgaaaaaaaaattcacgaaaattgaacttaagatattattttgtaccacattgaaaaatataaagtttgaatttgtcatttaacaaaataaaaaagtaaaattaatatcatataattaatcacatcaaaaacaacatttacttaatgtaaatgcaatatataatttattttatataaaaaaaatacatcatcttttaattataattattaattacatgatattctaaaagttatatttattcaaacaaattataatttataaaatttaacaaatatgtttatcaaccacccttgtctcttttttacacaaactaatttctcatctattgtttttaatctctcaagttcacattattatgaatgttcatattcatgttcctatgtcaatattaaattatataattgcttcgatgttcatttgaaccatttatattgaaatagtgaaatgagaccatgtatattcatattgtaaaataaaagaaaaaatttaatagacaagtggaatattatattgacattaattttgtaagagtgttctatacatcagaaaacaatatataatatttttgtaaaataataaaatatacaaattttgctttatttcctaatatttttaaaagtgttatttatgtgtttcttaagtaaaataaaaattagaaaacagtctaactatgtggtaggtgaatagtttatagttgaagaaaatatcaatccaagtatataaatggcttgatatttaaagagaaattaattttttgttaaaaaaaaaagtgaaaactaaacattgacacgatcaccccataccaaatgtttttcttaagaaaaaaattgaataaaataccccataccaaataattaaaaaaaataacaccctagcttataacattttttaacaaaaaaaaaaaaaaacataccctacactaacaaattattttctttcttttataatggtcaattatgctttattcctttttggtttaaatataaggtgatcagtgcaccatagaaacacccaaaagaaattgaggggatgcacctcttaatatttttttatatagttgttatttttttttatatatataacaatatatattatagttatttaaaatattctataaaatttgtagaaatttaaaataatttataatatagaaaacatgattcaaataattcattttacacatataaaataaaagagacacacatgcaacgtaatatttaaatgtcgataacatgaaggtgtgcatggttacacctcttttagagatgcaccatacaatttagtgcataattgaataattccttctctaaaaaacaaggcatgtcatttattctctgtctttttaagaaatatataaaaataaaaataaagacctatatatttatatatattaatagaagaaaaaaaggtaaaaaataacataagtattctcaaaatttaattttgttttgagtttgtaagctaagcagcataaagtgaataattttttttaatggcataaacacactaaatttcttatattttattaagtataaatttcatttttaatttattaaaagaaaatcgaaagtaactgatactacatgtttttatttaaacagaatattttagaatttaaaccttacatgtgtcttgtttaagatattaatggagtatgtacttaataaactaaattaaaattataattttactaatattaagtacttatgccactaaaaacaccattaaaaatatatagtcactatttaccaaaaaaaaaaaaaaaaaaataatttacaccatacaaaataataagtatatcttaatatttaaaaaagttaagcttaaaatcatttttaacatatttattaatttttttctcaattaattttaatacttattttaaataattatgtataattttttttttatttttttaataaaattccataaaattttttattttaatttt

SEQ ID NO: 162810 - DNA, 1020 bp, Cannabis sativa
taggaaaataaaaaatttgaacgagtaccctccaatccaatgtatagatatatatacacatcaaaattttataacatgacaaggatattttgttttgaaaaatccaaaatagtaataataatataggcaataattaattttgtttttgaaaagaacacacggcgggtgtgttgcatgttttctcaactgaagcacatggtgttttaattgattgtcatcacatgtaggagagggtcatcccatagaggacaattaattcaattcaatcagtgattttagaagagagacacagtgcccccacaacaaaacacaaaacacaaaacaacacaaccctcttttaccattgccccaacttgtttgtcatcaaagtctgtagttttcaatctactttttgtataagcaagtgggacactcacactcacgccctcttctaaggaattataactaatttccggacccctacctacttcatatatgctcatgctcatgctcatgccaaagtgtattattttttcgaatttatattagtttggcttttgtattttgatgaattatttgtttagactttatgtatttttaaaaattcagctatatgtacttttaaaaaaattattttagacctaatgttttctaaaagataatatgattcactacaacccctgaatgagtattattaaaaaaaaatgagtttttatgtttaatttttttatttaattaaaaaaatttctcatttttataatattatatgaactaggattattccatcaactaaaaaaataataataaaaatataaagcaagaaaaaatataataaaaaattatttttttgactgagatatttttatgtaaacatattttttgatatatttttaattaattaaatagctaaatttctaaattttattttattattctctacaaatatttagagatttttacactagatactaaatttggccctttttttacatttttattccagttagcttttttaaacttttttatattttatgtttttca

SEQ ID NO: 162811 - DNA, 1938 bp, Cannabis sativa
actggcttcctcctggttttggcttcgatttttttgtgtgacttcatggatttggaattggttaacaggttggctgaggtgctggttcttgatgagggagatggaccggttcttcctctgaacaaagttggcattgaggaaggaaagaaaaggatggatttgtgtctggtgggcaaggttattggtcccagaccggcgaacagggacggtattgaaaaagcaatgaaaggcgtatggaagatcaaccatcgatttcaggtggaagaactgagttctaagaacgtgtttcgattctttttcggcagtcgggaagatcggcagagggtcttcggaggcggaccgtggacgatcgataagcaactgatctgctttgtgaagccattcggattgggtgaaatatcgaaaatgaattttgagtttacgtcgttttggatttcgatcaacaatgtgccattggcatgtatgaccgaactctttgcgagagaatggggtgaacggattggaaagcttgaagatattaagattgtcaatgggaccatgaaggtgagggtgagaattaacatcactgaacctcttaaacgcggactacgggtggcggtggacgaccaaggtaatgaggtttcacttatctttcaatacgaacatttacccgatttttgttatgattgtggaataattggccataaggcattggattgtcctttgcgggactttgcgggggataatcctcgctttgataatgggagatatgggtcttggatgtgtgctccgggatcgccgattcgtgatcgtcctcggtttcagaataaacgcgagaattctccctcgaatagaccgataatgaccatgggagaagcgtcacgaattgtatctgctgtagagaggagtcgggctcgttattctggtcctaccgctgagcagttggctcctacatctgttttagaagctcgtgaacgtgatgaggagttgctttctcatgctactgccgaaaagaattctgtggtggcacctgagaatcatttggctatggatggtgccgtggtggatgggcagctgggtattgatggtgcgaatgataaaggggtgttgaaatctacttctctttgtagtggtaagagtgatgggggtcctatgcatgataatgataatgtggagattggagtgatgttacccgatagtgataaagggaaggttgtattgggtggtgaatgttcattgggtagagatattgattcatctagtgttgatgtgattatggaagatgagggagtcatgagtgatcaaaggaagcaacaactgattaaagatcgtaaagggaagggtgttatgggtcattcggatcatgatgaaattacattcagccatgcacttcaacatacttttgaacctctcattaaagcgcagaagtcgaaaacatggaaacggcttaattcctcatatggccgtggctctaaagggatgtctaaggtgccggccatgcccattagtcctaaattatcccatatcctagttgctaatgctacatttaaaactagcccgaaggttgggggtggtgggaagcgaaaaatggagaaggaagttgagcgggatagtgtgaaaaaaggaagattggaggagcagtgtgtcgtgcctcccgcatgtgagaatactttattggcgaagcctgtggagcaggctcgccaagagccatgagtttactatgttggaacgcccggggactggggaaccctggtgcgttgacggccttgcgaacaattgttcgtaagttctccccaagtttagtgttcttgtctgaaactaaactttatggtggttgggcggaaggtgtacgacgacatgtgaattttccaaatagttttcatgttgattgtgtgggggaaagtggtggcttgttattaatgtggaatgacgattgggaggtgtcggttaagtcttttt

SEQ ID NO: 162812 - DNA, 1204 bp, Cannabis sativa
tgttcacacgggaaatccaggaaatattacaaaaactaccaagatcacacaattcataaattttgtcataaccacataattcataaattttgtaccccgaattggaccccgaattcaattcgagtcaaaatacttaattataattgtactgtgccaacttatcaaaattcacatgtaatacaaaaaaacgaacatactatataataatatatccattaatacaatatataccaaaattgaaattttattcttcttatgtcaaaattataaaaatacctctaactcataaatataatcttaaattcaaatattttgaaatgatatcacataatttaattatattataatataaatctatcttaatatttaattaaggtaattaagtttgctaatttatttttaaaatcgaggatattgcatatctgttcagtttaatcccataattaaaaataatgtgattttacttaaattattataatttcttctttcatttaagtatgtattaaattccattcaaaaaaaaaagtatgtattaatttttttttttgaaagcaaagtatgtattaaattaaacgtcctacatttctatttaagagcttgtccaaattttgtacatttatatatgctataaatatttgcgataagtcataatgttatcaacatataatatgtatcatctaacctttttaattctgtattagttggtttctagttgtatcatgtacaaaatcttgaatgtagtagagagtgtaataacaccggccagttcttttttttttttttgggttgattattgttggaatttacagaacgaatcaattaatttaacttccactaattagtaaacaaaatagacattagaatttctattaaaatatacttcaaattaaataaattatattttaattaagagattgtaactaaataaaagtatattaaaaaaaatttaaataataaaaaaaataacaataaaataatattgtattataatagaaatatttttgagtagtgatcaaaattgcttagtgttggaacttaaagtatggacatggtgcaattgattagttagcttgtaagcataaaatgggactagtttttctaaaaatgcttaatttcttagaagttacactagaaatttgttacgaaaatttattaattactacgcaagtgcacacaatcaagtagtatactcacgcaagtgagg

SEQ ID NO: 162813 - DNA, 2000 bp, Cannabis sativa
gagagagagagagagagatctaaatatgtttaaacaaaatgagttttttttttgggtttgatatatttaaaatattgtatcccccggtggtttaaactgttgggtatactacattgtgaaatgagagagattggcgtgagaatgaggattttattgtagaagggggtatcttgacggtttaaaatcgttgggtataccttagctgacggttttaaactgtcgactaaggtatacccgacgattttacacggtcgaatacccttttttaaaaattttaacatataattttgtgactataataaaccatcgggaatactccactatagctaattattttaaatagtcacatatctttattagcaacttttctaaaaaaaaactaatttgaaaactgtcaagaataagcctttttgtagtagtgacaatatctttgatgaaatagaatttgatgtcaataattttatatgtttcatggaacataagatttttgacttaactataaagtactttggttgtcacaatacacaactatgacattagaattgaatcctagttccttggtcaatccattaattcatattgcctctataatggattttgtatcagcaacatactcaatttctattgaggacaatgctacaaatttttgatgcagcctccttgagctttgaaaacataccatgtagttactgttctattaatttcagaatatcaattacaaggttagattttccaatcccctttctaatggaggggtttctatttatagtggctctaattgttatagtatacaagtagtcacaaaagtaaaattacaccatgatttgtacctacaaaattagcattggatagtggaggtagtggtggtcgggtgtcaaattgtactaacacttatgaattttgtctccactactctttgtacatccactacttgcccaaactttttagaggtaggcccatccacctggtccctaatcatacgctgtacacagtacctttgtaccatcgagctagccacaaactagtgtgtataggttcttctaaataatttgctgttcgagtattgtgagacctatacttactaatgtcattaagtaatttggtcatggtatgttctcatcaagcacctctcttactccatttaaatgtctggagtagataaagtaaggtctttcctccatgacttagtgaagaaaggaaaaggataactacggggcctgtatacagaacaatatagtcacatcttagtaccttaacattgtagatataagaataaacaaaataagcaaggtggtcgagactttttgggcacatacccgtgtgagggggcgccctcgctcacctcgggccacaaatgcgagggggtggcttcgatcaatctatgtcatgcacgtgaaggggtatcctcgctcctcttgggcccacgcacgagagggggtaccgtcgctcttctcagaccaacacacacgaaggggtaccctcactcttctcaaaccaatgcacatgaaggtacccctcactcctagaacagaacattttgacctggtttgacccgaattcgaccaatccgcccggacccgacccgctcaacccaaaattttttaaaaaacccgttctgttcaggcgggtcgggttaaacccggtgcaccatcgggcaagttcatgggttggttttttatagttaccgagtttcgggttgaacccaaacccacccaccaacccggtcacttttttttattacatatataatatattaaaaattaaaaaaaaattaattattttttttttattacatagataatatattaaaaataacaatatataatatattatatatagtttggagtttaacttttgtattttagatttaaagttaatgtattttttattttattttaatctaactaatatagcttatgacgttactataagaatattttttatttaaggaaatatatttctatttaaagaaataaatttctatttaaggaaataaataa

SEQ ID NO: 162814 - DNA, 2366 bp, Cannabis sativa
  modified_base (2293)..(2300): a, c, t, g, unknown or other
taaaataaattccaacacaaaagagctctgataccaagtaaaaaaagtgcccttttatagaaaaggaaaaactcggcttaattatgcttaggtactgtattggctttcaatagcaaaatgtgaagcaatacaattacaatgatgatcacttgtcacttgcattcacgcacgccaggaccataagcaaaggaaaaccaataacagaatttgtccatatacattaaggaccacattaagctaaagcaaactttaactaacacattacaaagataattaagtgaatgattagtgagcaaattcttaacatacctcttgcacgtaataataatttatatgctgaaatagtcataacttaagattgaaaacataaaccataaaattgaaaatagtttagataaatttattatatgtcataacctaaaataaaactaactatacaaggtttggcgcataatatatattatttgctagtgtgactggtcactccacaacccacaaacgtaactgaattcgaaggctaaggatcattcattctcactctcttatgatgtatctatattttctttagtggtgttgggttggaggtaatgcaatagaatgaaatggaaagaaaacaattttcgttccattcctttgtttggttgcatattaaaataatataatgtcattctaattgaacggcctttctacaattttggtagaatgagtattctattttaaaatagaaggacagactattccaatatatgagaaaaattttaataatatttttatcaattttttttatgcattgtaaatttgattccattccattcttataatttttattctcattctcatttctcctcctatattttcaatccttcaaaccaaatttggttgccttagtgtaagtaatatcaatgcccaccaactcataacatttatggtaaaaaccaaactgcccacttatagcattttgctttaaacatatatattggttttggctatggtgatgcaagtaggcaaaaagttctgtaaacgataaaattattgagcagaattagacattttctgacaaagcaaggttggatggaataataatttgatctttgtaactcaattaacattagtagacagattgtgattgtatgatacacacacatatatatatatatttatatatgtatatatttatatgctttgctcgatcaaatgcttggggttcgttcttttatacatggcaccagaaaatgtcgattcgtaataaaaatatatatatatataagaatatatttttttggagttaatcgggtacaaatcatcatgtttttcaagctaaaaagtggcttggaagagaacaaaaacatagctcgattgattcgatcgctgactgaattgaatagtagaacagcaagaagtgtatttatatgtattgaatattagactacgtactatatataatactatttgatgataaatttataattaaaggttaaagtactatgtatatttatatatttataatttatatttgagtgggtttaaattttttttttttttttttttgatgaataagataagtgggtttaaattaagataatgatcatgtgtttaattagcttgcttacctgtaaatctgatcctaacagggacaaatgacagtaaagcttgtctttgaaatgtctaccactatgtatatttatctacctgctacttaatttacttttgacattttttattattaatttgtaaattaatctcggtaaaatataatttaattaattaacttgggtacgtacaattcatgattctttattctggtaaaacaaaattatttttcaactcaatcatgcccttaataattatttacctagctatttaattgattaactattgaccttttttctgctcttctctaattgaaattaagaaagtttaagaagtaggtctagcattatattatattagttttggaactacttagattgaaaataatgttgataagtcatttatatagttcaataaaatcacaacatagaaataagaggttattagatcaaatgtgttttattcttcaataagtttaaaacataaggactcaagtaagtgtgacctcaaacatcgggaagatgtagatacaacttccagtgtcaaaattgaagcaggaaataaattaagtttgctgagtttttggaagaacggtgagaagaaaagcaaaggctttgcttattttcaactccacaatgttttatatatagaacctctagtgatctagaaataagcaatcttggagcatgtttggtattgtttnnnnnnnnttgttttcaaaaaattatttttaaaaatgagaacaaaaaatagtttttgaagtttttaaaaacaag

SEQ ID NO: 162815 - DNA, 7966 bp, Cannabis sativa
agagagagagagagagagtgctgctaccatacctctaacaatgaacaacaaaacagtagtctgcaagacaaccatctaacaaacaattaacctcaagatacattccaatcttgcctcccaagtaatccaggggagtacacatctcaaattacaagagaatcaaatgataagaaagaaatacttgctctcacacctcaagaatgataccccaaatgctgaaggtaacatgcaggtataaaaccccaacaaaaagaagaaaaaaaatatccagacatttatcaaagtaaaaaaaaaagacaaattatttgtttaactagcaagttacagcatctatggtacaatacgatgacataaactgttcacacattcttctgttttaagttgttttggtataatatgtaaaatatgaaggggctaacaaacaaaaaacaaaacacaaaaaggacacaattaaatgaactgaagaatttgacatatatttctcgtaccaacaattgatgagtaagttagttaataatatgctagcaagatattataaaaacacacaagtttatgacagaaaaagaaaactatgtcttgactctctattgtaatttctccaactagaagtacaaacaagttctttcttactagtaagtaacaactactggagccatcctagagtagtttatagaaacaaattaggcaaccgtacaaggctacgagcatgtaaacataaatatgttcactaacattgttcaaaatgcactatactctatgatcaacagttaatcccactaaacaaaaacaaaagcaaaagcaaaagcaaaaattattagatattcgtgcttacaggtcatgaattgagaataacaacagcaataataaactttcggcaaaaaaagaaaaaaaaaaaggaatctaaaaacagatgctcttgaatgataactgcaacaaaaaaagctcataaacttgaattcaacaaatctcttgggtcattactaggagaaatataagaagacctactcgtgaaagccagaacctagtcatgaaagccagaagctactcaattttacatatttacaaacctaaggtttggtttcaaaaataaaaataatcaccaggaaattttgttaatagaataaacaagaggccacaaaaagtagcaactttaatcgcactttggttattgtttttaaaccccagcccaggataacagaatggcataatactataatgttacaaaattttaacacaatacccaacaacaacaaaaagaaatagtaacaaacaatattcaacaattaagtaagacatatataaacaagctatcacagttatcaaatgcaaacaacttactaatgttttaggcaaggaaggtgtcactggtattaattgccttgattgttttatagccaattcctcgagcctttgtgtcttgacagacaactagaaagccaaataaacaatcaatattataataatagttagattattaatgagtacaatgttttttcaaggaaaaaaactcggaccagctatgaaattgttagataaaggcatatatgactatctcaattacctgtggtgcagcacgagttcgagatggagcctgtgccaaagcttcagccatattaagaccggccattgcagttggagcaccagaccctgaagtaactgctgcaacagattgttgcacggtaaaagatcctgagccactgcttccgttctttggtggcgcctctataagagctgaggtccatccctctccaccaaccaaagaagaattagcaacaggcaaactctgaacagctgtagtaaaaccaggagaggaaactcttccaatatcagggagaccttgcctttcttcagttcctagtgagggaaagtccttttcaaagacagccttttggatgctagaaccaagacccccagaaagtgtgccattgccattgctatggttactattactagagattttcaagtcagtagaaacccttcgagacaattgctcacctggtttccttgaaaccaaagactgagaacgccgaagtgtgtccttctcaaccctgttaaaaatatttcctaaggggtcagaggaatcccgatcccaatggtctccaaacctatctttttctttttcacggtctttatcacggtgacttctgttaaaactactataggcatgcttagcagagccattacttgaactccttcgcgagttagatgaggaagaccggtcaagaaaagaggaacgagtttcaagttcacttaagatcttagaagttctacttcttgcatgaggagccaaagaagaaacatctacataacaaatgtaagagaaaacaaaattaatcatacattaccacaatcaccaataaaccacaaagtattagatgtaacatggactctgaagaagaaaaaagagtgtaccagagtgagaagaagacgcaaagtggtgggctgaattgccacccccagtaacacttccggtatttctcaaccattgtggagctaacgcgggttcacttctttccataaggagcactgaacatgatcagatactacaacagaaacgctctcgccaatttcacaacctcaaccctttcccaaattggtatgattcgacaaacaataactgaattatgacttcaacctttgcttcacagtacaaagccaactagcaacacactcattcaattgcacacaaattaactaatacgggatacttacggtttatttatctcaggcaaaacaatcaatgaacaaccaatgttcccacagttgctaacccggaaaccaaaacacgttatccttcaaacaaagtaaccctcaactccaagcaccaccaaggtttttcctatccctatgtgagccaacttgtattgcaatcacttcaaattaatcaaataatacattggatggtacttctcagtaacaagtgttcttcctccacatacatgcacttgacgaccaaatacaaatttcacgatgtatttacccagaagatgagaataaaggcaatggaagaacaagatacaatagaggcgacaataacagaaagggaaaaaatggagagaaaaggaacccactacacctccatcttcaaagaaagatggatttggggatgataactagcaactcacgacactctcatatatgcccaacataaaaatagaaaaccccagtcagatatgccaagcaaattaggcaaaggactacccaatattctcgaataacaattcactcctagaaactggtttaatcaaattaaaaccctaagcatccagagaaatcagagagtgaagtccaaatttatattaaaaaataagagaagaaaaataatccactaatatggaaaccctagaacccaaacatgcgcctctattcacttccagaggacatagggtttgagcaacgaaaacaaaaacaccgccaaagacttacaacacaagtaaattgactcaatagggaaaaagaggcggagaactaaccctacctggttcgattaacgattatggcgaagaaacgaaatcgtcccgataatctctgtgccctgaatcgaaaccaatgcgtttgcggttaaactttcgaaaaggaaaataaaaatgtttgggatagccgaaacgtttgagagaagaatatagaaaaacggcacagagagagagaagggggaaaggaatgagaatgaggtgagagagggaaagggattaggattaagattacagcggttagggttttgtgtatttggagcgacttggagagaaaattaaaagagatttggttttaggataacaaagagaaagggcgtttgtgtattgtgtgtaataaaaatttgtgttagttttggatactgggaaattaaacgtatgaatgaagaacaacaacaccctcttttttcttttcctctttctctagggaaacaaaatccttcaaatactaaccatttagtttttttattttattttttttcttggcttgacttccctaaattaaccctatttgcaccaaggaaattggactcttcttatcgttgaatagaatatagaaatagattttaaatgggttttattatttgttcagaaaaatgaaaagtcaataacaccaactactagtagtagtagtagtaaaactaaaactacttgtgttttatgtaatacttatggtgtgcgtttcttctcaatgaatggctgtgtggtattagccgtagggttgccttttcttgccacgctggcaactacaaaaccaacccctgtctatgtgtcgtttttttagttatctcattcatgtggcatgaaacattacttttatgtaagtgaccaaaattatcaatgggatataaaagtaattttaccttttttttttttggataaaactaataaaatgatgtggcgggaataacacgcattgttttattaaaaggaatagcttgaacagcagattaaagcttggataacaaagaggagcagaacggaaaaggaaaaacatgaagaaatgagaagagtgagttcgcgcgaaacagtcagaactaaggaggggcagttctaaataggggactcaccgtcctacttagaggaacgtcacgtgtcatgattataatctactaatcccgttaatcgggatctataaatcaagtgatttgaaataaataataaacttaattaaataaataacttgcaataaacacacatgttttactttaaactaaaataatttaaggttgcataactaggatcccgttaaatttattttcaaaatattacaagttattttgtataggtcgaactaagcggcaaaatagaatttctatacaattccctattggacccaaccctcatggtctagcttggtcgaaacatgtacaattcatcctcatagccctcaatctcatggctgactcgacactactttacgattgtttgcataatagagcacccgtgagccaaggcccatagaaaataatacagtatgaacaattataataattatacttcatacagtacatcactgcgtatatactgtcccaccacactatatatcacattatttcataaataataatgtctctttacatttgaggtcaatgtaatgtgacatagacctacgtgttacgctcaatgtctctttacatttgaggccttactagggtttatctcggttataattaccgactctaacctagttataccttacctgcataattctactcagatattcaattaataaattattgcataataataataataataataataatacacacttagaacaataaccctaggtcacgatttcacaataacagtcgaatattatataactgtgccactgcgctatattttatttgcttagtttgctgtcttactagattttcaatgaatgtagaaaaatcttgattcactcgtgattttaaccaagcaccggtattcctagtcataatttgtaggttttataaactagggttaatacccaaaaaattacattcataaatatccacacataagactctaacactggaccatataataaagctcaaaacgagctttctaacgatataaagaatgtccaaatcgaagtatggggtcaaaagttatgcactaaacaaaatcacaaaaattgtactattgtcgccatgtggtcgcgaccaattatcattacaaccaattcaaggctggtcgcgactaaggcctggcaaggggctaactcctgttctggtcttgagcctagtccgaccatctgaagtctgatcgcgaccactatgttcaaaacctagaaaatgcccaaaaacctgattttgcctaatccaaacttaggccatcacaaccccaaacttaccaatacttaagcaataaatttctacaccaaaccaaagtatttttgggcatctcaagcaataaaatacatgctcaaacactttaaaccaacaagattcaaatactctaaatcatacaagcttaagaacacaaaactaaaattcctcatgctcaactcttcaaactaccacaataacaacatacatagaaatgacctgaaattccactcccatgctcaaaagtactcaactcataacataaacacaattaataataattccaagttcaaattcaaaattacaaggcataatgttaacccaaaaactttctttggtgacgtggacatcaatgtttgacacgtggcatgaaggatgatgtcacggaattgagtatacctgagtcatagtagtcaacctagacgggaccctcgccctgcgcctaagttgactctgagatctccaggatggaattttgaacttcaataacttgaatccaacccactatatttcagtattctgtaccatgaagacatggagcaacctaatccaaggtccaagagctgaaattacacgaatctgtaacacgaaagccaacctaggcacctagggtttccacccagtgcccaagttgagattcctcaactagggttttagttttcgagaccatcttagtgcaaaatggccaaaacttgcattgcgacatcaactagacatactacggacatatttgaggcatcagaatcagattcagagcaagttgatttttgagcacccggggccccgagcacccagcgcccaagttgacaatctatcaatctaggcaccttccaagtgtccaattgaagatttgactcttacattgaatcagtatttatcaaaatgggaaaataggtccttttagaggaaaaacaacaattcttgggcataaataacagggcctagcccccaggttgacaatttgccaacctaggccacaaaaaatggagtttttcaagaattctttcgagcatcatctctatctttagaaaatattgagattaaactatttttggggaccaaacagaacttttgagggggaaaattgggtcccagcgcccaagttgacaagtggggctcggcccaacatccaaattgacattttgtcaacttgggttgtttccaattcagcttagcaaaaagtgcaatgtcactagatataacaaagattcaagtaaactcagggagaaaaccacaaacctgagtccctagaaatagggcccatggcccaggttgacaatcaacttgggatgctacctttaattgctcaaatgccaaatccgatgcgaccattgaatctagcatggtcaaaaacgggggatgggaccccgtccttaagttcaaaagccttagaagtatcaaaaatagaatcctaaaagctcgatttaaagggcccagtgcctaggtcaacaaatgacctggttcgttgggttctgcttatccgaatctgatgttgtttcaaccgtctatctagtttttcataagcacaatgatccatgaagtcagataaatcaaattcataacttcaatttttcagtaaattgactcacttagaaatcaaaagttttgagtcttccgtttcaacaaaacaacatctccaagaatatgtgaccaacatcaccaaagcatataaattggctaagtgatatcatattatcacttaggcatctcaaaggacaccccttgaaaatttttacacttatacatcatccaagttgacgtgatatgtcatcctgggcactgtgatgtcaacctgagggctagatgtcaacttgggcagttggacttgtacttccttcagtaaaacgaccataactcactcaatttttatccaattgacgtgcttcaacttgcattttgaagctatttaagctctctaagtcatgtctcacatgccagaggtaattttgaaggtatcattgtgaaaattcaccccaagagagttacaaaaattatcttcgagtaacccacagcgggaccccgccgagcactaaaaatttgccctcaccaccagaagctaattttcaccattagatcatcatcaatggtggaaaacaacttatttttatttttctcgtattttaatgggcttccttcacctataaaaggagggctcccttagctcatttttcacattca

SEQ ID NO: 162816 - DNA, 1222 bp, Cannabis sativa
taagagtctccaaaacaggctcagcagacctgcaacctgcacgataggtaccttgccagtaccctggtcggcaggtacctatgcagaagtttgacccgtttcgtcaacctggctggcaagtacctcggcaaaggcttgtccagtttggtcggcagaggcttgatcagtttggccggcagaggcttggtcagtctggctggcagaggcctctattgtgctaccctgtgctggtcgggatgtgaacaaaattgccccacgagcaatcaagtcctcgcaaagaggagtatctatatacctgtattattcctcgagattattgatataacactcataaaatatctctattgataaattccaatacttagctataatgtcctcctgacccttcaaggcagcgtctaactcctcctgtttcaacttgcatgtgttctctgttacatccaactccttccttagcttggcaacctctacggttagatcattcaccttctgtttacgaacaccaagcagctaacccacaccatcataatgtccctgagcttgggacatttgtttcgagaacccgtcaagaacgtatccaataagcatcgagaaaaatacgagcacacagaatacaccaaaaaattaaatctctcaatttcggtaaaaaaatatatcaaaatgaaaccaatacaaacaacaatcatatagatctactgaaaatagactatacttttacaattatttaacaaaatattttaaaaaatatttactcattaatccacaagcttcgaccttcgaactttgtggtgagacatttcaggtctttgacaggctgcaatggaggatgggagacaacggatgagcttccacaaaggacatttggacttcaacgaaggactaaagatgactcttttgggcagatgacaggaagctagagagaactcgacaaacgagggaaggtgcgattgttgggtaatttgatgaaatatatgtagagaaaaatatttttttttttagtttttttaaggttttaaaattggtaaaagttttttttttttttttttttttgaataaagtgagaaattattaaaataaaatagtataaaataattaaggtgtattttttagggttatttgcggcattacctccttaagtggtcaggtatttgcaactaacctcctaaacccagcttctgttagcagttagacctttccgtgcatttttgggtgttaagtgaca

SEQ ID NO: 162817 - DNA, 1840 bp, Cannabis sativa
ttgaaaactgacaagttgtactttaacaacctaaccaataaacacattccaaacaagctaaagaaaaataattactccatgattcattcacctaagctccaaagattataactttacaaagctaaattaaaagatttcaactgggtataccttatttttcttcttcttctgaactaaacaaaaaaaaaaacctagctcatctcattcatcctagccacctccccttgtctctttgtttctgtctctcggtgcaggcggatggccaggcacacggttgaatcccaaccaaggtgatcgaatatgatcatggaatcataattcttgtccctagcgcacacattctctctagcgcctccccctcttcctctttgtttctctctctcgatacaggcgatatatttgatggacttgattctttgaagaacagagggaggtgtaacaagtgaagcatgaagacgatgatgtcgcatcaagttttaggccgtttgggacaatcaggaggtggccttctatttggccaatcgccatcggaggcggctcatcggcgtcgagctgagagtatcaaccacgagagagataaatatatatattttttttatttttattaagatatttaaattaatatactaatttcatataactaaaaattaaattcacaatctaaataaatgtatatatttacattactctaagtaaatatattaaacaaacattctaaaatttctttaattgtttatgagttatccaattaaacctaagaaaatacttatacaattgttctactcatcatcaccgtgaatcaccccgagcaatttttctatccaatgtcactgtagcagtaacaacgcattttttacgttgtatatgttctttgcatcaactgtaaaaagaacatgaaaatatttatttctattagtgtatatgttagtttttttattaatattataaataagataattaataattaaaacttacatcttttgtgtgggctatgtatctggtaggatttgtagctttgtcgatgtcaatggtgtatttcaaaatataaagtccacattcttaattttgaggttgtttttggcaagctacttgtgatattcctagatgcatgtcaaataaattcgctcattcccctgagctttttgtatgtcctattttaaaaagtatattaattatttaacatatataacttagataataaaacgtttcttatataaagagtaactaaattattacccccctcaatatcgcccgtttacaccaaaagtgaccatgatgacgtgggcatcaatgtttgacatgtggcaagaatgatgacatctcagaatttagtagtcatgagttttagcaagtcgacctgagaagggtcgctagccttgcacccagcttgacttcgggaactctagaatggaagtttagacttcaataactcatttctcactatattttagtatgctataccatgaatacatgagcaaccaaacgcaggctagagagctaatattacatgaaccaactcctcaaaagtcaccttgggcacctagggttttacccaatgccgacgttgacatcctaaccagggtttcaatttttgggactgtcttagagcaaatgggtcaaaattttcattgggacatgaactagacaaaccatagacatacttggagaatcataatcaaattcaacgaaagtttatttttgagaactcggagcagttaacagttgatgtggatgaaatttttatgtcttcagaaaaattgagcctcctactctatagtgatagcccaacctatacctctctcttttcttcataaaattttcgaacccttgagtgatagag

SEQ ID NO: 162818 - DNA, 3311 bp, Cannabis sativa
  modified_base (2586)..(2592): a, c, t, g, unknown or other
ttttttttttttttttgtgtggctaacatgggtttcttttggattcgacttaatatttatgaatttgaaatctgggggtttgaatggattctggaaagggttttgaagaaatattaaaacatgagcgatttatggtgtgaatctagtctatttaagcgtcttgctataaaacatagttgcataatattcaaattctgctattgcaagtactagaacttatcttgctctgtaattgtttatgggatctgaggtctgatatctagaagaataacatggcaaaagacaaaaggaagtagtatgtagttatattgactagtagagtttgggctttaagtggatttttgagattcaagatgagaggggattaagaggaatgcttgttgttcttgaatgtgatcgatgaaatgtcaacaaggatttctatatttgactgtgtgtgtcatgatcatgaatctctcaagatttttattatatctagtataatttgtttgtagtgaacatcatcatcatacacatagtttttgtagatgtcctaatagatggatatttctattgtaaaacatacttgtatgtatacctcttaagtctatagctatggttacaggaatccatgtagaagtgcactctaaattagactctcttaattaagtctatagctatgattacaggaatccatggtagaagtgcactctaaattagatgcataagcagtagtgtgtttttgtgatacaatcatataacaatatatgcccatatcatttgatgttctgttttcgcgacctgtttgttaattggtaggtgtagtttctactgtatgtgctgttgttatatgtttgtatttttttttcttcctctcttgcagagcaagcagatcgtcattttatggataagacagcacttggcaaggaggtttctgaggaagtgactcgagagtcgcttatatccatttcttactctctaccagagaaggttcttacttcaaaacgctctgttgacaaggtgaacggtgagagtcttgtagaaagagtagattttgatggagaagataagtgtaggtctgaattgatttcgatttcttacacacagtcaccagatgtcggaggcctacctgacggagtactcaaggattagcctggtagctgtagtattaggtcctcacacttttatgtattttatctaattatgtggtgtataactctaatcagtgtgagtgtgtttaagtctttattttatgatatttaccttgtaaaaaattgacattgcaagtgcttcccactgttgttatgagtgaaaaagctttgttaaaactatgtcatgaaaatgtgttcacagaatttgattaaagctctctctcctatcattccattgtctttgacagaaggctaaaatgactttacttttttttcatgcctttggttctcattcttgaagttgaagtaggtttttcctaaacttaaagttagattcactacagtcatgctctgctaatgattttcttttttgctggagaaaagaagttatgctctgcttgtaaatttgctgtgaggttttatcttttactaaatgagtacaggcattttctttttacttaatttttgtttggtgttggtgcaaaatggttgcttctttgtattcttgtctttaatcccatgtccactgcatctgttttctagggttaataaattagctgattcaattcaattcacaaaatgcgaatatccgcacttgtgcggattggattggaaaattcaaaatttacatttgtgcggattagatgttgattgatatgtaaaagtaaccgatctaatctaatttatacatatttataaaaaatattaaaaaataatatttaaatgtaaagaaaatagtaatttaaaattctaatacatataatacaattatatttcaaaacttattaaatatatattctatttttatatatattttttctacatacaatttaaaataaaattaaacatctatatatctatatatatatatatatatttaaatttgtttagtacccattaatctgcaatgtccattaagaagtgttccgtgtaatcataagttataagatctaactatcatctcatcgcttatatggtcattttcgttttcaaacttttattttattgttttgttctcaattgttaatacggtgatgataatgatttttgaatatagtagtgattataagtgaaatataataatgacatcggttttgaatgtagtagtaataacaagtgagatacggtgaggataacaattttaaaattatgatgaattttttatagatttatcaataatttttttagaacttattttttcatgtatattatacaaaaaaaaaaaaaaatttaaaatctaatatagttttatattaattatcactaaaaataaagacaaccgcacgcaaagcacgagttgttttctagtttctttatacatacaattttttttttctttttttgaatttgttatttgttattttatttattttaatttgttattggaaacataaataactataatttattttatttcattgatagctatgcgaaaaaaatattttttataaatatnnnnnnntttaatattaaaaagtaactaatcgaaaataattgattcaatccgcacttttacggattgaattggattgaatttgggttattgtgtggatttgattggatccaaaaaaataaaatcggcacttagtgcggatcggatacattatgagtaaaatggtgcggattgaattggatgaacatcccactgatttcgagatattcttgtcattaaagaacttcctattgtcaagtgggtagtgagtcaccctaacataaaagttaaatgatccacttgtacatcctattgtcatttaatattaaatgatatacatatatatatatatacccgtacacacatcactcaccaccaaacttatgaacactgcattattattattattattttaacacacaacaatttaatccacaaatggttgtaaatgaataaaattgtttatacaaatccgtacaacagacaaattgttataaatatattgtttacacgaaacatatttaggactaacaagacgacattaattacagaacgtttgagggttatttaaaaaaacataaatatattggcctccctcccatcaagaattgagcttccaacagtcacttgcaggaatggttttgtgtgatgatgttatattattttataatataataagtgtagattaaaatgtagtaatatatattattatgtgaataatatgtattaggtgtttggtaaataaattg

SEQ ID NO: 162819 - DNA, 1348 bp, Cannabis sativa
agttacaagaagaagatattattgttgatcttgatgaggccgctacttcaaaagtgttagatgtagaagaagaagaagaagaagaagccgaggaagaggagaccgcggtggcagaagaggcggattgtttgccggtgagttgctgaacaaggcccatgaactcctccggacgtacatgaattatctttggtgagttgagatacaccaccacgggtggcggcggcggccttggagcacgtgacctcttcgtcgagttctcgtttattattgtcaacctcgaaggtctagggccattcatcatcttctatatacgtactaatttatgattaataacctaatctgtaatctaattatggtaatattaatgttatgttggaggagagacactacttgttatttataggattgaaagtaaagaagggtccatttattaatttggagtagttaggagtataataaattattattatgaatttgaaatggtctaacatggctaataaagaattagtaatatttgatggttatatacacttgtattattatcaccgtgccggcagtccatatatagaaactttataattattggattttttacatatattaaactatttgaaaaaaaatcaattaagtattcgaaaaaaacaaagaagaaaaagtactatcgagcaaaatagtagccaagtcaaaagtcaaagtcatgcatggcaataaattttctcaacgtcttcatcagaataacttgtcaactcatcaacactacaaaacatctgagtttggtctttagcttggaatatctatatcttggattatttcagaaatactaaaaaaattgatgctattatataattttgaatttcttttttgtacttttacggactttttattttgttaaagaccgttgtttacgctttgcggaaatataatataatgttacgacaatatgaaaataaatttgaaacaatataaaactgccaaaatgtaaattaaaaaaagttcatatataaaaatgtaaaaaaattctattttttagtatcggagagaaagggaaaaggtaagactaagttaaaaaattaattaataactaattaagttaatatgtgatgaatgatgatgatgataaagtcatcattgtatatatgttgactgtgtttaattagttgataataattgtttgacttagccaggaacactttaggttttgaattatatcttaaccgtaattaacggctaatggacacttatggaagaacatatatataataacaagtgaagtgactatatctttatacataaataaccagttttgttggtttaacagaatatgctttaaaaataaaaaaaatattat

SEQ ID NO: 162820 - DNA, 3438 bp, Cannabis sativa
  modified_base (3385)..(3390): a, c, t, g, unknown or other
aagacccacacttcgacctcatctcaatcaacttcacctcatttaaactcaatctcccagttctcgacgccgagttaatcctgaccgtccatatcacaaaccctaacatcacacccatccattactcctcaacaaccatgtccatcttctaccaagggtctctcctcggctcggctgatatcgaggccggctcacaatctgctaagtcatgtaagatgcttcggcttccggctcggctcgacgggcttcagctagctcaacacgcttctaagttcttgtctgacgtggcaaaacgtgagatgttgttggatgccagcgtggatattggtggaacggctaaggttttgtggtgggaccatagatttaaggtacacgtggatagtcgggttaccgttgatccggtttttcttgatgttattgatcaggaaaataggtctgagcttgatgtttttgcttaattaattaatggaaaaaaaatgtttgtattaatggaaatgatttgagtgagttaatggaaatttataattaattacaacaattttataatgctttttcttacgtttatgtttatttatttatttattatttttttgagagattatttattatattttagtattatgggatgaaacaaaagaatccaattagtggtgaacaaaagtgagtccaaattaattatttatttttatttgtaaaaatagtttgtaaaataatttttaaataaatagtttatgctgccattttttaattatatttttaccgcaaatatttttaaaaaaataataataaaaaagaactcatcatctatatatatatattgtatgatgaaaatgcaaagaagttccaataaaattagacttcatctttatatttttcacaataatactgggagacttttaattctacttcttcataagtataataatctcttgaaataaatgaaaaaggtaataagacacgtttttaataccttctaattgtacttcttatacaaggttgaatgttctcctcccctcacttctatttatactcctttttcgtacttaggtgtcaacttctcaaggtattcttgaatatttgtctattattatttatgaggtgtcattgagttataagtctaaggtgtgtggatcatcctgtccgatatattgagtcattccgtgtgagatatataagtcatcttgtttgggatatgcgagtcatcccatgatgtgtgagccatctcgtccgagataagagagttatcccgtccgagataagtaagttatcccgtccgagataagtaagtttgaactgaccgaggtaggccatatctcggaacgatcgtgtaagggcggccctgagttgaaatgggctataggcaaaaaaattatttgtccttattataaagataaataatatttttaaaaattataaaaaaaatatatattttttaaaagataattttttaatttgggcccctaaaatgagtgtgccctaggcgcgagcctagcccgcctatgaccagggccgcccttgcaaccgtgataggtcatatctcggaccagtccgagataaaacatttttgaaactgattcatgataagaggagtccaagactgaactgagataggcacctttcgattcgagataatatgtttcttagcacgatttgagatgggaattatgtaagatcgattcaacttagatattacttcgattcgtccaatgggattaccctcttaagtacattctcgtatctcagatcctaatttaaattagtatggaacagtgatattgagtttacacctcaaatttataaaaaaaagttaatataataaaatttttgccaaaaattaaatgtaaaaaaattttgccaacaaataattaaaaaaaaaaataatctaaaagaaaagaaaccattgtgtaggttgttgggcttatcagtaaagcataatccaccaatacccagaaagatctagtatatgggccttaatctctaagtttgggcccacagttgtatactatattgtaaagaatataaccttttttttttaatgaaataaaagtattaaaataccatttaattatggtggaattagttgggttgaattacatgtttatgttgttttgattatgtttaaggactaattagaggtcaatggtttattggatgagaatggccgtacaaatattaatattttaagggaaagattttgtcaccaaaattatataaaaaagaaatatataattactaatatttatttggaaaatttgtggtaagggaatgcattttggctccatccaaaaatttaagattatatttggtaaagaaattcatatacaactaatatatttggaaaattttagtggtgtttctgtggtttagcacatgagaaaattataatctaaattttaatataattatgtttatcacacttatttagaatttattataatcttttatataattttaaataattcactatactaaaaatatacaatcctaattttttatatgacaatgaataatatagttatttaaaatctcgtacaatttttttttaaaaaaatttaaataattcatgtcatcaaaaatataaaacaaaaaacaggttgttttaaagttaattgtatacaatgtgaaataagctatattgaaatttatttttgatattataaattatttaaaattttataaaaataattaaaaaaaatcttcttaaataattataatataatatactaacatatatagaaaaaattataatttatccactgtcatagtatatataaagcaactccctatatctaaagcaataataataatattttgtttttgaaaagaataataattattattatttttattaaattatgtctttatatatactaaaataataataaattattaagctttgacaatgaacaatgattttattattttatactaaagcatgtgcattgaatatttgcaatttgacttaatagtccaatggataccatataagaaaataaataatgaaattttaaatattagtattattatatataattttttgggtgaatcatactttttgttctttttaatttaagaatagaagttgggtatacaattaaaaatgtttttaatttacaagaatataatgtgaaatacaagaaataaactattcttattccaacataattttatcttaatatatatggagaattaatttaaaaatggtaattatagaatattcactttttaaaaaatgcataacataattttcttgaaattatgagaaataaaatattctaattattacaacataatttgatcttaatatgatatataaggcaataaaatgaaatccttgagaactttatacagtagaacctttatttaagaatactctattcaagannnnnntctaatttgttataaaaaaatcaagtcccaatttgggtcagttataaa

SEQ ID NO: 162821 - DNA, 8542 bp, Cannabis sativa
  modified_base (7925)..(7927): a, c, t, g, unknown or other
  modified_base (8133)..(8161): a, c, t, g, unknown or other
gggcacaaaacccaacactaatgaggataggcgtccaaaatttactccatattgtgccagtagctcttgatctataacaatctagtaagtttaaaagtatagcatcatagagaattatatttatttgagcgatccaccgagtagctagtttctgctacctgatcggaccgtacaatcgttctaaaataccccgtaattaggataggcgtgtaagatttactctacattgtgctggtaggtcatgatctataatgatcgagtaagtttgagagtatatcgtcatagagaattacagttatttgagcgatccaccgagtagctagtttttgttacctaatcggaccatacaatcgttctgaaatatcacataattaggataggcatgtaagattttctccacattgtgtcggtaggtcttgatctataacaatcgagtaagtttaaaagtatatcgtcttagagaattacaattatttgagcgatctacctagaagctagtttctgctacctgattggaccgtacgataatttcgaaataccccttaattaggataggcatctaagatttactccatattgtgtcggtaggtcttgatctataacgattgagtaagtttgaaagcataacatcagagagaattacagttatttgagtgaccaccgagtagctagtttatgctacctaatcggaccgtacaatcattccgaaatatcccctaattaggataggcgtgtaagatttactcgacattctgtcggtaggtcttgatctataacgatcgagtaagtttgaaagcatatcctcatagagaattaaagttatctgagtgatccactgagtagctagtttctgctacctgatcaaaccttacaattgttctgaaataccccctaattaggataggcgtgtgagatttactccttattgtgccaatagagaattacaactatatgagcgatccatcgagtaggtagtttctgctacctgattagactgtactatcgtttcgaaataaattctaattagggtaggcgtataagatttactccaacttatgcccgtaggtcttgatctataacgatcgagtaagtttcagagcatattgtcatagagaattaaagttatttgtgcgatccaccgagtagctagtttctgctacctgatcggatcgtacaatcgttccaaaatacccccttattaggataggcgtataagatttgctccacattgtgccgataggtcttgatctataacaatcgagtaagtttgaaagtatatcctcatagagaattatagttatttaagcgatccaccgagtagctagtttctgctacatgatcagaccgtaagattgtttcaaaataccccctaattaggatgggcgtctaagacttactccacattgtgccggtaagtcttgatctgtaacgatcgagtaagtttgaaagcatagcatcatagaggattatagttatttgagcgatccaccgagtagctagtttctgctacctgatctgaccgtacaatcgttcagaaataccccttaattaggataggcgtgtaagatttactccacattgtgccagtaggtcttgatctataacgatcgagtaagtttgaaagcatattatcatagcgaattacagttatttaagcgatcaaccgggtagctagtttccagcataacttaatgtagtgactgtaaattataaaaagaaaaaaaatcataaattaacccaaaaaatatttattaattagtataatgaccgtacgaagcgcgattatactttctagtttaaaaatatatataatgatatttgtagaaataatacaaatttaatgacagtttgaaaatacttttatatatttgtaagagtaatttgcagcgaaaatacttaagcttaactcgcgattgtagataaatacgtattttaattttgttttcatatttttttaaatcatatatctatattattttcttctaagaaaattttatataatttttaattttaatttttttgacataatttttaaaatattaatttatttttgtttgataggttaatttgtaagaatatgtattagaagaaaaaaattaaaaaacttaatgaataatataaattttataaaaaaataaaaattattaaaatagagtgtctttataaatttttgagtgtaaataaaatcaccttaaaatttcattctttttttgttttttttttttaaattctcaaaaaataaattaaaaattcatgtaaactaataaaatattatttattggaggtggaacatctcccaccttttacaccagtgagagtgaatccaagtcctatatataaacaaaatcatgtatttataattaacactatcaaccatacacatatatatatataaataaatatactaattactaaacatttaaagaggcaaaaataaaactaataaaaataaaatgtcaaaccttttaatttctggtaaatttttgttattctttcgccattttcaattcccattaatgttccggctgacgtatctcaaccaatacttaaagcatggacaaaaaataaataattacaaaaaaaaaaaaagaaaagaaaatgataaaaaaaaattgtaaaaaaacattacatgtcaaataaaatggtagtggaatgtcggttgacggtagtgcaatggtggttaacaatggtaaaatggtggtctttttagaagaaaaatggacggaggaggaggagaagaagagaaaggggcaaaacaaaaataaaaaaataaaaatttattttttgagtgaggagagggggatttgtaggaaaacattaccagcaggacccaccagtatttatcaggtcttccccggtaattgtacaacagtcacaattcattattaataccggcagatcccgcctctaataatttgtcggtattaatattttgaaattttaggcagtcaaattcccgcccttgttattaaaggtgggaattccgccggcattaattattttctgccgataataatatttttcatttaataaaattaaaattttattttaaataactattaccggcggatggaatattccgcaagtaataccctagttaatagaggcagaatacctccgccgacactaataatattttttgtagtgagtttgaacactttgtatcccataattagcttgatttctattcttcaacaaatggtacacatggtcaaatgtcctcgttacaagttcaaatgtcctagataaaaccttataacgaggacatatctttgttataaaatccttgttagagactcgtcgatagaataaactttctgctaaggacagattttatattctcggtaaaggctctaatgagaacatgtgttgtcggcaaaagtagtaatgttctcagcaatggtctttcagtttggtccaattgattcattcatatcaagaaaaatgttttaggtagaatctgttaccgagaacatacccaatttatatatattaagtagatattacgtgcaatgattacacgtaacgtaagatttttagtttcatatgataaagatttttatagataaatttttttaaaacaagatttttatagataatttaaatacataaacaatatagtataataattaaaaaaaaaactttttcaatagtaaatgtaaccatacctcaaataataaaaattataaattacgaaaacacatcatttatgcacttttttttataaatatttgtagaatatttgaagtacaagcaaaaaaaaaatatttgttgaatattttataattatttgataacaattataattataaaataccttgaaagcactaaatatgtactaaatcaatactctaacttttcttagaaattgacaaaaaaatttacacgagataattatgttgttttgtgcccatcttatgctgcaaagaaaaagttaattatagacatcttgtgattaagaaaaaatttccaagagttgtatactgcatagtgcaagaataaattttataaattatgcaggacataatggaattgcaccatcaaatcttattataacagctaaaattaaaagcacaattgaaaaataataattattccactcctaaaacagaacatgaaccatttaaaatatttgaacctatactcattacatggaactcaacataatcatggttaaaataaagttcccaaaattatctaaacattatttagcaacaaagaagctaatgtaattaggattatattagaaatataacctcttatctttcatatgtagtagattgttcagatataagatataatatgatcaaagacttttgtagctaagagtattaaccggatgctttgtctgtaatctaactcattgcaatattgacttgacaaatgaaagaaaaataagagttttcttacatattaatcagattaaatttgaatgcagtctgggccctcacatctgctgatcatttggcttttaaggtgaacatcgaagagcccttccaatggttctctcctatgtctataagaagcttgtttggattttaagactctgtagttcagtgattcacaacattgctaggtgggctaatacacaagtcgaatatatcacaaggaaaatctcacatgagcatgtggatcgtggatctttctacacttatcattggaaatgagataccctactatcacaaaagttgggcatgtgaatgtcttttgtaaatagcaatcaaaatcacttacctattatctatgtcattcaaatcattattcacatgtctgaaaaattcaaagaaaaagtaaaaacttctttcatatccgcagttaatgaatgtttaattggggattcgaatcggactgactgattgtacgagcctgcacaaatcaaaattatgagctttcaaaagtaacaaaatccaatatcatctcctccatgagtgttacgtgttggcgtacaatgtcaaaagttgttggagaaatctgaatcgttgagaagaatgggtcctgggtcctttatttgatttaagagggagctcaaaaattttgacatttgaaggagatcttggtaaattgggtcttcatcttgggatttacgttaaagaacttgagaatttgaattttaaaggatgattaaccctaatctttagatttaaaatgagtaccgataaaataggaatgtgttatacccaaaattcggtaagcacatcagaagaggacatgtgtcgagctaggacgaacgaagaactcaaacacgcaatcgtaagtacacttggcatggaacaactcgttagaagcacaatttgaagattatgattataactcggttggctacacagtcttatgcgagacagaaatgtacaaactgctaaattatgtatcaacgagaaaccatgtgagtacaagtgtgcatgacgaggcattaatcttgtcgcgtggaagagatacgataacgataaaaacacttagcatatatgacatgatatacaaactaagtataaatagtgtggagggtcaaggtgatggatagcgaggtgtctatctcactataagatggcacgcacgtgagaaagatcatctcgacaccagaaactatagttatcataaataaaacaatatcaacctcgggaagttatatgacgaactccagctcaccatcaaagttaacttggctccattcccagcgacgcatccccataagatgaggtttaccttatatcttaaatatgccttcatctcggtctaataaaagcgggatactcacagctatgtgaattctaaataaaaaccgtatttacttagcctgatttgtaatcaaatcccatgatttgagggaataattactgtaaagattacattcaacttttgtaatttactacccactctataattataaatagtcagacaagatcaaaaagggggacgaaaaagactcatacaagaaaggccctaaaaaataattagaaatctgaataagattgactcgtggattatgcagaattttaactgcaaaaccacataaaaaaccctgtgttcatatctttatttttacagcttttatcttttctagtgtgcaatcactattgtgaggctcaaatttaattaatgaaaatatgtgttaacagtttggtactttcattgagagcctctgtaaaaaagctcagaaaaagcctcctggcataaaaataatggatgacgctgaagataataatcctcaaggatctattgagtcatcgcatgaacagacaacaagccccgaggaaacctagtattggggtccctagattgatggaccatgggtaaacaaaaaccaatcacttcctaagcaggttcatgatgatggcgcctatgatccaaccaggtactaataataatggaattagaaaatcgtcgtcttacgcgttgattggaggaagcaaactagagaaatgatgaattagagcgtgaaatagccgcagtaaggacaacgtaggagaatagtacccaaaatcaacctgaccttgggagaagagattcacgaggcaaacctcgcaacttgcaaaccaaggggcaggagacaacctagagatatactcaaaactctcaagggatacaacctaaggaaattggggaaaatttggggacacagcctaggatatgtggaacatcagactgaaattgccaatcctctcttcaggttcgtcaaaaagaaactcgcccaaacccttatagggacaacaaagtgaattaaaccttaagatgaagagcaaggtctgaccgcagtcacgacaagagtgacctgcaagagcatctgaacttgaagaagcccgatcttcgtcaaccactcggtccaaaataaaaggattcactaaatttatgaatggacgagttggaaaataagttcagaaagcatcaagtcatgaaacctagaagacaaccggaagcctcaggatcaaagagaaaagacgattccaaaaggctgcccaaggataagaaacacaacaagtatatccctctttatgctgaatataccgagctcaatgaaacttgggaaaatatctacctcgtgcatgtacaggaagtcttttttagcgagccaaaacctatgaaacatgcgaggcgtaaaagggttccaactaaacggtgtaaatatcatggggatattggtcataccacggaagagtgttgtcagctgaaagatgagttagaaggtctcatgtcgcaaggacactttcaacaatatgtaaaggggcagaacgatgtccatgatcagctagatcagctcaataactcgaacgaccatggattacaaccctcctctataggaggaagggacacctcggttatctcgagagggagcgagtcacaagaatacaagtcgcagttaatctggtaaagcaattttgtaaaagaattgcgacgtgagtagatatcggctcactattgttgcatataaggctgccacgtggaaagctggtcgtcagcccataacagtcaaagacaaacaactaaaaccaggattatttctcttggaacctcgggatatgtcagggattgactctggatattgaaacaatggtgggagtatgtaagtgattgaccttgaacatcaaaacccgctttctcaaaaccagatgcttctggaagattgataaaataaacgattgaactggggaagtacttatgagattaatgattgtaaatcacattgctgatgaaatattttgaacttcagttgtgaataaaataatcatttctttcaacaacagtaatttttggtttaaaacctatctgacgagaaagaaaaatcacaagttacgattagtgcataaagttgaatactaacgactcgcgctaagggaaagtattaaacgagagatcaaggtgtcttgaaaaaatactcaaacctaacacgtgggaagaagatctaactactcatgtaagcaatgaaaatatannnaaaatgacaagttcattaaaaatatatttgagttttcttaaaataagatgatttttgacgatcgcgaggtggaatcaatgatggcttccaggttgagggccgagcaaataagttgctcacgcataaagtaggaaattcactacttagcataagaggaaaatgcgaagcaatgtaaacccctaataaactttatgcatgtgattgtnnnnnnnnnnnnnnnnnnnnnnnnnnnnntccacatattaaagtttaaacttaaaagtatgaaaaacaaagttggccatccaactttgcaaatccgcctttacaaaaagtgtcgccaggggcgaaccattgtcttagccaaaagacaatttttaaaaaaggaatgagaaaagggagataaataaataacctagtctacatgctgggagacttggacagattttcttcttcttcttcttcctcaacgtcgccatcttcttcctccatcttggtcttctcgcaaagagctaaagttttctcgtccttctctgttggaatttatttttaccaggatcttagatctactcataggtatgttgtttaacatcctaaatatgaactttctacaacgataattaaacacatataaag

SEQ ID NO: 162822 - DNA, 1357 bp, Cannabis sativa
tatatatatatctcttctatgcataacacacatatcgaccatgtctagggcacgtttccaacatcttaccacaagaaaaattaattataaatatttaaaaataaaaaagaatgaaagatgtagatggatgatatagtggagactgtacaagtgtgtgtttggggggtccaaaatgttgtaattaaattgctttggaaggcaaagcatgcacccaaaagttgggccttacttttgaaagatgagaggccacatatatatagcccttaaaaaagttatctttatcaatggggttttgaatttttggctcatcttttggtttgttgattgtgtcgaaattaggattgttgttttctcttcttactttttccatatatgttgttgctgttgcttgagcccttttctttcttccatttaactctatagagttttcatcatacttgtgtttatgaatatggagtaattgctgcatgaaaccattttataatgttatttcggaccaattagtgcatataatttttaagaagtcttggtaactttttacaaagtagaaaacaatatttgagttttgcttttggttgaaaattttggtgtaacttaaatgtaagtgtgtttatcaaaaaaaaaaaaaaacttactcaagatcgaaaacatgcaactcgagtaaaattcttctagttttatatattaacctattataggtaggaaggagagaaagtttaagagataaaaaattaatttatgaatgatagagatgatagtagtgattgttctttatattatttggtacatgaagtgaagttgataggattgaggaaaaatgaattgtttaaattgccatactattatttaaaacattaaatctatttcttaagagaataattttatcatttaatacatttgttttctatttttcttgaattattaaagagggattggatttcatagcccctttctctctttctttcccaacaacttgtattttctctctattcaaccatgtggattaaaacattcaataacataaataaaatttttgctcacacttatataattttgctctctaattttattttatttaatattaatattattatcattttgtaaaaaatgctcctcaatccaactttggaaataattataaatttattcctttagtagaatttagcttattttctcaagacaatttattaatatggccataaaccacatgtataattacattacaagtaacttgttactatgattctaaaatgaacaaaacaaaatggcaatcaccactacaaaaaattattacatttagtgacaactttttagtcataacatatttttttgtataactaaatgtgacttttagtca

SEQ ID NO: 162823 - DNA, 2082 bp, Cannabis sativa
ggcataccgtctggtaaaaaaattgtagacagtcggcatcatatttggagagaaggacatgactgatttctaagtgttaagaaattgacatgaagctttgtggtagatatcaagaaccctctaaatagcaagtactgattattggttacatggcaaaagataaggctatcatctgtaaaaagagggtgtgactgtactgatggtgcatggcaagtgaggcacaatccttcaagattgctaattacttcctcgtgttgcaatagcctaaagaggccttctgaacaaattagaaataagtatggcgataatgaattaccttgacgtagtcctcgctttggtgtaacatccctaattacctcacaattaagggagaaagagaaaatggtagatgataagtactttaaaattaagtcaatccatcgagcatcaaaatccatttttccattacagctgcaatgtatacccacttcactctatcaaaagcttaatttatatcaagttttagagcagaaaaaccttttttccttgtgtcttgtgtttggaaagatgaaccaattcaaaagcaatgaggatgttgtccataatgagtctatttgtgaggaaatcgctttgggcttctgagatgactaaaggaagaacttcttcgaatcgaatgacctacattttggagattagtttgtaaatgacattacacaaactaattggtctaaattaatcacccattaaacttgggtttttaacttttggaataagagtgattataaacctgttaagcctttccatgtcgtgaccatcattaaggactcccaaaaccacctgtgtaattgaagaaccgacaatctcccaataattttgatataacatagccgacttaccattacctcctaggcttttgtctggactcattgactgtagatcaaaataaaattcgacacttgtaaatggttgtgggtcaaattcatttcaacagttatcgttgttgggattgtagaaatggtatgagatagagctgaaatagttataggagatgcagtaaacatatcttcaaaataagttgaaatgatagcagtcataccatcctttgagctttcaagaacacccgcgacattaatcaaggatttgatcgtgttatttgctttgtgagacgaattatgggcatgaaaaaactttttgttttggtcaccacattgaagccaattaactattgatttttgtttccaatacgtttcttcttgttcaagaaaatcatcaggaatactctcagaatatataagttatgtcataagatcatgtgatcaggtaaggtcattgttaagtgcaaccacctttttttgcatttatgcaatgtttcacttcatatttccatgcttttcggtatgccaacattgtagagattcagtacaaatttgaagattcaagataaagtgatgcacaacctaatctgaacctgggcctttccaattttgcttgattaataaagcagtaaattctgcattatttaaccaatttttttttaatcttaagcgtgttttcttttcatttggctctgtagctgaataaattagtacaacttgaacactaatggcacgatgatctaaatgatgttaatctaaatgttgtgtgaccataggctcgaactgagaattccatttgtcatttacaaaataccattcaagcttctctttgattgtcttcgtatgatgtttgcttttaatcaaagtgtatggatcttcttcaaaagacaactttgaaagtgagttaagggtgcttcgaaaattatccattgcacttcatttcttagagctctacctattttattttgattagaaaggattttataaaaatcaccgatgagcatctatagaattaatggagccacatcacgtaatccttttaaagcaaaactatttattcttatgtttatgtatttatatgagtagtgtttatattatttatgtgtgccaaaaaatattgtagttttgtgtaatatacagccattgacgaaaaatttaaaattatatacatatatctattttatataaaatgtggctacataaaagaattcttagtttatgaaaaatt

SEQ ID NO: 162824 - DNA, 1972 bp, Cannabis sativa
gcgcccgggtacacagttccacccaacaaatttaaaaaagtaattccaataagaacaacattaacttatactcctaattatttctaaatttctgtaaaaagatatgtactcattagatcatggttgatatatatatatatatttgactttcttcttatttttcaattaataaataatgaaatgagcacaaaataagaacatcatatgtactcattacaaatggcacgggttgtgacaataatagtttaaaattagtgagtaaaaatagctattattttgagagaatattgaataatattatttcatataaattaaatgtaaaattattgagtcttttatttttgaaaataagagcattcaaagaaaattaaacttttcggtcgttacaaaataagtttacgggaatacaagaatataggaaactaaattcattaccaattaattttaaggtagaatatataagcttccaatccacattttttctagataatatttagtcaattacacgatatctaaatagtactattcgttggtttttaaatgaaatgaaaatccatgattcttattaatttatttagtttaatttagatttttggttcataaactttaacatatactaaaccatgttttttaaacttaacaggtcgttaaaaattgttctcgaactattgagtttgttggatttaaaaacttttagtccaatttcactaaagaaagtctaatgtgaatgaaaatttcgggagcacaatttagtacatattaaagtttatgaggcatgatttggtagatatcaaagttcagagacataatttagtatatggacaattgttacattaacaaaattaaataaaattagacaaatccttaaatctaataattttaataattcataaagaatttttaacgactcgaaaaattcaaaaagcataattaatgcatgtcaaaattcagagcaaaaattctaattatctatttatacatatttgacattctttttatttttcaattaataaataatgaatgttggcaaaaaaaaattaaagagatttcttatattaagtactatactttatgggccggaacatgacacatgtatatatatcatgtttaccataatgttataattaggtagtatagtattatgtattcacactactaaaaaagttgtacgttctttatctcaacaattacttgctaaaaattaatttacactatctatcaagaaagtgtgtatggttgagaaaataatttagagcatacatgtgtatttctcaaaatcaattagcactaaaaattctttaatagaagtgattttgttgagtacatagagactcatcttccaaaactaagaaaaccattacatggatggagtgatccaatcccccacttaaccaaattatgaaccgaatcattaaaattcctcaaaaaatccaaacaacatctcaatgaaaagaaaaaaaattaaatgtaacaacttaaaaaaaaaaataaaaaaaatagccaggtcccaatgaggagtcaccttgaccatgataggaatattaagtaacgtttggttaaaaaaaaaatgaaaatataagaataggaattaaataaaatacaaaaacaaaaatgtagattttttttaatatttttttttttaaaatagaacagtcaaatattctactaaccaaaataatactagaaaaggagtagtaatatttgacatttcaatattttataataaaattaattcattttcatttcatcaattacaaattcgtatagagaattggggtataaaagagaggatagtagctagtttaaacattggcagtcatagttagactatttaagcattaatattattagttcttatatgtcctacgtacgtgtacgtggacccctatatgtaacttagtcatgtctttattattattattttttttgagggagtctttattattattattattattattattattattat

SEQ ID NO: 162825 - DNA, 3133 bp, Cannabis sativa
tccgaaactagactttcaagttctgcaatggaattcattagagtacagctgggtttcgaaggttgtttctctgttagtgccaaaggaaaaagtggcggcttggcacttctttgggctaactctgtcaaagtgcaagttaaatcatttacggtgtctcatatcgatgctttggtggaaaacgacttgggttttacctggcgttttacgggtttttatggaagtccggatccaggaggacgcaaggaaagttggaaactgttgaaacgccttcaaccgatgtttaaaggagcttgggtttgtggaggcgattttaatgaaatcacaaaaaatactgagaagaaagggggaaacaaaaaacctgcctatttaatgtataatttccgaaaggtaatatctgagtgttacttacgggaagtatcaactgagggtggaatgtttacttggtgcaatggaagagctgataatctaatatttgagaagttggacagaattctttgtaactcggattggaccgataacttcaaagtgaactcggttcgacttcttgactggagaaattcagaccataggcctttgtttctcacggctcatcttcataacttagctaaagaaaaccgaattacaagaggttctcggttccattttgaacaagcatgggcagagaatgaagagtgccaagagatcattcaaaaggtgtggagcaataaaaactcaggcaataatatatctaatcttaaattactcttacaaggttgtggagagaagcttcataagtggaataaaagacaaaaatctgatcttaataagagaattaaagagctcaaggataagatcggttggctgtccaaatcttattgtcaagctgattggcttactatgaagaagttggagaatgatctcaactgtgtggaagaaaaacgagagatgtattggaagcaaagaagtcgtgctttatggcttaaacacggggatcgaaacactaaattttttcattataaagcttcacaaaggaaaaggaaaaacacaatagagggcctctatgatgaccggctaatttggcagacaagcttcaggaaaatttcagagatagccatcaactattttcaaactctattctcaaaatctaatcatggagttgagattagagatatccttgttgggtgtgtgccaaatcgaataagcagtgaggaaaatagactacttctacaaccctttgatgaaaaagaagttagagatgccatgttccaaatacatcctttaaaagccccgggaaaggatggtcttccgggactgttttttcagaaaaattgggaattagtaggaaaggaagttacggcagcatgtctagatgtccttaacaatcaagccgattgtagcagcctcaatgagactttgatttgcctcattccaaagaccaaacatccaacaaaaatttctgaatttcgacccattagtttatgtaatgtggtgtacaaagtggtctcaaaatgccttgctaaccgaatgaagcctagtcttaacaatgcaatctcaagtaatcaaagtgcttttattggtggccgaatcatccacgacaatgctattttgggcttcgaaagtcttcattgtatgaggaaagggagatttggaaatggaagaaaaatggctctcaagcttgacatgtcaaaagcatatgatagggtggaatgggacttcttggaaaccatgatgtcttgcctcggctacgatgagatttggatctcaaaggtaatgaactgtgtccgttctgtgtccttttcaatactaataaatggttctattcaaggtcattttattccggaaagggggttacgacaaggtgaccctctttccccctttcttttcttattatgttctgaaggattaacttgtttattgcatgaatcggagagggctggaaaaattcatggattgcgctttggcaacttggagcataatctttcacaccttctttttgcggacgatagccttgtgttcttgaatgccaacttagaagaatcgacggccctaaaagaggtgttagattgctatgcttctctctcaggtcagaatattaatttggacaaatctgatctatgtgtggggaggaaaataaacgatgaatcggctgagtccttggctgccttccttggagttcgtcttgtgaaaactcatacaaagtatttaggcatgcctacttttgtggggaaaaataaaaaggagatctttggcaagattcgcgatcgagtggaagccaaactccaaggttggaaaataggacttttctctcaagcgggaaaggaaatcttaattaaagccgtggttcaagcattaccttgttatgtgatgagttgttttaggatttctaaaggcataatacatgacattgaaagcatgattgctcggttttggtggggggaaaatacgaagaagcataagatccattggggaagttgggagaaaatgtgtaagcttaaagaaaatgggggcatgggttttagagccttagaggactttaaccaagctctcttggcgaagcaaggatggaaaataatgaccaatccagattgtcttttggcaagagtcttgaaagctctttactttccaaacaacaactttattgaagccaaattgggacacttcagctctaatatttggaggggtattctttggggtcgtgagttgttactcaaaggttatcggtggattattggaaatggtcaaacagttcgcattaatgaggatccttggattcctagaggagctcctttcaaccttcgaaccaaggtacaagttccaaaagatgtaacagttcaaactcttataaatgcaaatggggaatggaaagttgaagaaataagtggctggttcaataaagaagacatcccttgggtgttgggcattactcctttgagagaaaagaacgatacaatcggttggactctcactactaatggactatacaccgtggctagtggttataagttgcgatttagagaccctaacattgcagaatgttcagataattcaacatctagagcttggtggaaggtggtttgggggtctcggctcactcctaaaatgaagatcttcatatggcgtgtgttccacaactggattccagtcaaaacagaat

SEQ ID NO: 162826 - DNA, 1583 bp, Cannabis sativa
tattgcgttttttgattaactggcagcctgagttctcctatagaactagccttgatatgatattggttcttactgtgtatggcttccctttgctcaagaatgttaaattgatggccttttttcctttttccaggcatggacagatgtgaaagtgacatctcctcagcttaatagagaaagcatgtataagttgtcactgaaaaatctgactcttcagagcgtttcaaggcaagtttatagtggctgatattatgtttgtatttgatttgcttaatcagtttttttttttttttcattctagacatggctatatatatatatatcattgacatctatagttataagatgacagaggaagctgcatctggtttggttcaaagatgtcaactttgaacactgatccctcactctgctttcttactaagtgccactaataaaattagctttgaactaacattagattgttaattaaatcatcaagatgacactcactatcccatagttaaattcagggagtcggggaacccttttgtggagcaagcagtgcagtactctgtagctgctgcatatgctatagctgacaaggacaggaaggaagtgttacaaaaactactactgcaaggtagttcttcctttcttttcccccatggtcttacctttttcccaactggatggttaagaacatccatattctgatatctcatcttgatttttcttgaaggtcttgatatcaccattttaggtagcaatgacttttattcataccggaatcaggtaattaccttgtccgtgttctatatattacatggttttcttatatcaagtgcttgatatggttaatgaaaacattcttggaattgtcaaatccataatttacacgtttatgaaaaatcatggtgtataatatataacctttgaagcttgcaaatttctatatgctgctaaaacgtattaggctgctttttctctaaattattttatgaaactatttgaagatgtgaatgaggtttgttggctgtagattgaagcacttggacttcctttgttgcctgaatcattggctgctcttcctccttttgcatcaattactttcaattctgaggaatccagtggtgaaaatagcaagccagaagttgcaaaaactggattgggttcatctgctgctatgacatcttcagtggttgctgctttgcttcactacctgggagctgttgatcttgctcacgtgaagtgcagttcagatctggatgaggtgcatataatagctcaaactgctcattgcattgcacaggggaaagttggcagtggatttgatgttagttctgcagtttatggtagccatcgttatgtccgcttttcaccagaagtaatctcttctgctcaggtccttatctctctcctatttctttccccatttacatttgtatctgcgtgcatgcacaaacacacctattgctgctcggtgattttgcaagggaaaggaatatgtcattgttaccattttttgttctaacaaacattttaccaaaagataaactgtaaacattaatataaggctaattagcaatttttccccccgaact

SEQ ID NO: 162827 - DNA, 3883 bp, Cannabis sativa
tccaacttaagtcttctttgatttctgtctctactttaatatgtttttcactaaatgagtgacctgaaactgtagttgcagcttaggaaattactgtttttactttcttattgctctctattttagagggaaatgattttctatgttaacctgttttcttcacattaattgtctttcaacaagaattcatgttttcctgttcggtgattgtaacaaattattggacctttttcactaaaattatactgcttattttacaggatagtgaagagtgcacgttctgatgtttctaaggttgtccatggtgatgaatttgagtacaaagatcctgttgatggttccatttcaaaacaccagggtattcgatacttgtttgaggacggctcaagattggtgagctcaaatttcatcaccttaaatgattaattatgtgcttaaacaccatgttatttgtggttatgacaatttttattaatagctgaattaactatctgcaaagaattcacagctggttttcatattttagccattttcatcgaacttgtaaaatcctctccccccaaaccatattgagtattttgtaatcttttctttcattgattcttattctctgccttaacaaaattgcaggtattccgtctctctggcactggctcagaaggcgcaaccatccgtctatacattgagcagtacgaaaaggatccatctaaaattggcagggagtctcaagacgcacttggtcctctcgtgagtctccacctaacatgttttttctttttcccttcatcgattcagtttattaactaaaactctgttttatcacaggttgaggttgctcttaagctttcgaagatgcaagaatacaccggccgatctgccccaaccgtgattacatagacgagcatcaatcggtatggaatttggaggtttcattaaaaatggttatgaaatggtgaatggtctttctttttcatttggttctcttcttttatatatgctctaccaaattgagtagattttcatacacaatcacacaatgagagtattggggtaccattaatgtgtagtgtattgagatataaatttttggtttaaaataaatgtataaataaggtaaatgttgtggctatcctcagccatcagtatctgaactccataaatttgaagtttcaatcttttttttttttcgtgttgatttgtacgtgtatttttcctttgcaagtgcttatagacatcactggtgcctattcaactttctttggtgtcatactgttagcttttaagaaatatcgttaaataatcgtatgacaccccacttatagaatgtgttgagcactactagtgtttaataataatgtttattttctttgagaataactaggatttttctattggccaataatgtgttgtggactgaggagggagaggagacttggattaaaatttagaatatgatatgattgacatgtcaaagcaattgcaattttttttcacatatttgactgaaactatcattgttgcaaataaatggtgtgaacgattcaactatcaaattctagatcattccaaattcgttaagacctggctgtgccaatctaaaatttacattttctaatacttaaccatttaaccatataaacttaatatttaacgtaaaaatctattaaactcttattctgttttgctctttacttttgtctaaaaatttcagttatgtgccacaatagaccttcccctgttttatacttataattaatattacgtagaccattacaaatttgtcacgtgtatacttatgtacacacagtcaatccgttgtggtatttaattgaggtttttggattgaagtgtaaagagcaaaacagaatgagggtttagtaaattttgccatcaaaaattgaatttatgtggttaaatgttacaaaacgtaaaattcttatggttttgccactaatatttctataatttgaatggattgtgaatagaaataataggtgcagattcaaaatagattgaactcatttggcatgatattttttagagttgcgatggagttaattggtgtcacacttgataatttttattttgtcgatattttgagataaattatttgaatcatcaattttacttaattatacatgtgtagtgtatcaacagtcaaataaatattataatagtatgtaacagatctatttaatatgtagatagcatgaattaaaacgtgaatatgatatagaatagattagtgttgagatttgttgacacaaaataaaacctattcgattaggttgactaaagtaatacatcaatctactaagatacgacacgaatatataacatgacacaaattgctcccctagtttaaattgtgatacaacaatgtttcatccaaaagtaactaaaaggtttattttttttttcatctttgacattgaattggaaaaatttacttggacaaaaataagtgaagtcactttctccaatcaaagacattacttcaactttttcttccacaataattaatgcccttattttgaaaagtagtggtatatttataacattattaacgagctaatatctcctaaaaatagctgataataacaacgtttaattaatagtctaattagtgttgttagttaggtcttagatgtgttattaacatttttttaagtacaaatttatatttgtgtccatatatgtttattttgcacatgaaaatggtaatggaaagaatctatgaattggaaagctttcattattggagctgtaattactagtaagattggccgattatagagcatttctaaaaatagttaattgttttctaaacacggaacaaaataattaaaaaaataactcaaaacttaagctaataatattatccataatcattatatatatttataagaaaattatcttttatactatttttaattttttatttttatttctacggtttaatttgctttagtagttgatttgatagttgctatgtgagtttatgcgatttagatttaaattgcttaatttgttgcttactatatgagttgtcttgtagatttttataagaatacataaaaaaaactattttgaaacataaaaataaaaaaaaaaaaactccatatttatataaataaattattgaaaataataatactgcaattaaaaaattatatatattagtttattttataaattacttaaataatgttgctaaaatttgtggtacacctaggtgtgtttcagtagatttttagtttctttttttttatttaattttggcatgttattagtttcttttttttttttataattgtgtacattgtagttattaataattatctataattttttataaaattaaaatacttataaaaaaaataataatgtgtaatattttagttgtgtaacttattctaattttttttaaaaaatatactaataaccttaaatacctaaatattctttttgagagatgtaatataaatttatccatataaatcaaaatggataatttacatagtttgggtagaaaaaaagtatcaacgaaaaagtaaataaattagaaatgattatccagtgatctttcttatagggaataatacttttttaggagatgagacatggattagtatatgatatgacataacatgtaaaatcaatgagaaatatttgactgaaactctattccaaattgtaattagtatgtttaaacaacggaattaaattgtgtaattattgattgtgatattggattaattaaaaaataatttatggtataaatacatttaattcttcaattcttgttacaaataaatatatattttatatttttgaaactttcgaagatatttaattattaagtgtcaaatcattatttatg

SEQ ID NO: 162828 - DNA, 1740 bp, Cannabis sativa
gaattagaaggatttgtgcatttgcaatttgattttacttttacttttgtcgaatgattcgttgtgttgtatcagtagtaatttgatggtgcaatgcaataatcgtgttgtaaattggattctctcattttgaaatttcatggacttcaatttggaattgttgattggagtttgtgttgcagcaaactagaagaatttgttttagaattttgcaagtccttttaagatttagtgttgtacatagttttcagttttgttgactagagatattaaagattagagaaaagtacacagccatgttagtccttttaagcctccattggtgaatgattttgttcgaggataggctgagatctgtgaattagtcatgttagctgttactggacttctttacattgtcttttaattgtgaaacatggaaccctgaatgttatctgattaaactcctttcatagatcgttcgttgagtttttgaggccttctatgagtccacccgatgtctttgaatttactttgtataattggtatttgaatgtttctatgtgctgctaatgttagccaagttgtatttggagaaccttttcgtgtaaattgtctgcagttcaactgaaatttccctttaatatcagaatgtctaactagtattgctgcaaaagtagtcttccaaagtctcaagttcattagtgttgctgcaaaagtagtctcctaaagtctcaagttcattgaaaaacaaagtttggttgatgatagcaaatgtttgttttggaagattcagctttgtgcataatccataatccataatgtatttatttttactattcatttacttcattaattatcaagttactttgatgttaatcgtttgatatattaacagaggtagtcactcagcaattatatatctattctacgtttatgctttgctcaatgctccaaggatttctttacccaaattacctaacatagatagccataaatctgaaacaggataatttgcttgattcggcttagcattatcaagttctatttttcccaaaataatatgaaaagatgtttactgaattgccttcttgtgactacaggacaaggaggacatggaagccaaatgtccaggataagcgactttttagttacatcctagaccgtcatattcgagtcaaagtgacaacccacgcccttcgttgcatagacaaggctggtgggattgatgagtacctgctgaaaacaccttactgcaagatggacacagaaacaggtctcttttggaaaactaaaattaggaagctctatggagaacttgggaacactgaggttctcttcttttcacctgaggatgaagccaagttcgaacaggaattcaaagaaatgaagatagctgaaaaggcagctcgtagtgaagctaggagaagggcgtctggttggccagataaactaaagcagattgaaggaggaacagacgctgaagaagggagcttacatgaggctggagatcatgcagatcatgagaatgaaaaagttgctaatttctaagtcttgatgttgcttagaatgcatatcagatgacatttgttttttttttccctaaaattttgctgcgttgagaaaagatgtcaatatatttagacgtaacaaggatattgacgcactattagaataatttttccaaatttattttattttcttttaatgaattttattttttttttttattttaaatacattagattttgaattcaatta

SEQ ID NO: 162829 - DNA, 5196 bp, Cannabis sativa
caactcattctaactcaactttgatcctatggtcttgaatatgtcatagaaaattaattggttctaaatcccagctcgaatctatatcacctgacctatccagcatggtcccataatactcggctatcctatagtaggagttagtacaactaatttgaatgtgggattctgggtaccgactatcgaacctatgtgcaatgcaatctatgaggaagggattccaagtgtagaagttatattggctatctcggaaagacactaatgtggtacgctcaaccttaagcactgtgggtgaccatccacattgattacctcgggatctccttcttcagcttcttgagggactgcattctggaggtagtgcgctcgagccatatagtcctgagattcctcgtcagctgggaccgaaacctgctgccacgacgtatacttgggatatttataatcactagtatacttgttctcagcgaggagacccacacacctcaggttggcctcgttcaaaaggaactcaactgattgaagaccgtagggaagacccatcaagagcctgcgtcgctcggccatttcaggagtaggagttggtcttttcgagaccgctgtcaaaataataaaattacaagtcagcgaggctaaaattaaagacatggaataatttaaaaccaagtttcaggcaaatagtcacttacgtataatacgaaaggcggttgtattgattggggagaggccattcgtccagaagaagtcctctttgaaaggagtcttgtttggcaacccaataatgatcttacgatctcttgtgtgagttccaagataatagaagcctcctgtagcattcttcctcgtagggtctgccttgaccaagtagagatacactatttccaggagagtagggcactcccatcctaaaattttgtagaaaacctttaaacttgcaaggattctatgggaaacaggaaccaactggaatgggacaattttgagatggttaaggaagtccttaaagtaatctcgcaggggaagaattggttcaaccctaatatgctcctatccctgtcaagccgcttgtactcgcctcaccactggtcccctcgggcgcctcgcgagtgagttgttttggtgggtaataactaaactcgctagggctacagatctaacccgacattttcatttttggtcaatgccacaagtccttagaatgctacctacataatctctgatggctcataccctcgactttggaagtcatgatttcaaagtccaggtcacctggtgaaaaagcaattgtgattctgggtaaaataaagggttagccaaaggaatagatgataaactgggaggttcaggccaagtaacatctcgcaagaaatgacatttaccctttgttatttcttgcaagaaacgcctatgacaacaacaatatcatcttggtgggtttttattaggtggtccctaatttttgcatcatttatctctaatttggacttgagtgaaattttgggtttatacgggatgacaagttcattggggcactttgtttctaaaacttttggaggataaacttttgaaccagattgggacattgttacaaaaaagtgagtaatcccaatttctagatgaaatttatcaaactagaagcttataaatttgagaaacccaaaacgctctgcctaaaccctaaaagttactcaaaaaaattcaacctaaaattgctaaaaccaaataagatgacaaaggtgaaaattataaaagtagtgatcaaacccaggaatgtaaaataaaagagcagatatgaaaacagagaggggtgaatcacttactgtttgaagttgagttttggcgtgatgaatggttctacaataaaaaatgcagcgaacggcttggtaatctctttgaatgcttgaggtcgaaaaataaatctaataaaattcgcaagaagtatgtcaaagacaaagatggcatccaaagcttcgtaaaatctaagtggagttttttcacagaaaatctcaagaaatctttgaaatggcaaagatggtgaaaatgtggtttcttttttcgttttataccattgggttgatctccgccagattaagaaataaacgatccaatgggtagaatcgagagggaagtggaaaagatggttatttaatgctcatgatgtgcttcgaaatcacaaaactaccaaaatcgaaggcatgcatttttttaaaatggattgtgacaaatataccctttgtaatcatttaaaaagtacttttcactgaaaaagactttttaaggggcaattattatacccaaaatttggctggcacttcagagaatgacacgtgtcaaccttggggaatacgaataagcgaatataatgccaattatattacaaaaaatattaaatagaataactcattaaattcaaagtcaatagggtatatttataactcgcagactgcatagtctctagcgagacaagattgtgcgaactattgattcacgtattaacgagaaaccattttgtgttagaggacataatcgtaaggatgacatcgataatacatagcgaagcatcaacctcgcaatatgtagaaaggtgttggcgaggcgaattgactgttagaacacttagcgtataatatacattatactaactaagtataatagcttgaacaacatggataacgaatagcaagacatccatcttgctataggaaggcatactcctggtaaattccagctcgctgccaggattattattgctattgaaaacccccaagacatgattgtccagtctgcaaggccttatggtcaaagagtagttcttaaatttgctcagtacactagtgctcatgccattgctagaagacttattaataaactaagttattcatgtaccatgcgagatgccccggcgagatacactttgtaacgtgtcttaatccacgtcagcgttgaccctttaaaagtggcttaactcatagctgtgtgattttcaaataataattgcatttatttacatggaacataattaaggcccacaatttcagggaaatattattgtgagatttgaattttaatgtaattaattgccaacctatgttattataaatagggactgattatacagaaaaagggacggaaaatccttgagagaaaaaagaatacactgtttgtaaagaaccctagttctgtatcagaaaagtctgaataagattgactcgtggactatgcagacttaactgcaaaaccacataaaaaacttagtgttatttttgcttcttttattttcaataatttttgtgctaaacctatcacgaaattaggctcattatcgttaacaaaaatctgcgttaataattgtacaaataaataattaaaggaagtactttgatttctaattcattaaaaaaaaaataaaacaaatttagtgtttatagttattgcaatgtgagtaattagttctctcatttttgtttcaggaaaaatagattgggttaggattgaaatggaaaatagagtaacttggaatgtaaaagcttatgttatggtcaagcctaaataacattttcatttacgcttacctaagcctaatgttataattcgttaaagttcttttaatttcaaaccatgagttactgacattagtggagaggttaaatgatgcaagtatattaaaaatcagtttgtggatctgtttggtttgagttgagcatatacaatggagtccaattattatgatcatttgtgaattatattgttaattttcctaattgaacattaagattaaagtttgaagaacttagactgaaattctggttaatgttgcaattgagatttcatgagtaatgacaaaatattgtagatatggtaatggtagcttaaattttccatgttgtgttatttttgtcagttgacttgatctttactcgaggatgagtaaatgttaagtttggaggaatttattaagtttatttttaggttgttttagagtatagtttttgggctatttttcatgttttattgtttgagtttacgcgtgtttttattttgtgttaatttcaggtttgagataaagagaggttcattttttagtgataatatgatatatcttgggtttcttggcgatggaaatgatcaaatttgcaaaaaggaacctcaaaattgaattttttggcatggtgcattccataggattaaaaattaagtttttaaagatttagcatcaaaggtcgcaaccttctatctaaggtcgcgactctctaatctttgtaggaggcagtttagagctgcgactttcgaagcaaggtcgcgatgcttggaagaactgaaaaattaagcctctgtaaaaatagccaagagtcgcgactctctaccaaaggtcgcaacgcctgactacttttggcaagtttcctgtttcaaccaaaaaagaattgggtgctaagttttagggggtgttggactttggagagaaactataggcaaaggaggatgactggaagtggagaacaccattagaggctctattttgtgtcttattcaactatttttgctttttcatgtttgtaattgaatcgttgaatgttagaatggatatcatgagctaaactctcttttagagttgttttgtgattctcttgaacctcttttacgaattaatgcaatatttgatttcttcttcgtcttgtgtacaattccttgcaacttgttttacttctgtaattatttattgactacttataattgttatttatgaatttaatcaaaatttgaaaaaatgacatgtgatgttatgattgtttggatgcaaatttaatttagaacgagggtgtcaatattatttgtttgatttttttaagtttttgtgttcaattatttacttgaacaaccagcacatatttaactcagcactcccacatctttgtgcccaaggagaacgactccgaagaagagaatcacagtacgaaagagaagtcagaatagcgtggcccaacaatcataatggctcttgacacgcccatggccataaatggccggcaagccctgatcagacatagaatggctaaagaggaacatagcaaactctagcatagccaaggatatttttttttggaattttttctataataaactgaaaatggaaaaaatttacatttatgacctacatagagaaaataaacaaaaatagaaactaaaagttgttattta

SEQ ID NO: 162830 - DNA, 2404 bp, Cannabis sativa
  modified_base (2136)..(2137): a, c, t, g, unknown or other
tagagaaattaagggaagggaaatgcttactttgatgacagttgtcaagttgccaatgaccatctcaatgtactgtgatttggagtaggttttgaggatggtggaattggttaagaaaaggctcaaataatcattactgccaatgctaattaagtagacagcattagacaacatcaattcacctccaacattccccaacttatttctcaaccaaccctcaaccttcttatagtaccttacctgagttttcagatcgatcacctaaaaaaaagaagtccaaatattatataaaaatactcaaaactcaaatgcatgcgctctctacttctctttttctcttaggtgaaaaaaagcctaaaaacaatattgcttgcaagcctaccatttccattgatatctcttctctttttcacatttttttactttatttcccttttctatttcaaaaaatgtcctatgcctatcatacacatcatcacttgacaaggatataacatactagtatttttctggagaggctcatttttggagtctgatggtttaaaaatgatcactacgtactgctcactttatcaatttgtggacataaaacattatgtacatttccacgcttccaaaagtaaatttggctcattcaaatgacagataatagctaaccagattcatttcttatcccttttttttcaaatttcaagtgagaacaggaaatttaagtaatattctacaagttaaggaactataaattataaattataatgtgcgtttgaattgaatctataacatatgaaaatttaaatagcttaatagaaacaaacataccgatccttgaaacgtttcgaccagagcaccagcccctgaagaagcaaagttcactcctttataataatggcgaaaccccggttgtagaaaaggtggaatcaatggtaggttagcatattcagctgtaaaagaacacaccatatgtacacatatgacataaatactaaataaggaacaattataaacacaactattaaagtttaggaggcagacaatatgtacataatgttagttagaataaagttgcttttgtataaacaagaagacaagattggtatataatataaatgatgtgtacatatatattatatgaggaaatctcaccaataaaatccgatatcaaccggccatcggagaaccttccggtggggaacttgaagtaagtctctccataaggccagaaatttgcttggtcaagagttgtggtgttgatgtagttgttgttaccggcatccaagaaggaatctccaaagatgaagaaagcaattccatgtttcgtagaagatggtttagttacattattattactctcacaaacaggggatgtgataagtaataggaccacataaatatcaaggaataatgcaaggaacacacaccttaatctttccatgattcacttcttctcaatacaaagtttacaatgtttgtgctcatccaataatgtggttttgttttattatatatatataatatatatatatatatatatatttggttaatattacttacaatagatatataagtagttttctttttaattagatttaattaggtgatgttaagtgtaactttaatttttttttaattaataatgtattttattaattttaaaaatgagatttgagattttagtcttaaaaattttttaaactattgcggctacgttaatgtgtctttttaatgtaattatatatatacgtattttaatatacttcaattaaataataaacttaattcaagcatattatatatacataattttgagttacataagtagaattcgatctctaataatttgattatggcttagcctatataattttagatagttttatcttagattcattctgttaactttcatttggcatacttatctatggtatatatacctaagtaattgaaaatgaaacttacaacattgcatctaatttttttttctctaataatttattgttgtcaaatattattaataattagttttatttgttgtgttttttttttcattattaagtattatgaaattaaaaatgtgattaaaatatttatgtattttaaatttaaattaaaatttctttatataaaatatctacatannttttatttttaaatatataaaataatattataaaattaataaagaatattttgttgagtaatagtatattctgttaaaattaacgtagaaaattaacacttttaaactgaaacttctattatatagccacattttatataaaatagatatataccacgtgctagtagttcataaaaaaatttaaaagttcatttagtacactatgttatactatattatattatattttattttattaaaccgtataatatattgtatttttatata

SEQ ID NO: 162831 - DNA, 4483 bp, Cannabis sativa
  modified_base (2194)..(2204): a, c, t, g, unknown or other
  modified_base (2292)..(2295): a, c, t, g, unknown or other
atgggaagcacgatgtgaaagttagagaagggaaaaaaaaaaagatacaacataaataaataaatgataatgtcacttatggccctaccaagcataaccttaacagatcatatctggagcttaataatcacaataataatggctaatagttggtacttaaatgggattttaagcttgaccaaaataaaggattgtttgaaaattagacactataatattattaataatcatagacaggaaaaagaaaaacaaacgacaaacattttaatcatcaatggctgtcattaacgcaaacaagaatctatttcatgacttgactagaggagataagagataagaagaaggtgaaatatgaaagtgactgccaattgttaaatatagtactgaaatgaagaaagaaaaagttgacacattttttcttttcattttcatatcatatattgtttctttactttaatttgttttttcattaaagtaaagacaatttataaccatatgatatttatacatataattggccacacccacggatttacagtagccacagaattagtttttgcatacagagagaaaagcaaaaaaaaagagaaaaagaaaaagaaagtttttataaagtcaaacaaaacacatacaaacaaacaaaggaggcccaccaagttaagttccagcctcttaggaaataacaaggaaacactttgtttttttgttacaacaaaagcattagtagtctctattctaaaccttaaaataccacttacatgtttcgatataaaaccttcctttccccaacaaaagcatacatatatatataaatataaacattgataaaaaaaaaacccctcttcattagtcataacaactcaaaagagacccctctctcaagctaaggtagtgagatatatagtgttaggaaagtaaaggtattgagatatttatatatactcatattaaaatggagcagttaacgtccgttgaagactacgctttttgggaagtttatcagcagcagcagcagcctcttcattaatcttaaaaacaaataaaataaaacaaaattaccccaaaatagaagaaagcaaaataaataatagtaatgttattagtgtaaaatagttaatacaaactttacctggttttgccttcttctaagtctttcattttcttcactcaattgtgcaacaacaagctccagctcatttgtatatgcctgtaaataagtgacaaaaaaaaaaaaaaagcccagatagataccctctaagaatattaatacaaagaaataataaatagttaaataccatgtacgtttgcaaattaaactactaattaaaaatgctaactttgataagaaaaagttattaatataataataagttaataacccatttgaggaaagcacataaataacaagcttgcctgttttctagctcttgatcgagcagctgactctcgatttttgatcatcctcttgtttcgtctgtcccccgaagctgacccattttcagtttggaaccttttcttcccaaaagtgtttaacaaacaagaagaggaatctaaagtctcaaatgggcttgtgaaagatgaaacattggagatggggttgtttggatgcaaggatggatcggtgaggcttccatcgagaaatggaaactcagggccagaattcaagctcaatgctgtaagaggctgaggcagaggagacccaaacagagtactgtccggagacggagccggaggaggtaccatggtggtcggaggtcgatcagtgcaaaagggtcttgctaaaaagtcttggtagatcatgtttcggtagttggtgtggttgttattgatgttgttgagttgtggtggtggtggtggtggtggaacaacagtaactgtattagtagtctcagaaagagaagtcaagttcaaatctttccaaacttcttccatggcttttgttgtagaaggagcagttgaacttgttcttgaagatgttgaagaagaagaaaaagacttctttgaagaagaggaagaggatgaacctgtgttgtgtaagcttaagctattatttcttcttcttcttcttctggtttctgatgtactacttgtgttgcttatttcgatctcttcagcacctgatgacgacgacattagtattagactgatgggtttttatttactataatttatatatatatattgagagagagannnnnnnnnnnagagagagagagagagatgagaagagtagagctggtgtatgtagctacagctatgtatgaaggtatagagagagagagagatagagannnngagagagagagagaaaagaagaagaactggtgtatattgtattgagccacgcgcggaagagtactgtttttattgggaggattcagattcccaaattaaagagacttatagggcctggcctgtaaactgtatacttcagtccaatctcatctgctgttccacaacattatgagaatctaaaaggacttcgctcccaccactcctttttaacagtgccactaaccatccccctatatatgtacatgcttgtagtactctatcactgtgtacaatgtacatcaatactgttgtgaccatttacttagcattatgtcttattaatccatgaataagattaattgactaatttgcaactactctctcaaggtgggttgtgtattaattaggcctggtgtgaatgtggaatattggcatatatagtatggtgtctagtctagtctaagtgacactctagttttctttgctatatactgttttgctttactttaattctttttttactttgttttgagattttaaaagggtgtccatgaatgaaacaggcaaagtttgtctttgacaggattggtctgaattttggtgacagaaaaccatagaaaaagaaggtaggaaagggaagacacccaattaccacttagaaaactgcagtgtttgtttacacgtaggtgggttgtgtagttattgttaccttattaatgtgaatttttgtgcttggtcctatgtatgtccagagaagatatctattacaactgtagcttcagattcagaatgaagtgaaatcacactgatacactttagtagtagcatgctcaattctcatcaaatatctatatatatatgtataaataataggtatatattttctcttcctcaatccaaaacaaaaaagaagagtcacccttatttcaatagattctattatttatgtttcattatcaaatgatatcggatatgataaaaataaaagaaaaaaaaattgaataaattttttgatggtttgtattgtgccacctaacctaaagatgcatcagtttctaaacctttaaaagattctttctctttccaaatgggccacaaaggcttcttcacttattagttattatagatactatacaataatacaatagaaagggaaagtgtttaatttattgggtatacaagaaaatgaggttgtatttatacacagacatggtaatacaatttgctggagcaatgattttaactttggtaatacttttcagttttcacccactttcaattcattatccttatgtgttatttatttttatttttacatatgattatttgttatgttgtaaggatattttgtcattaagatattgtcagtagttgcaagatgatatgattcagaaaagtaaagggacaaaacaaagagaaaaagttgaaacaggacgaacaagagaagagaatagggttgttgtactacatctacaagagcactaaaaattagagcaaaatttattatatcatcaacatgtttttctttcactatatcactctcaacggtttttctacactattttttaaaatattttattaaaacttttttttttattttacattaaatttttacctttcaccatacaatagctgacaatacacattcacagcttcataaacacagttaggaattagttacttctttagctaattctattatttgttgcaacttgtgtgtttagctttcttgaattgtattgcctataaatacttcgaattttacgatagcttttctacatttttcttctctattaaaatattatatttttaaacatttttatttatttaataatacagcacaaataataaaaccaaaaagaacaaataatcaaatatatatttgaacagagagaaataaataaatgattaaaatatgtttaaagcacttacaacactttctttaaaatataaaagttttaaaaattttaaacaatcgtactaaaaataagctacaacagatgctttaaattcttttattttaaagtttctttaaaatttattattcatgctctatatttataaaatactattcattgctctaaaaccccactcccaacagcttatctactatattctttaaaatacttcaccaaaattttactttttttattttacctcacacatttatattataccatacatcaattttttttttataattttttct

SEQ ID NO: 162832 - DNA, 3111 bp, Cannabis sativa
ggtaaaataaattccaacatgaagatgatcagaaattaatcttgtaatggcggaggctgagaggagatcattagtacgtcgatgcctcctaggcttccaatcaggcctggttatggtaccattggttgaggtaggccctttttggcaaagttcgctcagggggcttctgtcattacaatgtaactacaaccccagagttacatcatagaaagaaactcgagacattataaaccagctaggaagtctctactagagtactgctcatcctactgggggtccgagtctttgccttagaagccattgaatgccctgcaatccatcggaggaaacagactgcccaagagatcctggggtgcatgcacgcgtctcttggggcttcccagagctcaagaggtgtgtgtgcatcgcttttcgtgtgataaagatcattgggggtgtgacacatcttcaaccctccttcttggaatggaaggactgcttgaagtctgtcttactccccgtgatgctttccccctttgatcttttcaagggatgtcattgcttgaatttttatgcaacttcagccttccttcgcggaagccaaagcttacttcatcaaaattcaacacaactctcgcatgcacattgtttttagtgcaagaaagattattgagggtatgacaagtcttcaaccctccttcccagaatagaaggactgcttgaagtctgtcttactccccgtgatgctttcaccctttgatccttttgagcgaagtcatcgcttgaatttttatacaacttaagccttccttcatggaagtcgaaacttgcttcataaaacttcaacatgactctcgcatgcacgttatttttcgtgaaagaaatatcactggaggtatggcacaatggttgtaccgctatgacatcacccaaaacatatacaatcacaaacacagcatgcatatataatatgttctatgctagtcttacctcgtctctgaattcaagtgagttgggtgacctaaatggaaaatcttatgctggatggatgccctagtcacatatatgtaaacgagtaaataatacgctaaaaccctaattcgggaaagccaaacatcactattaagggttttgctattggtaaatcttataacgataccccggatatcaagaaaatgaccatctaaggcactgaaaataacatggatcgacaaagcaaaaaattcgggaaacctacctttgatccagttaaccagttttacactacatgtagaaccgattaaccggttcatactaggctcaacaaacaaggctgaaactccctccacacaatcccaaaattcatcaaactttctagaatacctgtaccaacatccaataacagaatccaactaaaaacaatagccaaaaagcacaaaaattcaatatgccattgttgagccaactcaaacttgctcaacccaagaattaaggaccaaaaccacctcaatttagctctaaacaacctaatctaaatctagaaaacaaaacctaactatcataggttcaaacagagccaaatttaacatttcacattcaacaactcaactagtaaattcaaatcttcaaagagcaaggatttctagggttacctttgattaagttcacttgatttcagctaactcctcctccaaaacacaccaacaagctgagattcttgctggttcaagcaaggtttgaagagagaggaagagagggttcaagacttggtttgtttattctaaatgggttcttttcttaattgaccaaaattaaataaaatcaaggataataggctgaaataaatcaaaatggccacctgccactgtccccagcagccacctaatccttaaatatgaaattttaaaaatgcccttaacctcttaagttaaacaattataaaacctaggggtaaaatagtcaaaagaaccccgctcaaactaggtattttaaatatcttgtaagtttgttcccgctaagaaataggttctaaacttactcatgtgactctaacggttaattattgcattttttgtcaacaccgagcaaaatcataaaaattacataattcatatttaatataaataatactcttaaaatttaataaaatctctaggattgagaaattataactctaatgtctatttttaataatgggacccacaacataataaaatcaagcataattataaaaatgtcaccaattaatgctaattgcctttactaatccatattctaacatgcggtcattacagtgccaatcaacttgagtggaatgtgctactgaatgatcgaagactctatgtcacatttacattaaataggtaagtttcttgctaaaatacctttagggacttaaacttgaaacgggtagttttcttttcgataaatagcgtagaaatacgtaaatattgaggaaacacacaaacttaggcacccgagaaacaccccatctagttcaccattcattggtgtcctgccaaaccaaatagttagctgtttccagcagaaatttaaaaactaaccattactcacacaattctaccccaaaactcataaaacctttgagtatacctaataacatcatcataaacataattcatcaaaaattgcattatcaaagctttgaaacaaaaagttccacttttgagccagaaccatcaaaacccatcaaaaacaacaacaatgtaacgccctaatgctaagacacgctacagtgatttttcaattgaagtgctatctttactaatcatataattttcttgaaaatcatgtctaatttaaacttttagtattaactatcaaaatttataaactttataaaaatatttacgactgctgggatcccgttaataaattttttacaaaatagttagaatacaaaagtcaagtcgcacaacgagtacgaaaagataaccccagatgtcctgagaccgaacactccaggttgtgctgccatgacatgtacaacttcatcctagctcaagctcactcctgttcagccttcgccaatcctttacctacacatgaatgtagaattgtgagtcgacagactcagtaggaaaagcatataacatatcacataataacgacttgtatctaggtgcccataca

SEQ ID NO: 162833 - DNA, 1518 bp, Cannabis sativa
ataaatagcccaagttatattaaagaacaaaataaagaagaggttaatcaagcaaattgcttacaccaatttcacccatccagcttatgagaataccaaagatattcattgattattctaaaagagcatacacacataatgtgtaataattaaagagtaattagaaattttattgcattaaaatataaagattcaaattagtgtagaacatatcgttagaaggtaccttctaattaaataatttgaataaacaactattaccattgattggaataactcttgaaaacagagcaagaagtaccattaatttgaaccggaatccaaggaatttaatcaatccaaggtgtaaatgaattctcacttagaaatgaattgttttttcaagttcataattgtaacaaaagaagaaaaaggcctacggacctcatgtataattattaccgaaagtaaagtctctgaatttgtgtcagatagattagttgtatgagcaaaaaacccaatatttcgatcatactttctcctcctttccattatatagtctaaaggactcaaatatattcaaagacaaatacattataacctggaaaagatcacaattcttacttagaaatgaatcatttttctatattcataattgtaacaaaagaagaaaaaaaaaagaaggccaacagacctcatgtatgagtgttgtcgaaagtaaagtctttgcttcagcagttaaatgacgaggagcagcatttacatggcctgtggaaaagcataaataaaatgaaaggttatgtactataagctctaattgtgtggcataacaatcagatcagcttatacaaagttacaaagttaccaaaaattgtacaccaccatcttcaccaaaaaatgaataaccatgtcaaaaaagctccattgaaggagaatttttcttcctagcttatccatcaaaatgattatagtgactaatcctaaaaataagtaaaaactaattggtaaagaagaagattggtaagaactagttcaggaaacatacaccaaaaagaacaaataaaaaacagatactctaaattagtaagccacctcaccctacattccaccttcccgatccttttagttttagcaaatcttctaattaaacagaataccaatacgagttaaagatattactttcaaatacccaactacatagactagaaaattatgttaataagaaacaagcataaactaagaatacattccataaagctaacaatcgatatgtactttaaataaaacaaactatgaagttggaaaatgcaaaataataaagttaccatgagaagcagctatggcagacatgatagtgaccacaatagaagcagaagaagatactcctttaccttcaaggacactagaagctacctgtacacaaaatttgaatattcaaaatagctttaaaaaatacagttggatgttaggataaaatgagtctaagtttcggatcacatatttcggttagttttcactctgtgtttctagttttagggc

SEQ ID NO: 162834 - DNA, 900 bp, Cannabis sativa
attggcatagtcactcacacgagccacttgcattgctttattaaattttttcaagtgtgctcacggatatgttcttcactcatacaacgcgattggcgacatcttgaattttttttggagtagggtttatataatcctccttacgcatggtgtggggtcctcatcgttagaatctgagagggccccactctactttctgactagattggttagagttgctatcttctcttgtaacctttttgtctcacttttgggaagatcttccctcctcattttgtaacttaggtggtttctaaggtcaactccatgtggcctggcctttttgattttgtacctttcggacttggtatccaatcaccgttgaagatctagagtggaccatctgtcctcagaatgcccatcaattatcctttgattcttgttgataaattaactgggtggtttttctacctcttggactaaggtactttcatacttttaccttttggcacggtttttccactacgagcagaaaggcatcgaggctcgaaagcactagtggcattctgtatccttaaggactggtcaaccaaattcgtctctctgaggaggtttaggatcagaattctgtggaggctcacctacctttcttttacctttatccttgcgaggactcgaagtttcaacctcgattttcccaagagcacattgttcagtcattacttccaccgatgggtcttggtcagacttttccaagtcctcaaattttttttggagacattccataattctcttcattttcttagtgagatttctctattctgctaactccattctagtagcctctaatttcttagtagctcacagcaagtttgtgttggaatatttattttaccaggatattagatctactcacaagta

SEQ ID NO: 162835 - DNA, 1067 bp, Cannabis sativa
catagaggacttattttgtactacctttttcgcattaatttcttagttgaaaatattacacgccactttgattatgttatacacaaataaaacagagtcgcgtgaaaatatgagtaaacaaacataaaagctcattatcctaaaaaaaaaaaaaacaaaacaaagttcattctcgttgttagtattatattattattatataaataaatgaagggatcgaagggaagggcggctgaaaatctccaagaacatggaaagaagagaaatagaatgacaactgtgcgtgcctcacttgcattattggtcaagcaagtgagctttggtatggttaaggtgataattgggtggctgcctaattcattggagaagatactatataattaattattaatttttatattaataacaataatgaaaagaagaacagggtgcaatctattttgttctttctatctttttttcatattgtttgttgagattcatgtcgtgcaggactcaaattcttcacgtgcctcaatatataaccccacatgtcatagcatatatataaaaattaaataattgatattgaaatttttggatagagctaaatgttattacctcacctttgacagctaaaatgaacaacgaatggaatacatcacagtgaataaaagaataattgaatggaccaatagcaatacaatcctttatctccttgttgaatcattatgtttacaataatatagttacttgtttttttttttacttgtaacattcattaactaatataaaaatgtaaatcagttaaagtggtaccgatcgtggagagagagagtgagaatcatatatcgaaatacatatttatgaaatttgattggatagacaaaaaattgaacttcacatacataagcttatacaagtaggtaggacaaatgtttacgtgaacatttcttttacagtaacaaagctaccgtgatttctaataaaaataaataaattataaataaggtagcgtttgataagacttttttaatcagttctttatttttaaaagtgaaaaagtaaaaatattttttaaaaacatg

SEQ ID NO: 162836 - DNA, 511 bp, Cannabis sativa
aatattgttaacaactatcaaatctgtagtagaagattgttctccaatttaaaaaaattatattttagtggatttttttcttcacctctctcccatcctctcctagtaaagaatattgttttattaatcgtaaataattaacataaaaattgtgtgtaatcataatttaataattccacacaaatttaatttgtacaaattttttctttggtacaaaataggagagttttatcaaaaaaaaaaaaaaaaaaaaaataggagacagatagagagagaaaattaggagtttacccatattttatgtatgtatcaattgaatgccaactactctactttttccttttctaattttgaaaggacaacttcctttgtcacgtagttgcgattgataggcgaaaattgtactcttgtgaatattttaagagttcattgttcatatatgtatagtgtgtaaaaagtgtttcggctcttatttgttttttttttcttttaaaatatattattaattttt

SEQ ID NO: 162837 - DNA, 3043 bp, Cannabis sativa
ttttttttttttttttccaatgatagctcagttattatcataaattgaatggctgagtaaactacttgtggaaatcgatttttataattttttgtcatattttggataatatactctgcactttgatctgaaaagggcttggattttactttactatcagccactcagtttgctggaaatatttacactatgagctttttgatagtttcacatgcaaagtttaaggcatcataacttggtctatgtgtgcgcctataaacaattatagccatatattgcaccttcccaatactaacagaagtggcaataaactgtttacggcaatatttttacaatcttattcatatattgtattctaattttacaatcttattcatatcgtattctgtttttacaatcttattcataataggaaagtataggtttttcaaatgtaaaagctattgcaactggttagaaatataatattgtcgccaaattctagtttatataatgtggaatttgaaatttgttatcttattctgatttttattgttgtaacatatctattcttatttttgctagttgctaccgtataatctgaaattttagtgataaaaattgataacattgtgattttctttgactaataaaatgatacttttatttgaaagcaagtaatacttttatctgaaaaaggaggaataaaatagtactttggcaatgtatatctgatcttattttttcactcaattatgtgaagtgcaagatccaaacattaccccaaacaccacctcaagcttgagtttgttgaagaaggtaaaaaaatatttgatgaatattgaatatagttctttcttttatcatttatcatgtttattaatttataattatttgagttttcttttttaattgtagacaataaatttgatgtaagggatcatcaccaaaagagaaggaagataagactattgaaagtgtgagatttgctagtaatttttttttttttttgaaatggaccaagctcagtaatttagtcatcgtcagttcacatattttgatgggaaaaaaaaataaaacgaatacaaatggagacgaatttttagctgaacgggatatgagttagacctgggcttgggccataatcatagcataggcacatgccacattgacttacaataaaacgaaattcactttctgctatgtgatcctttaggcttactatttacgaatcaatggaattgccactcaccatatcgaaagtaggagcagaaggagcctctgttgattcttccagaaaggaagattcttttgtcgtcctcggccatagctctagccagaaaaagtaggacacaagcatgatttgtctttttatttttcataaattggtttgagttgatatttttttaaggaagattaaaacttattttaacttaacattattaaaaaccgcagcagaagcagtagtgctaatacttgttactacgaaggagaacgtcttacttggcttctccaatccattcaaaggttttatttctctctatttttttctttctcttttgagtttttctcaacaacgttatgtgtgtacggattaactctgcagaaagatagagttggtcagagctgatgcttctttacctgagaagatatggttcaaggttagcttcattcattcgtctctctctgtggttctatcgctctcttgttatgtttgtctttgagtttcttatcaatttggtttggcagcaacaattctcaattggggtcaatgaagttactcgtgtccttgaacgcatggccatgcctcacaactctaccacaaagattcagcttcaggttcattgtctctttctttagtttagttttgtttaccagtcaattctagcgagtaataacacactaataaattagaatataggcattgcttgttgcttctgactccaaccccagatggcttaccaagcatctccctagcctggccttgtcaaggaaggtaccactattcattctcaaagacaacaaacaagcttccttgagattaggtcaactcgtccaccttaagactgctattgttattggagttaaggtaataacaacaaattacataaaatcctactttcatacctttcttcctttctttctgtttttaaaactcataagatttctcaggacaaacacaattctatcaaccaactctttgcagaaattcttgccaatgatttcacaaatgcagaaactcaataagctgtcaaggacacaacacaaatgccatactcatgtttttgagattttgtaatataattttgtagattattgccaagaacaaaaggggaagcaactttacatataattctgtagattattgctcaagtattaactttttgtttccaatctattactttatgttcggcttgctctattatatagacaaatttgcctggtttacagaagttgcaagaatacatgatgaatgatcattttgtagaatatgacatagaaggaatagatcataaaatttatagtgaaggaatgggtttctgcatttgtgaaagtgtgaaaccactggcaagaattagtagagtttaacataaaaaaatttaaattgccaacctgaataatccacccaaattaaaccaaaagaattcgaccaaaatataacttgccaataaacctaaactaacccaactaacttgattaaaagtttttttttaatatttttattatatgttataatttataatttctatacatattttggaaaaagaaatataaaattcaaattatatttatatttatctcatagcagtcaatccaactaaatttgccttattacttcaattaattgaaaaaaaaaaaaactgtggtggttaactgttttaactaaaattaaattaaactttggattcaaactgttttaactaaattaaattaaacttgcttttgattcgtaaatagaagcctaaatgttagataatagtcctcttcgagacaggacaaatctccgaaatgcactcttcgagtcagtgccaaactcccaattgaaccaaagttctatttactc

SEQ ID NO: 162838 - DNA, 2637 bp, Cannabis sativa
ttcaaataatttgttatataagtgaattttttatacactagtaaaagtaactattttgaactttgtttatttaaaatttttcaaaattaattaggtgaatctcataactatttttttttaaaaaaaaaaaattccttgtatattttttggaaggtaatgtacaatacagcacaaacactagacctcttctatataatatgtaattaaaaatactaaacaataaaaggtttaggaatttgtaaatagtataataattaacaactacctagacttaattgttattttttatatgagaattactaaaaggtactattagtatttagtattgttttttggtgtcataccactattagtgtaattaaatagcgagtcttatctaatttaaaaataacttttagagaatatcgctaaccaattttaaagtactacctatgaaaggtactaagcaccactaatatccaatgttatttttatatttatattcaaggaattgatttgcaaaaaatagctacagtgatgaaattgtaaaaccctaattgatatactaactccattgaaaaaaaaaaaaagaaaagaacattatgtagggtagttaacttatgagataactcactttaatttgatcctgttttgaggcagtttttccggggaccaatatataggaacatagctaccttattttaatctcttttgttatgtggctgctgccattttatatgacagagattctcatgttgttgttttttttttttcgttctctttttttttattattattatttaggttaaaatgtaaacaaataattttccttctcaaataatgtaatgaacatcatgtgatcgcatgatcaccacatctaactttgtttggtgaattttttattgaattgggtaggaaaaaattgagtttattactttagtgtacttggggaattaatttgaaagtaataatctacctgctttcaatttttttgaataataatcttttaatatgaatatgatatagaatagaactgtatatgaactttaatattattactttaaataattttatataatgaatgaactaacttgaacaaaataaaggaaatgtttaaatgggtacagtgagtgactgtgtgtggcagtctggcttcaaatccaattaacaaacaaaacttcttcttttttagaaaataaaataataattaatttaataaatggaaaagcaacttcgtgaggctaacttgagttattaatttcaaagatggaccccaaatattttttttgccataatgtttggtgtaacacatttttgtcatctatatacaattgggcacactttgatcccaaacttagtttggatggaaagatgagttgcctaccaaacaaaagaatatatttatatataaacatatacaagttcaaggtaattatttagtcattgaacctataatataaagtcatttaaataaggatagggatccagaagaaaatctaagggacccaccacaaagggtattgcatgtgatgttggtggaggttgaatcaattaacatttaacaatttaagttagatcaataattagcttattgatagagtgagaagagaaccaatatacaataatattatttataaattttctttcttttatttaacattgtctttgatattaagaagaaaaaaaaaatatcttatggaagcttctaatgtctctacctaacacctttgaaaaagaaaaaaaaaagttgaaaagtgacccccttttattatttgtgggaagggccatttttttttcttttgtattttggatattgttttgaagtagctatcactattgtgttatctttctcatgcccatctatgtcttagattgctttttgggaatgcaattcatctctttcttctttgggagattcttttttagctattttgtcttcctccatgataattctcttttttttttctttaataaaaatacccattatttctaaacttaatataacattaggttggtaaaatccaatattttgtattattgttattgttatttatataataagattaggtggatcatggattaggacaagtctagttttagaaagcatggctcaattagattggtcgttctggtaagaccccagtgacataacaatcaattaattagaggtagatgaaattcggttgtggctatgacccattgacctataatttttggtcaaatcatgagcaaaaaagcatgaacactctaaactttaaattaaattaatttggtgtagacagttggatctgaaatattatcacttttttaggtctaaaataaaggtgcatttaagtgattagaaactgttgagattttgtgagcctaatcttttgagttcagttctgattttcaagatcttccctatattcattgtataattgttttggattgtttggttttttattattattatttttttcaataactacacaatttgtcttcggaattaagaaccctagctatatagatagagattcctcttcacaacaaaaagatttgcccttacattctttttatgctcatttagcccattggtcagtagaatgattatttgattatttaacaggtgcctaaatgagtgtttattattattattattgttattaggggattttt

SEQ ID NO: 162839 - DNA, 4567 bp, Cannabis sativa
ctcacattgaataataatggatcacaatggtatttttttttaaggagaattgttaaaagaaccctcctcagtatcttactgttattagtgtaattaaatatcagatctcatataacttaagaaaatagtttttagaaaatatcgttaactactcgtgaggtgtcacctataaaaggtgctaagcatcactggtatctaatagcaaagatcattcaactgaataacaaagtgattaaaatttatttttaaagttaacaaaaataaaaaaataaaaaaaaaataagaaaatgatataaaaagaagaatgttactccaataaaaaaaaacactacaaaactatggcaaacaaaaacaaacagtagaaaaaatgagtaaggttaaaattgtaaatcacattgaataattggtgcccaatgtaaatttctcatagtatgacccttacaggtccgtctttagtttgtattgggtctgtggaaaaattaaaaaacgagacttttactaagaaattggaacttcaaataagttttttaacagtttttttatcaaaaaaaaaaaatgccaatcttttattgactaaatgttgacaaaaaatattttttaaacaaagaaaattcttaaaaaaaagagactagaagatgatctctgacaaaggttctaatcttctcaccctaaagatagctctgaacccttataataatagaaaatttacacaaagtatctaaattcacacttttatcttttatattttttttgattgtttttaatgtttatatagggatatttttatgttgccgcaatacgtaagaacttataaacaacagtctgtttagaataatctaaaaataacggtatgtaaaaaagtgttaaaatgtcaaaaaaaaaaaaaaacaataataataaataaaataaaataatgttttgtaaaaaacttaaactttttgtagttttggatatttttaaataatccctataataattaaggatattttggttatatttaaaatgttggattagttgtgccgtccaactatgaatatttgaggtgaaagtctaaagtttaggtggagatattggggcgttataatttatcgttttggcctatatggtgaaatgttgatttttcatctctaaagatcaaattagattagccatttcaggtaagtgattattagtaacttgcatttcataaggtcaaatacaaataaaggctaggacttggaattgggaaatatcatttaaatgggtagagtcaactaaaaagataaaagaaaaatccattttaatggttgtgtatagaccaataagtcaaaatagacacttctcaattcatcaagatggaaaatattattatgatgagggccacatctttggcttagagtctacataaatttggtacaaagtaccataaggtaactaaaacttgatcaactcttttatgactattgtacgaaataatttagcagatcttgaagaaatatcttgggaggacaactttgttctacacagctcttgtccttgttcacttgatttaatctgacctcttacgcattcccatccttgattttgcaaacctagagttattgttaagaaaaagacctttaaacagtacttaccaagaagggaacaaagaaacaataagagatagtgaaagaaagaaggatactctaatcgcatgccttcaccggctggtgaagagtataaaactgtgccttgaagatgattaagggcctcggttgaacaagcagtatcctacatagatttagcggtttaatctttggtaaaatatccgaaaaatataattttgtatcaagaaaaactaaaaccacaaacgaaagatctagtacctcaaagtcaacaaatgcaactggagccccatacgtgccttgcatcttcactttcaagaacccggggaatctattagaaatgttgaaaacagaacaaaataacatcaggatctgagtccagtaaaaagcaatgatagaaaagatgaagatggagctagagctagagaagaatgtattaaccttgaaaatacatgaactagctcctgttcggtacaagatggccccaaattggccacaaaaagagttggacatggaggactactccgtgatgaatgtgatgcagaggaattatgctgtcagtgtaagagaacatatttattactcttctaaactagagatcatatcatgtaccaggtattccagtttaaggttaaattacagttataaataaattacaaaataactctaccgaatgtggaagaccaagatcatttacagctctgctgtccaaattcccttggctaaatggtttagcaaataaaaaataaataagtaattagtatttgttcaacgacattaaaaaaaactctgaaagatcaataatactttaacatcggggaacagggcacttagttacactatgcccttgacctttcagcttgaagtgataaacatatgtgcagaatataaaaatagatgtaatctcttctacatagtaaaaatgtgcttaagtagtgcagacgaccttggtgcagatgaataaccaatgttgtatgcagaattacccattccaggcatgtgcatgctgccaacacctgctagtgtccaagcgtgcaaaacatgtgcaatgtgagccttttaaaagaacgtgtcctccatgtgactaagtaacaatttcaactctaaccgataaatcactcatcaaataataaagtcaagcacatgaattgacagagggagagagttcgatgagagaagcactagtgaaaatttttactatgcgtagaaaaaataaggtaagaaaggtgcaagtaaagagatactagacactcacctaaatcagtagcccctcttggaaatggagaccctctagctctcttatctgagccaaatctttcatcatctacttaaaaagaacaagcaaaggcacacaggttagatagaaactagagaagcttcaaaataaattgaaactgaaaaaaaaaaaaaaaaaggtaacaaatccaaacaagaaaaatacctgctcttgatcgctttggtctagaatttgatttggctagatcaatgtaaagagtcgaccccttctcaagatcaaataccattccctagaaacagcgtttacgaatttcaatcaagggtcattatttttaatataaaatactatttgtaaagtgtctgccaagaaacttaattagatttaagtatacaatctgtatcctatttcatacactatttatcagacaaccgtttgaccaccccagatagataaactaactgagaacgatcctctacagctgtgattttccgtatttcatatacttatctactgcctccacaaacttgtcaacagtatccacaagagtgaaagtgtaaaatccaacgtcactttacagtaccaattgtcactagctaaacaaagtaagtctaacaattaatatgtggaaaaacatgtacaacatctattactagtgctgaacccattggtcaagccgataagttcaaaggcataaggcaaagccccttcatctttttaaaaatttcttaggactaactagcagtaatacattttagctatattcccaacatgttacctattataaattaaacaccaagatccccatcctgacttcgaatacaaacaaaattcccacaattgagcaccccaacatggtatcacgcattctatatcacaaaggtttctatcctgaaaacaagatgtcttacattaagcgcctgcattgctccgattgcagagttctgatccaaaaatacagcaaaagcaaatggctgccacatgaagaacagcatgtcagagcactaaccaatgaagactgcaaattaatggaatgtgaaaggttgaaataaataaatttatgaaatcatatacttccccattttctttcccaatgtggattaaatgggaagaaaaaaaaatcatttttctcctttctccccattatggattagtcaagtgagcataacttaaaaacgaactatttcaaaagatgaattggcaaagtgttgattctacctgagatgtttgggaagggtttcgaagatgagaagactcataacccggaaagtcacggaaaagattgtagatttcgcggggcttgacatctcccggaagcccggcaacgaagagggttcggacctcatcgtgggtggcagcagaagagagaagaggcggtggagcgtaggatgaataaggagattcatgatgaggaaagtagggaggaggcaagtggtggtgcgaaggcggaggcgccgccggatgaggtggtggtgggggttggtaatatgggtagtgagaggatgatggtggtggtggtggtgggggttgaggcggaggaggagggtagtaggcggccatatcgtccatgggaaacggaattgggggaagaaatgctgtagtgatttgagaattgggggaaagaatgaaaatagaaatagaaatggaatggaataaaatttaaaatgcttaaaaaaaaattgataaaaaaattattaaattttttttattgttatattggaatgaccattcttttctttttaaaatggaa

SEQ ID NO: 162840 - DNA, 1898 bp, Cannabis sativa
aactttttaactaaatataataaattttagtattaatttattatttagtatatatatatttatattatattgggtgttggggattcgaatttttgatatatttttttttttgtgagaagaagtgtgaattattaaactacacttatgaatacttttttttttttttttgatatatagtactaaaatattttgctaattaggatttttattcttgaattttaatatgcaccaaattatgttttttgaactttttaagtcgttaaaaattcttcctgaactactgagatggttggatttaaagactttttttttttaattttatttaaatttgttaatatgacgattgtccatatactaaattttatccctaaaaattttatatctaccaaattatatcttgacaatttaacatgtattaaattgtgctccttaaatttttacatacatcaaattttttttaataaaatttgacaaaagtgtttaaatttaatagttcgaaaaaaaattttaacgataatttaatacatatcaaaatttaaaagacaaaaatttaaattagtcaaaatatttataaaagtatgggaacatttgaaccacatgtaataaatttgatattaatgtttggagctaatattttactgcacatgcaacaacctaggcatatgcaggataaaatgatctaagtttgatgagttaatagtatatacgcaatatactcatcaaggcaatttattattttccttttttttttcatgtgtatatagaataataataggtcactaactaaaattaagattttttgtggaggaaatatatgcactagataataaataatcaatgttgttaacagtagctatctgatgtttctttctcataatttgggatcatgaataaaatgaggacatttggcgttataaatctgctttgcatgttattaagaatttttttttttaattttcttggagtaataaaaatatcaacactccttcaaaaaaaaaaaaaaaatcaacataataaagaatatataataaaaaaactgagagtagttaatacacaattttcaatgctaacataagcatcgggaaattatataagcatatctatggtttataattaaaatctaaatgttccacgtaaaagctacccctcacactcttttcactttcctctggacgaaaatctctgcactacaagaaatttgatttgtctgtggcaataattttggctacaaaattaatgagtcatgatacgataacaaactgaaaataatacaaaataaatatttgggtgacaggtttaataaatatattgtgttcatattatttgttttgcacttgtttaataatcgtacttgtcgtgtttgtatttactttaatcgtatcgttttatagtcttattgatacatttaataattatttcgtcttataattatattgacacgataggacgaattaattttcataagtattattaatttttttaaaaaaattatttatttagataatcgttgtgtgatatgcatattattatattaatttatataatataatatttaaattaaataattaaatattaaataatttagtacgaaaaataatatttgttaaattgtaacatataaataggaagttacaaatgcgtgaatgatgatctaaaaggagttaaaatcatatatattgatgattataataaaaagagtttttggcggctaaactctctcaactatcatttcacttgcatttaactctccaaacttaaattttggcggcaaaacccttcaaactactgaaccagtagcaaatttaaggtgtcattcgattaactgccactatggactgcttatatgcatactcttgtacatgtggtatgtttatattataccgaatatttaaaaaaaa

SEQ ID NO: 162841 - DNA, 1618 bp, Cannabis sativa
gcttgtttataactaaactattgtactgtaattgtatgtttgtgacctatgaccaaattagcaaactgtttaaacaaatgaacacaatgcaacaaaatgagaaaatttacaatagttcctataattcggaaaaattaaaaaaataaaattggcataaaagactatataaaaatatagtttagaataagctatttgtccaaaaataaataaataaatatatctcaactaattattcttcaaaaaaaaatatttagaagttggcataattaactcaactagggaaataaacaaatattaattatgaagaaatcttttaaaactttatgatttgaaggcttaaaaataaaactattttggcaggattcgttgatgggcataagtgatttgtccaatcaatttgattaggtacacaaaaacaaagaggatcgaataaaatgattttgattattttaacattaaaaaaagagaacataaaaacgaaagattttcgaaatagaatatatataattagaagattaaccactttaaaagacattaattagaagaaaccaaaagtggacacgcaaaaccggaacccagtgacccactgaaatagattaattaataaccccaaaaaccaaaaagtaaaagtgagtgaccaaagaaattaaggtttttgtccataatcaccaccattaaccaaataaaccattcttttgttgacaaagacttttgtttttgtcgtattaggagaaaacaaaaccaaacccacaaccagctaattttggttgaagaaaattttcacaataagacatgagaaaactatgacaatatcaacaagaaaacttttaatataatacaaaaataatggcaataataataaatgcataaataccaaagttaatatcttgggtagaagaggcagagagaaagatgaaaactatgcatatattattctaagcaaagggaaggtctacaaagtcaattaaaattaaaagacagggttctatgtctttgtctaaagcttagctgttcttaccacttagtgtccattaaaacattcaaaagcaataccaacaaagcttaatttgttttcaccaaaaaaaaatacaacaacaacaacaaagtttgtttatttttttttatttttttttttgtgtatttttttttgttttattttatggtgtggtgtgctgtggtcctttgagagcccctccaaattcacaaccactaaaaatgtaatgcaatcacgagttgacaacaatttaatcagactgatatataagaatagagaagtccaatgattcttgcttgtgtctccaattattgcttttcaaccaaaatttttgataactcttcttttgggtgaaatggaaatggattttttgtttttttggcctttgggaatttggtcatgttaggactgatcttgttatagtaccatttttgttttaacactatattttgtgtgtttatgtattatgtctaacaaaatccattttctcatacctctttctggtatggtagggacaaaaaataaagactaattggttaaaaatcagtttgcagaaaaataaagggcaataatcaaaatgacaaagtaatataatcacaaaaataaaaccttccaaaatattac

SEQ ID NO: 162842 - DNA, 2039 bp, Cannabis sativa
aatgaaatccttcattgttcatgttaattatattgccttaaggtaacaagtgtctttagtaatgggttgcaattttgatcaaatgttggtttgaattctgatttaagcaaacaaattcagagttgataatctgatgtgcttttgaaccccaagatgatgagatgcatgagtgttctgaaagtggtaacttagcatgttagtgactatcttatttatgaagcttgcaggccatgagctgtatgaggagtctctaccatcaggtgggatagttactggaataggtccagtgcatggaaaactttgtatgtttatggctaatgatcctactgtaaagggtggaacttattttccaataactgttaaaaaacatcttcgggcccaagaaattgctgctgagtgcaaattaccatgcatatatcttgttgatagtggaggagcctatcttcctaagcaagcagaggtctttcctgataaggataattttggtagaattttctacaatcaagctttaatgtctgctgccggcattcctcaagtagctttggtactaggctcttgtactgctgggggtgcttatataccttcaatggctgatgaaagtgtcatggtcaagggaaatggtaccatatttctagcaggacccccacttgtgaaggttgctcctgcccttctgaattttgaagtgcttcatctaattttgaaacatttttctcaatttcttcttgcttttagttgtttgttctatggatgttaaaattcataggaagcccaatttgatttgaaagattattttttaataggctgctactggagaagaaatatcagctgaggatttaggtggtgctgatgttcattgcaaaacatcaggagtttcagattattttgctcaaggtatattaaatcaatttgtttgcatattgcctctcacatgcgtttgcaatactgtcagttattgttttaagtaaattcaatttacactcatgaggacgtgcatctgcccatagacataatatcgttggctaagctgtgcatgagttgtgatgtgatattttgcatttatttttcttaacctatttgagagaaatctctttgtatctaggtgtacgctaagaggacaagaaattcacctattaattaatacatttatctttgttgcagatgagctgcatggacttgtcattggcaggaatatcgttaagaacttacacaccgctgggcagggacagtttcatagtggagaccaaaacataaatgttggatatgattcctatgaagaaccattgtatgatccaagtgaacttcgttctatagcaccagtagaccataagcagcaattcgatatccgatcaatcattgcccgtattgttgatgggagcaaatttgacgaattcaaaaaattatatggcactgtaagagcattactatcactacttttttctgcaaatatatttcctcatactatctataacatgtcattaaattgtatttcgacagacccttgtaacaggctttgctagaatttttggacagccagttggaataattggaaacaatggtatattgttcagtgagtctgctctgaaaggagctcattttattgagttatgcgctcaacgaaaaattcccttggtcttccttcaaaatatcaatggatttatggtacagtactttacttttgttactggttcgtgaattttcttttttattaatattatttcttccatggtcaatatatctgaataagggtaccaatttttcttaagcccattctagaatgaggaagaaatgcttgacaatttattgtttattaaaagagactatattttggggttgtgactatataaatacaaatatgtctgtatctgtcttaagtttcgtctaactagggaagaagcatataagggatagagtctcccagttgaaatgcccccttgtgaacttatctagggtatggttattctattttttttctttatctttttatcataagcacacttggtgcttaattgagactaagtctcaataccaagagatccaag

SEQ ID NO: 162843 - DNA, 3940 bp, Cannabis sativa
aaacagaactaacatgtaacagtaatagtaaaaattacatcacaaggctccacaatagcacaaaaaacaaatgcacatatatatacataacatacatttactgcagcactaatccgtagaatgctttgcttgtctttcttcttcttcagctttaatccaagctgcctatataaaagtacaaacaatttgtaactataggggggaaaaaacataacaatcaactctatctctaaacaaagaagatggcattttaccttttctcgttcaagttttgacaaatgcggcttcatggagttgcctaaactcaatccttcccatgcttcgtttaacttcttctcccttgcttctctacgagagacaaagcttttaatatggtcttcttctggtttgtgggcagcgttcaacttttccatttccagtcttgatttatgtttaaccattacttggtccaaaccaccagcttctgccatttttggattaacatttgccttgactttcataactttcatggatgcatcttcctctgaaacgagcttcattttctctttctcaagtctggaaacatgctttatcaatactttgtccaagctttcgtactctgggacaatatttcctctatgtttattctgaggtttatcatatctactgttaaccaaggcttgcatcttttccctttcaagcctgtgcactttcttgaccattaccttgtctaaaccatcttcactctctgtagttggagccttcgtattttgatcaacttcattttgctccaagctcacttcagcttccttatttaagtcagcattgtctttctccattagcccttcatcagaatcaggactagaacttctctccaactctactgtgactaaatcagaagaatttaatgttggatttgttgtactacttttttcatgcacgtcattttttcttctgttctttgcttcttggacctctttttccaatctcgatacatgtttcactaagaacttatcaaggctggggagttcggcgatatcttcttttacgcgactaatggctgctttgtttgatgcttctattcttctgctgcaatttctccttgcttcttcaacttccttttcaagtttagaagaacgcttaaccagcatacttcccaggtctggaatgacttcagatgaagttgtatcatctccacgtgaactcttgtgtcccattttacagtcttctgctgatcttttctcattaacaaatgatgaagtttcactattatttgaatcaactttctcatcagaaggactggcatgctccactgtacctacgttggaagccttttgtctgttattcctggcttcctgaacttctctttcaagcttagtcacgtgcttaactaaaaacttgtctaaactcgggagttcttgttccgcttgctttcttttggtattcccgtccttgaaagtttcaagctttccagctccccaagaagagagtcttcgctgcaatcctataccagaattggcagtagagactgagtcgtcctgcttgttgttttgtatttcagttaaggcagcatttaaaccacaagttgcaactatagtggcaagagaagaaagctcgttttcttgcagtctctgaagcctatcaaacatcatgttcacaagctttgtcatgctaagcttttcagacgacagtcttctcttacttttcctctgcctcaactttgaaactggcgtcttgcgatccaagtctggagatataccatcttttctagaagctgtttcaagttttgattcactttttggagaatcagactgttcctcgtcattctcattagtatctgggttctgactgatttttcgaagtagatctttgaattcatctttcttcatagaagggcagttagcaagcttcactaatgcagtttttaccgctgcagctacttcaatatcaacctcaaatgcagtttcaaaagaagctgtaacagcatgagtggttgatccttctctagaagaagaggtttctacatgacaagtcttccgagggcagtttggtatgtcgtacatgattactcctactgctaaggctgtttcaaatgcttcagctgcagacttctcggctttctccaattgtgcttcagcttctttacattggatcctgaataaacgaatgacaatgttaatcttagagcaaactatcaaatatccaatcctgatttctactaaaagctcacctagcagctttgagtattctacaccaagatgcttccactagtgcagcttttcgagcctcgattgccttatttgcagcttctttagcagccattttttctttaagtacccttgagtagtgtggattagaatcacctagagtttcatcgagtgtcaaattcatgccagatacttcctgtcataagtaatttcatcagttttctgtttataaaaaaaatataatgttaggcagaatggagatgcatatttacaaatataacctgcagcattttaatttttctatccaagtaagaatcgggtttcttgcgcgggaaccaattgataggcgaagcttttcggtgccctggcttcttaatttgtgaagtgaatttgctaagagaacccataattgattgactgttctctttgaaatgcttattctgcatttgttgacacaatatcgatgtgaaactaaaccgagatggataaataagactcaattcaaagggaaaaaactaggataacataatttataaaaatctagaactaaatcaagaacactaaatttcacagaaacttaaaaacgaacacaatatgatcaccaaacatataaggcctaaagttccaatgtcatgaatgtttcaaaatgcatcacaaagaatgaatacacaggagtcattcaaggctgaggatctgctactttcttcacttaagctagtggcttcgctatgatgaaattacgtttcacccaacaaaattgaggaattcaaaacctttaactgttgaaaacaaaactaaaactgaagcaatagaataagtacatcgaaaaccaccacataatctacaacgttattcaaatttcaatgttaaacatgctcaaaatcttggcacaaagatccgaatataaaccatatgcctaaagctcagtcattacttgctagggttctactaatggtttctgaattcagctagcctaaattccaaaaattaactcatacaagaactcaaagccacaaaatcggaaatgtaaaattcttaaacacttaacgagaaaaatcccaaaccaattagtttctcttaaaattattcacacatgtgtacatcaaattctaaataatcaaaagaacgaagaaaatcgaaagagaaaaaaaaaatcaacaaagaaaaccagtaatcagatccgagactctaaatttaaaaggaagaaggagaaaaagaaaacctttccaatctttgaagtggcggtaagaggttcggcggcgtcgttttccttgttatcagagtgaagagaagatactttatcagatacagaggtacaacccatgtctaagcagccaagatccatggcagaaaactggaacttgcttgcttccaggagaaagatgaagcgaatattgagggaactgaaaatgaagttgaaatttggaagtgaaaattaaatgtttaatcggaatttgggtgaaaaatcaattgtattgatttgataatgtatatattttgcaagtggtctcttgttattgttattgtatcggttttttttttttttttgaatggtaagtactaagtagccgttacaagtctcgtccctgtttgcctccaacggtcctataatcgtctgcgtcgagcttgcaaagattggagtcccattaactaatcgacattcgacacctgtaccttctggttttttttggtttttttttttttttttttgtatttggtatttaaagacgatgttatatagttttttagtgttt

SEQ ID NO: 162844 - DNA, 1908 bp, Cannabis sativa
  modified_base (1263)..(1270): a, c, t, g, unknown or other
ttttttttttttaaattaaaaatcgaattatttctcaattacgtttttagttaggatttatgtgtagctgttatgatatatatttttaatttatgtttagcatatgttaaaatgaatatgttctttgatttttttgtagtttattttaggttaacacttaattcatttttagttgtttttattaattttttttttcttttagcttgaaaactatatctacgtaattatgaaataaacaattgagttaataaaattaaaaaaaaaaaaaaaattaagtacaataaaaatgtaaaaataacataaattaagtatgaaaatgaatcatacttggtgtaaggaatcatgaccaaaaagctctctcagcatagcccagatcatggtcctcttacccgcacctgctggcccttgaaatatgaaatgtccacattctcccctttttgccttcatccatttacaaattaatattgaatattaattatcaagtaagtaattaattttaaaaaatatagttatatataaatattgatgattaccagaaggtggagctcatttgccttgttttgattacatatgaaatgttccaaagctttaggccgatacttgtcagcccattcaaatactctctttgcttcattggacaaaggaggctcacctggtcgtcctccttcataactctccctcaatggcttctttatctgatcaccaccaccattatcaatacccctactctccattattgacaacaacggagaaggtcggtcaacgacgacgtcgaccacaccaacactacttctacttgaatcttcagccgtactgtttgggggcaccaccggatcattctgataatcatcatcatcatcgttgtttttctcgctttccttcttggtggttgatgatgatgatgtttttgactgaaagcaggaatttcccagtgcttcttgaaccctgataaagatggtggaagcgaatgatgagctgctaaatgcatcaggagaagaaggtacggcataatgggtctggtcggcgggtattgaaggcgaggtgtttgctaaaagtcctctgtagtaaggactgtatcctttgcggttatttttttggttgtcatcataataatcgtagtagtcctcttcttctgctgctccatcatgagctttgaggttttctttagccttgtatctgcgctttccaaaggctaaacaaaatctcccaaaagattgaagaggacgatgatgatgatgatgagaattattattattattattnnnnnnnntattattattattattattgggttggaataggactttcttggatgacgatgacgatgatgatgattggtgcaggcgatcgcggtggctgtggtgacgccagcgcgatcgcctggtaccgagattggacaatttgggagagcaagataatgaagagaaggagggtggaatcgaaactgatctcggcattggatgatgatcagtataggaaggggggtgtagtagtatatgtaatactactgtttcatcataatgaataatattagagagaatagagatcagagatttattattttggcgaagaaagctaggaaaagaatggtcaattcgtagtacgtactgttattaatctaaattaagccgtccaggccaagagtttattcttgctttgcttctttcccacgtcacgtacatacatactgtataaatatacatacatacacaacacacacaacacaagagctattactattcatgtattatgactcatcactaattattataattcgtgctcttcaatttatcaatatagtttattatatgtatgggtgcacttttaatgggtattatttatgaatgggtaaaattagaaaatttgactttttatgcttaatttttctatctaattaaaaaaatatct

SEQ ID NO: 162845 - DNA, 2094 bp, Cannabis sativa
attttctaaggctcctctctttgctcctcttcttcttcccttgtactttttctctttcctatgtgatgataatgattacacttttgatcttgaaaattcaatttctcatcgcattaatgttctttctaatctccatttaatttttactgtgcatattttattacaattaatatggtttcaaggatctcttggtgtaaattacttacatcgtgtctccacagtaatttcaactgccatttctaaggttttgaggcatttgaggataaagattcctactcttgagatgtttagcctactctaggggagtactgagcaaatggttttaagattttcccactctgcgagaagtcccttattctctaggtattactctttcttcctcttgttggtctatataaagactatttcatttatgttttcggtattaaatctgtttttaccttttttagttatgtttctgggctcttaagtatgtcttcttcaagcgaaacttacctaaccttctcacactcgctgatgtggaaagttttgttcatgaatttgatcatgtctctttggggttctggaaaccattctgagtctctggttgtcaaaatcctctctcccaaagctttgaaacctgcattgattgaaaaagctatgaaagaagcttggactcttcactttcctataagtttttctgagtaccactctagtttgtttcatgccagttttagttgtgaaggtgatcgacgtagaattcttgaggagcagccttggcatttggatagatgcctaatgatcttttccaatttagaggattttgacacccttacccctaaccagctgcgctatgtcccactttggcttcaagcccataatatcccttttggccaaaaatcccccaagcttgcccaattttttctgatgaagttggagacctcattgaaatttatcctttgtctctgcttaaaaggtttggttcttaccttatgattaggatcctcttagacataactaaacctctgaggaggggaatgaatctccattcaggaaaaattctatcactaagtggttgagtttcaaatataaagggcaacaaatttttttctatttttgtggcttgctagaacatacttagaataagtgtggtgtatctcaagcattgtgacgattttaatgccccttctgctatgatataaagaaactcttcgagcccttgctagagctgcctttaaaaagaaccctttcaaggtgtctagctttcttcctttcgaagagtactttgggtagggttatgggtctgatcaagggctacaacaagttgttgatcagtttctcaatctatactctatttttatgggttctatggctgatcatgtttctcagccaaactaccagggtggtcaaagtagtcatctgaggcctcaacatggttttgatgatacgtctagggccttgtccacattgccttcatcccctatagtggttacttctgtgataactcatgttgacaaggggaagggtattgctcaacgtgacaaggggaagggtcttgctcatagtgagacttaaggcatgttattacaactatttttggcccctctagagggttgtctattcctggtttggttaagacagttgctgcttctgtggcgagagttaagagatccattgctagaaagaatgttcatgtgagaggtttagtctgaagtatgctcaagcgagctagggctggctaggaagatgatgctgtggtgcctattgttactatttggaatgatgcagcgggtgttgctatgcaaccttgccagaaaaaatgaatcttataagttggaatgctcatagtttggggattcctcgagcattctaaaatctctgtcttctagtgaaataacatcatcctattttgtgtttcattatggaatctaagctcaattaggctagggaatgaatatcaaaaatagattgtattttgataatgtctttgaagttccttagagaggtttagggggagggtcttttgcttttatggaaaatgttgtaaggattatttttttcaagttaatttaatttaatttaatttatttaaattatatatttaataatttatat

SEQ ID NO: 162846 - DNA, 1704 bp, Cannabis sativa
tatatatatatatatacatgatcagtgaatgtagtatatattcacaagaggagtgtatattaagatacgatttccatgggtatatgtgaattaatatggttaggtttttggtatagtagtagttctatatatatatatatttgccttttcgacaaggtgtgtagtgctctctaagttctagatcaaaatcgacagctgagcttccactaacaatatattcttaaagaagcagagctcccaaactataaattaatatgggattttctcgtgagagcccactgatgtatggcacgctcaggagcaataacctctacttcatcaaacacaaattaataatacttaaaaatcatcacaagagagagagagagagaagatacaaactaataatccatctatgttgtacaaacattttctctttcattactttgataaattagcacctttatatctataaatatatatactagttaaaccacatattataaattgtaatattgcagtgttataatagtaataatatatacaattttttaaccattcactaaaaaacaacactattttagttacaatataaattttttgtaactaaatgtaacttttagtcataacaaaaagctaattattacgaaaacgtaatattaaatacaatttgtcgttaatttacttttagtaataacaagtactatgtgactagaaccacattttaaaataaattgtgattttgtgattaatacttttagctattgactttttttaatcacaacataaaaatgataatttatcattagttacaactttttcacttttagtcacaagtttttgttgtgactaaaagcaaattttttgtagtgatttatttggtacaccatattaaattatattttattttacttatgtaaagtaagacaaagctcaaagacataaataactctttttaaacataatcttataaatgaagtatccaaaaattcatataaattaaaaaaaaaaaattcaaagtatgcacgtaattaaaatattaaagattacacgtcccaaaataattattcagaatgaatccaaaagtttcaataatttgaactttaaagattacatggaacttggcatgattctccagagggtgttcaaaaagctattctgagctattatgaaggattgcttggtactagtatgcaaaacatgaagagagtattgcaatcagtgattaatctggaccctaagattactgaagtgcatagaaatattctaatggcagaatacacagaacaagaagtgaaagaagctttgttttccattcctggtatcaaagcaccaggaccagatggatttggaagtgccttctatcatgataattgggcactggtgggaacaaaaattgttgaagctatcttatcttttcttagtactgggaaaatgttgaaggaaatcaacaccaccactattactctgattcctaaagctacctgtccaaaaagtgtggctgacttcaggccaatttcttgctgcaatgtcctctacaagactgccactaaggtgatctgcaacaggttaaggaagattttgcttgatcttattgctgattttgtccatggtaggtatataatttagtacaaaatgttagatttaaagatttttttctaattttaataaaaaaagtcttaacatagatgaaagttcagtaggcataatttagtacatgtcaaa

SEQ ID NO: 162847 - DNA, 5994 bp, Cannabis sativa
  modified_base (4937)..(4945): a, c, t, g, unknown or other
tgtgcaagatggaattgattttttttcttgccttattaggcataatgatatatttggttttacatttgcttgaagaagttatactgggtggctcggtatttatgaggtggatgtatccttttgagaggtacatgaaaaaggttaaaaaattatgtgggaaacaaggcacatcctgaagtgtccatcgccgaagtttatgtcgcagatgagacggtaaccttttgttcaatgtactttaaagggtgtgaaacaagatttaattgtctaaatcgaaacgaagatgtacatgctgtctctcgcactcttacattttttaattctcaatgtcatcccttgaccaaaggaattataaagccttttgatcataacaatcgtgaaaaacccgagtagtacatacttcagaattctccaaaaagacaagcttatttaaagtaagtttgttacctctcaatgataaactatcttaaatattaagtttttcttttctctctttctttatcataccttgacatctatcacatttaacagtgaacatttagagaagaagaatatcctaatagtaaccacaatattttgcatagaaaaactttttgcccgtgattttataaggtacaatgagagtagtttaaactcttattttgacaatatataatttttcgtattaatgcattttatgtatttagatatatcggttgcacaagcttggctctttacaaaatggtgatgaatttttttgctttagcatccaactcagattatttaacaactctctacaaatgttgtatagtgaatggtgttcgatttattacgatcgaaagaaatgaaaagcaaaacacacaaaaatagaggaattagtgttgctggaactgaaggatttaattattacgacacacttgaagatgtgataaccatatcttatactgatgcatatacagtaacattgtttgaatgcaagtggtataacacaaatccaataagaaaggaaataatcactgaaaataatataaccagtataaatatacagggattttagtatcaagatgagcaatacatacttactaactaagctaagcgagtttctattttcaagatccacttagaggttgtacttagaatgttgttgaagatgttaaccattgacaaatctgggattttagtatcaagatgagcaatacatacttgctaactaagctaatcaagttttctattttcaagatccacttagaggttgtacttagaatgttgttgaagatgttaaccattgaaaaatctgggatattgatgacaatgaagacaagatagatgttggtgttgtacatgatttgaactcgtcaaattttgtgttgccggttgatctcggcgagttgattttgcaatcggatgaaccagctgtaactgttgaacctaatagccaattagtggatgttgagggtgaaaacaatttatttgatgaatattactttgctcaagaaatcaatgacttactagttgaacttgttgagggtgaaaacgagaacttggtgaatgatggaaaagatagtgattcctctttgtagctttaattttatttttatttgtaataaaactctaatgattgaataagactatgtttttaatttgcatttatgtttgtgtcatcttttatttatctcatttgtatttcgcagattttttatttttgtaaaataattttcacatttatatattgttcttctccaaaataaagtacaatgtcagatgatatagcgacataccacggtggagatggtagtggtatggacccccctgatccttctaaagtactgtcgtcctgccaatcaggtttcatatttttgatctcaacagtattcttactataaatacatgattattttcaaatgtattaatagaatgattttttcctcaaacaaataaagcccagccaatgattagaaagggtcgtggccttgcttcaaacagtcaacttgaaaaatgctaataaaccattagaggttcaggtggatcttagtataggcaaagtagttgggactgaaaccagtgcttatgttcgatttatgggccagcaagtaaccatttttttgtccaagtcattattaaaaattttctgatgtaccccaacaatataaagatcaaatgattaatcgataagggtgagtgatttttaattatcaatggttttaattttttataaggtcatttaagaattactataaatccttatttttttatcatgcagttttattttaatattgatgggaatccctttcaagacctactaattgggactctatatacgaagatggcaaagaggtataatgagagaaagaccattagacataggtggtttaagcaatattactctaaatcggaagattgggagaaagttcttgacctgaccacttgaataaggagagttggaagtctatttgcaaattgttcattagcaaaaaatttatgaatccctcaaaaaaaaaaaaaataaagcaatagacaattgatgaaatattcaatgcaaggtagaagatcgatggcttctatacgtcacaactttgtaagtaataatatttatcatttatttttaagatataatttattttaaaacacatcatatactcttttatttatttatttttaaatagggtggtcctccagaagaacatgtggtcgatgcatggaaggtggctcatacgaaacaaccgtctagtcgttttgtcaatgaagtcgctgcagaagattttgtaagtaaataaaatattgtattgttaaattttaaatatttatcatttatttaagtaagaactttataagtaataatatttatcatttatttataaaatataatttattttaaaacacatcatatactcttttatttattatttttaaatagagtggtccaccagaagagcatgtggtcgatgcatggagggtggctcatgcgaaacaaccgtctagtggttttgtcaacgaagtcgctgcagaagattttgtaagtaaataaaatattgtattgttaaattttaaatattatattaattatatgttctaataatgtttatttaaatagaatgaactgtgtaaggagcttgataggaaacgactcgaaagacaatttcagagggatacatttggtactgaatctgatagtagttattaattctacgtacttgaaaaagttcttggcaaagacctgacaatcaaagaggcatgggctataggatcaaaggcgaataaaaaaaaaatcatacaatcaaagtcagtcagttgcgcctcctcctccccttaataaaatatataacactgtggcaaatatatttacaattatacgtgagacattagggagtagtctgacacctgaataatgtgccaatatatataacccacgatttgataactttattcaaatgtacagtcaatcgcaatctcctagtagtttgtcttctcagagttatgcgactcctccacaatatcaacatcagccttctccgcagcagaaacactagtctggccgtccgcagcagggaaatcggttcgtatatggaacccctttgctgtcttctctgctcggctcaaattttactaattttaggatatttgggatttctttgcaagagcaacaatattttttgacccctatactcaaccaagcttagttaggggaacttacacttagtttatcgtcaaatcaactatatgttccttctccaccacaaccattggaaccttccaataataacaatacgaatcaagactttttcttcagagaccttaatgatgatattatggaataattagtttaaatttgttaaactataaatattatgttaattttatttatttagtttaatttgagacattataatagtaaagaatattattagtgttaaattataatatttagacttggttaaattataattcaattttaatttaatttattatttatatatttatatttattaatttattttttatttttaaatctttactattaccgactggcattagcggtgaggcccactgctattgatagttattagcggcgagctcaaaatccgccgctaagaactatcattagcgtccaattattagcgacgggttataatagcggattcccatcgctaataatcaatagcagcagattttggaattattagcggcggaaagaacaatgtactcatactcaaactctcttttgtgttggttgattcatttattcataacattgaacaaatttcgccaagtcaaaatatgttagaaaagtcttacattaataagtataaacttatgaatattatgtataattagtagcagactcaggatataattatagggtggactaaataaaatttatattgaaatataaaataatgtttttaaaatatatattatattttttatttgaatttcggataaagttattatatatattggaacaaattttggcatctgaataataatatgagattttataattcttgttttttgttttttggagaaattacattgtatacccattttactatacttgttttaatttttacctttattttcgtatttttaagatatacctacttttatagatgatgttcccatataccctttaggttaatataaattatgtactagacttaagtggaagatgaggatatattggacaacccacctacaaaagtaggtacattttaatgaaatataatatgaaggtatttttgaataatagatacaaaaaaagaggtattcctcaacttatctttcattttttatgtgggaacttgtgttaattgtagattaaatataattcaaaataatttaataacataataatttttttccaacagaaatgttattagtagtttgaatgctccatgttaatattttgtagatttttttttcaaaagagtagatttacacacacatatttatatatatatatnnnnnnnnntatatatatatataaataaaagatagagctaagtgaatcatattcaaaaccaggtttaccaagtaacaaataaatacttacaccaattatattatgtgacaattgtgtgttattttttccattaaaaaaattatgtattatttctatctctaattttatattacttgttttgtaatttaagggctctccttaggctctatgtagttcgcctctgtgtataatatgatcatggataattttattgtacatcctttaagttatgtttggaagttagattttggtaagaaaaaaaaaaattgtaggaaaaatgtaagaaaaaaattgtgaagaacaaaaaaataaatcaatttttttaagtttaatatgaaaaattttgttgaattgagtgtttttctatacaatttttcatttcatacaaaatatgagaatttattatattttatttccacttttttttttttttatattttctctacatttttttttcctcttcgaaatccaactttcaaacatagccttaaagggtcatagtttagtatatattttatctgtttcgacatctatgagagttttttaatctatttttttcatgatcgtgtatgttgtaattatttaaaaccatatgtaaactttcacattattttgaatggtttacaatgtcgaaaatatgatttaaatattttattatgagcatgactatttttttatacgtacggtaattgtttgaacttttatttcagcattgtaagctatttagaattttataggtggtcctaagaaactacaacttagcaattataaaaaataaacattagactaaaaaactctcataggtaccgaaactaataaaaatgtaccacaaaacaaccatttagaaggtgtagtataaaattgtcttaagattactcattattagttaattttagggaaattaccccacatactatttcttttaacttttttttttttcaaatttacggcgtgggtttctaaagtagttgcagcgctagttgcaatagtgatttttatacgatttttgttgcgattta

SEQ ID NO: 162848 - DNA, 4464 bp, Cannabis sativa
ttatatttattgcaagaaagaaaatttctagaataaccgtcaatatatgaggatactgaaaaatttaatgttcgaactctcttgtgaatcattttatacaagatgttactatgttagaatctgagctatatatgttcgtttggaacaggttcaagtgatttatctccccattctctgacactactgagtggatttgttgctgtaatatcagtcaacatagttattgcattctatatatacatggcaatgaaggaaccttcagataaacacgaaccagatcctgcatttcttgcggcggccaaagctagcgtgaaccagtctggggatgactctggtaaaaaccagtcaggtgactccagtaaatcattgcaatcgtcaaaaaaacaagagtgacatgaactactctgtcattttcacattttagtattttctatttttgaactagagatttgcggtttatcatgtaacaaaatacctaaagcagatgaggcttacgagaattatattttatgtttattaaaaaaatatgaaattgattttgtaataaacaattaggaagtagaggaataagcaaaggtaagattttggttcacttgtatgtaaatacattttactagcaaagaaaatataatgtaaaatattttactgaactagaatatactacaatgtgatctaaaatgtgtaaaaatatatacatcgtagaattgttttagaatcaatgtaaatatattttggttaaatgaaaaatatatatattacaagcattggtataaactataaagcgctagtggtgcctagtgcatgggctcacctttttaggtagttgaatcactgtgcgacacattgacttttttaagctaaggtcagccttctaaccattcgagtgacaatgagtttatttttcacacggttcaactcctgccaagtcatgctagcaagcgttaatgagtattcatgcatcgaggctttctagtcaagatacttgcactatccataggttcccactatgataaggccaattccaacaccatcgctcacctagtcactcgtgaccaatgtagcatctttggcaagatgccaacactaaactaacgtgccaatgcttctaattatgtcccattcgatactattcgaaaaatcttcctcatcgcccaagaacttccatacgttcatggaccaatcctcaaggcaccatgcctccacgcatgttggcaggccctcgagacaagccaccaaactagtagcatacgttgaatctctgtctctttttcagcatggtgcatctgccccatgagcgcgtgtaaactagcccacgaataactacccgtgtcatctcttgttaagactcgtggccaggcgcaccataacgtctctcagaagttttagtccatgtctcgtgcaagcgacataccggcaaaccaatagaaacatacatgctaaactttggcaacatttttagatccgctatcaggtcggctagatagtgtccatgagtattccaacttatggagacatatgagtccccttgtggtcctcatatgcccgccctaccactgactactagtagttcacttagaactaaggtgacaatgggtggtggagagttgacaccagctactcccccttaaggagcattctaaacttttaacattctactaggaacatatataattttggtctatagacatatggtcatcaccatataccaaatcataaattttcttgaatccaattgcactattatattcataaacctaaataaatggcaaataccaagtctcgtcccaatttgaacaatattgaacatatttataaaaatgccactactatacaaactaagcattatcatgccaccagcatgcacaccaacatgcgtcactacttgaccaccacttggctaccttgtgggcatcacctagcttgtatcgtgccatcgtgggtagcacgttacaatctcccccactttaacatgttgatgccctcatcgacgaactgtaggcaaatcttcctgatctcaaatcctaagcttactctaagcttcttccgaatcctatgtctacacttgtctctctatctttatagttacatcctcttggtgacaatctccctcgcccactcttagagttaatcaaggaacctgcgccattgtcgttattcataatcacccatggagtagtccctccgcccttgaatacttactccaacatgaactcctctgagtctatcacaatgtccctccagttaactaagtagctcttgcaacattaactctgaagctaacacatcatctgatggtagttcactcgccaattgtccaatgcatactctttttaataaggactaagtatggtgcacccctcaaggtgaggctcacaaccaactgtatccaacaacacctacagaatacgcttccactgaagcaaagtttctctagaaaagtccctccaaaaacttcacaagccaactcattggcgcaccatcctcctaatggcaatcgaccaagacactcttagcgcaggacaaaatttgatatgcctcttttggacgaggctcgcaagccaactgcacccaatgcagcaccaagtgcactcttgcacacaatctcttcgcgaagtactcaatattgaccctctagcactaccacacacccatgacttcatacaaaaggccctctggccctctggcttctcctacactgtgtcacaagtctatctcccaaactcaaccctgcatcctctaacgacttgctaaattttgacaaacttgataacacgaagtcttactcttaagacttgaagtcatcccaatctgctatctcccatcagcatatgctttttgaaccattcgacttataatatcccatacaataccattattcccataaacgcaaatcacacccataacataccgcaaactagctcactcttgatctcagcctacatccatgcatattatctatatgtagcttgcagaaatcatgcaagtctttgcactaaacaatccatatgttgtaattttctctctggatccacacaccaaaactgaacaagtacctagattcttcaaacatatgaattagtgggctcccacttcaacttgggaagaaattttctcttagaggaatatctctcaaggtatagctcgcaagctaacttcatacttgcatacagtccctctattctaaatgtcactttgatgaagatgttaaactaatgcctcagtcattatgactctttgcccctcgatatttctatgttgccttagtgccttagtaccttagtcctgctgagtttcaccttaggccaatatagccatggtgttatcttagtacttgagtcttggtgactttcaccctagataacttgcactgcctatgttctgaattttcttgactttacatcctgaataactatccatctccatgataatcatctcgatgcttgaaatgaatatctagtctactgagtgaacagtgagggtctctcccccacttcatctgttggcgtcctcgacaacatgcccacacgtgaatacctaatttcccaactcttcatgctcaccataccatcaaaaagtgcatcccacaagatgtgactctcgagtcaactctctcatatagcaccccttttgatttctatatgcatgcactgtccactcaaccatccaactgattcccactagcatcacacccttccaggctcccttgatgtattaagttctaacgatgcaaccctctggccttcatgaaaactctagcacccctcctgagcttcgtaagctcacatgactactaagtgtcactggcacaaccctctgatctccactcaaactctagttccatcttagcgcttgtgcttagtcttcttatgccttctggcttctttgtgttgaaatttattttactaggatttagatttactaacaggtatgttttattatagactataatctaatatcctaaatatgattttcttaaaacaatgaaataaacacttaagagattaacaaatccttacattgatgatagcggaatataatgactcattctattcagatctctagcccttgattcctgtctgtagcagagcattatcaagatctgaacttggatcttctctccttcaatttggttagacacagtcttcctcactatgctaggtattgctttgacatgagtgagcacactctcaattcaccataggcttcgaattatttgaggaagaggaagagggaattcgaaatagatagtgactctctttctattttgtctaacaaaggataatagagtcatctaaaaataagagctatacttatctatttatagctttattgatccacctaggctgaacccttaatgggccttaagatttcaattttgccattttatttaactcatctttcttttcacaaatgccatattttaattctaactctataaatgtcaattctatctatttaataatt

SEQ ID NO: 162849 - DNA, 775 bp, Cannabis sativa
gggcataaaacccaacaatgtcccctttgtaataatctccacactagctaaaaatgttgatacatccatcccatactaaaccttctgccttaaaccccaaaattaatggattttgggtcccttcaaccttacccacgaacacgaatgggtcctcacctttttggttcaagagttaccacctttctttcaccatcgatgtttgcattatactttacaagtcaacccaattctaatacaacctcacaattctctaagttaagctcaaataaacaatcaagcattcctttttcttttctacagctcgggtagggatttaaaccacctactggaaaataactagttcctcaataaacaataaagtacaagaaccacttggtaacatattaactttatgcaaactttcaatcctccttctatgcaagttgctgtaactgtgagcagtttcttttgaaatggcctactaccccatattgaaagcaagctctcgagtagcatttactttgcttgggtgtcttgcatctcgatcctttggatgcattgcatttccaaatcttcatcccaatcacgtttgaaactttaactaccttaaattcttttactagggctcataactagtgggttgttagtcctttttgttgagatcattagagtcagcaccctcagcagtaagagtcagctcaaccagctgagcataaaactggacaactctcaattgtttaaccattatatccatagttcgagcgatatactctttccaccttcaattagatttaac

SEQ ID NO: 162850 - DNA, 901 bp, Cannabis sativa
ccttattaaagcggtggttaaagccattccaacgtatgcaatgtcttgttttcggttgtcaaagaagactattgcaagtatccatcgcatggctgcaagattttggtggggttcttcggataaggagaagaaaatacattggtgtaagtgggcacatttgtgcaaaccgaaggagaaggggggattgggctttcgggatttggggatgtttaatcaagcattactagctaaacaagtgtggcgatgcattcggtgcccggataacttgtgtagtagagtacttaaggcatcatattttccaactagaagtattctggaggctaagagtggtgcacatgcatcctttgtgtggcggagcttaatgtggggaaagaaggtgattgctaatggttataggtggagagttgggaatggggaaaaggttcgggtacttgaagatccttggcttccgcgaccggttactttcaagatctatgataagcgtcctcttccggggaacttgtatgttgcagacttgaagcgtggggatggttgttaggatgaaaattttgttcggtcagtttttaatgtggtagatgcggagctcattctttctatgcctagctcgggatgggatatagatgataaggtcatgtggcactatagcaagaacggcgaatatacagttaaaagcggctataagatggcgtcttctttggctactgaacaatatcagtcagatgatcaaagttatgtggactggtggaaagcattatggcgccttaaaattctgccaaaaatcaaacattttgtgtggaaacttgcatatgaaaaaccgtgttttcgcaaatgtcagttgtatataagaaaatataaaaactgtaatcgtttgcagcagcagaaagtaattctgctacaacaa

SEQ ID NO: 162851 - DNA, 2505 bp, Cannabis sativa
acatttcccttttcccttttttctttttattatatgtttaatttcttccgtttctttttgcacttatttattatcttattatggttccataagaaaacaaaaactaaaaacaataacttttagttagcttttagccaatgaaataaaaaatagactgacgtggttctgtgttggcattttgtaaaaagttttcgtttgatggggctaaggttcattaattggccaattagaatgttggttgttaatgtcttttggacttggcgtaatacataataaatagggatcaatttaatttatggttaagatttttatataataaggttcttgttgtggcaaacagtatattcacacatgtgatatgacttggttttttctttcgcatatatgcaaactttatttcacaattctatccaaattgccacaatatttatgtttagatagcgggaacaacatcaatgaaataagactttcttttaaaaaaaaaaaaacaataatattaataaaaaatattcccttctcaagttgatctgacttgagcgtattatttcatttgtcctttctattctttgtatacatattatattacatcaatatatattaattttataattatccctacaaaatctcatgcaatagtataatttgttaatgtaaatcagatcatatccttcctttataattcaattatgttataacatagactgaaaatctatcgtacattaggaaatcacaaccatacacacacaaaacatttgataaagccacatgtagtcaaggggtaacgttcttggcaaagtggggattaggttagctagcaggtggtggatcgaaccaaattccaaaaacaaaacaaaggggaatgatgatcacatggggtcagctaaatatttgactcatattgtcccgtggcaaccaagctgcagccaaattgttgagattgatagtatgaaagaaggtgcgattactaatgggcccctcaatctttattatctgagatatgtaccctgtagttacatcaacctttttccttttatttttcttttatttattttttatttcagtatttgacgaccgatgttaatgttataatcaaacaacaacaacaatattaaaagtagaattttgcaaaaaagatgaaaaaaaataatatgtatgtagtgcggtgcacatcagcttcccctattagaactaggatagagccccctcgattggaagtgggttccacggcatcactactaattttttctttcttacttcctttgttgacataaagttaacttggaaaaggacaaggactcaatactcatactcttcgccgcgtctatcttccacatgctaggtcaccatatattacttacattttttgagaggaaggcactagaggccatttagggatttaccatatcgagagctagtgttgtaaatacaggtcggattttttaacatgacacaaaattagtacgagcctgaaaagcacaaccacgaccagacataaaaaaatatgtttggagacgacacgacacgacacgtgctataaattggcatgacattgcacgagaagcacaaaaggtacgaccataagcatgaataaattagctcgaaaggcacgacatgtgacaagcccaaaaaaaatatgaaacgaaacattaaaaaccctataatttattattaataataatatatgtatttgtcaattataaataagttaaaataataataaaacttaaatataatattgaatattataattttataattaaaactattaaaaatgtaaaactaaactatattaattaatttatacaatgtgatataaaaatttgatattttataagtaaatatttaaattttaataattgtaattactttttatatgattctgtaaaattgtaacaccttactagtttaggcgcactacagtgagttttaatgtaatatcttgaaaattatgattatgttaaattggacatactttattcaatatgtaattatatgaatattaaggtacgattataatcttacttaagccaattatgaattaattagtaatttttgagaaaatgaataattaagcgtaatttattaattacaaaaattttatcggaacatgtggatattttatataccatttttaaaataaaataatttcgagttcggcgacagtggaaacttgataaaatgatcaaagatgttaggatggcaatagaatgaaatatattagaattatagcagactagtttagaataatgagttttcggtttaattggggtagctagtaataaccaaaatacccttaggttataaattaactaaagtatttattagaagggtaaaatagtcatttaattaggtttcaaattattttgtcctttatgatttttctaggttgaataaaggattattattagatttttttattattattttttattaatagatttaggtaattgaggataaataaaaaattaagaagattacatagcactactctctctctctctctct

SEQ ID NO: 162852 - DNA, 1810 bp, Cannabis sativa
attgatttgatttggttggtttccagttttttgacagaacctacatcaactggcttgaatgttgctctagaggcagttagtgagaaacctgatacacaagcctcagcaggtgaaggtctgaaagaggccagttatgcttttggtatcccagaagccgtagttgctcctcaattacattcaggttttctaaaaggcttgaagtacttgaacggttcttatacagctagtctttctccaatatgacttctgcttgaatagactcaccaactataaatgtatctactaaattttatgcgactgtattttacaattagaacctacttctatctgtactttggttaaatgtataatcctagttttttttggaagttttatgtgaccaatgatttgggttttatcagacactaagcctggattttggctggaaaatgctctacgcatgaacctcacatttgacaatacaatagcctgaactgaattgtacaataaaatgcgtttgcactgtttgttttttcgtcattatttcactttctgaactggcaagctgaatatgcaacttcattgtaatcgaaatgctcctggcacaaaagcttcttgtcccatatattgattgaaggctttaattttaatttttaattttacaagagagaaatgtcttacaaaattcgctaacatgaacacacgatgtaatggaaagaacatctgatgtaagcataagataagcactgaaataatttgaattttaagaatgtgttaaaacaattaaaatgtcaaaattggttgaaattcttaaagctggaggcagaataggggtggggatacaaaaattatgtctggttgcttggtcttgtggtaaactaataacccctagaaagagaacttgaaagcacctgcctttgaatcggtcacagaatcccagaatgagggtttcttctcttcggcccttttctcttctgctttcctcatcaattgatcaatagttccgggaaaggaagcctcaaaagtgttcttaaacttctcatacaaattcacccgatcttttgtcccagaaaccagttcactagcatttggtctctgaagaaaatccaacacattcaacaagttgctcctgcaacattaaagaaaataaagcaagggtaaatctttgtttcagtgtctaaaacagcaaatggtaaaagaaattctatacatacgaaacatagaaaagtaaacaattcattcagtaatatcaagcatatggcacttgtatgaaaagataaatcttcataaagattaagcttctaagcttgtatctactggggaacatataaattatgctttaatcatctccaactcattcttgtaatgttttggaactattaaatttaatataataataaaaaaacattactctctttagatgatgctcactcattttcttaagaaatgtatgtaatactagcaacactttcatcacagatacactattaaagataaacttatactaaaattgagtaatcttgaaactggataagaaaaatacctgctaacataattctgagtaatggcaactgattcttcaaggttaatcaccaaatgccaccatccattaggcacaaaaaccacttccccggctttacaaacacactctatgggtttctttttccatgttttggttgcaccataaaaattcataaaccactcaattatcgaaacagggcatgctacctcagcaccatcagggctggggtgcactcctggaggagtcacatcaggaggaaacaaaacccatttcttggaccctttaatcacagcattccatgctgatgtt

SEQ ID NO: 162853 - DNA, 1726 bp, Cannabis sativa
tgctcaagctggtgttcctgttatcaaattagcagttggagaacccgactttgatactccaactgtaatagtagaggtaccttatccatcccatgcctacaattattttagcggttttgtttttcaaaattttatgattttttttcaatgcttgaaactgtaaaattaggctgggataaatgcaattcgtgaagggcacacaaggtatacctcgaatgctggaactttagaagttcgagaagcaatatgtcataagcttaaaggttagcaattgcaattgtgatgaaacaaatattcagtattttcaccaaaggtttaatagttgatcaactttgcagaggaaaatgaaatttcttacagtcctgatcagattctagttagcaatggagccaagcaaagtactatacaagttgtgcttgcagtttgtgccccgggagacgaggtgaagtactttagtttgtgtttaatgttgttctattgtgattaatgtgaagagcttcttctgtattgtttatgtaaggaggagaatattgtgttttgttgtgattgtgaaattcatttcctattttagtttgtgtgatgtagaactaataagatagaaagaaaaaggaggaatttggatagagacagagtaatagacaaaaaaagttgaacttaagaaagagagggagataatcaaaagagaaaatagctaggtctatttaaattatttgttgatagacagttaagcataaataagtaacacaaagttagaaattgggtgcttggttatgttctttttaaccattataagaatgagaaaagtaaattattttgatggagccccttataacattatgcctatctttcgtttgctgcttacgaaatttggaaccatcaccaggaaattactgaaacatcaagtcttagcatcatttccatgtatgttttgtttatatgatgaataaaaagattgttatttgcatttaagtggtgaaatctatgtttcaggttataattccagctccatattatgtgagctacccagagatggcaaggctggctgacgcaacacctgtgattctgccaacaaagattgaggacaattttctgctggacccaaaggttcttgaatcccaaatcactgagaagtcaagactactgattctttgctctccatccaacccaacaggatctgtttactcgaagaaattgcttgaagagattgctaaaattgttgcaaagcatcccaggcttttggtacttcacaatagaccttttaaagatcgtactgaatgttcacacatcacctttcctcgtataaattctgaaacatatttggctgtcttctcaggttgtttcagatgaagtatatgaacacattatttataggccggcaactcatacaagctttgcatctctaccaggcatgtgggagaggacacttactgtcaatggcttttctaaggtaacatattatttcattttcgtattggccttgtctttcataaattcattcatgaaatgaatgcacttagtataattggccaagatataaaacaatggtcttggtcattgtaaaaaaacaacacactcttattgttgttatgaagtttgatttgtagaaaatgataatatgcaggcttttgctatgactggttggcgacttggatatgttgctggtcctaaacattttattacagaatgtgaaaagctacagagtcaggtatatattttgcatgtattg

SEQ ID NO: 162854 - DNA, 2711 bp, Cannabis sativa
aatagtcttaaactcattagttaattagctcaaatatattacaattgtaaaatttagggtcgttaatggctaagagatcttggtattgataagattcaaacttagaataacacacatatatattgtttatatatttaagaggatcatggactgaaatgaggttttctaatagacatgaaaatcttatagttattggtctctccataattacttaattattttcttatgtgtttatttgatcctattaatgctcaggtggtacatttgtataaaaggaagtgggttgaagaaactacttatcctcggtttactatgattgggcagagctttggttcggtttatctcgcttgggaagctttatgcagtttcacacctttgtattatgttgatactagtggatatgctttcacatatccagttgctcggatatttggttgcaaagttatctgctacacacattatcctacaattagtttagacatgctctcccgtgttcgtgaccgtagtttcatgtataataatgatgctgttgtcgctaagaggtttgatacgagtctttcttatgcactctcatctacttttgctcttgatttgatatttggtgaagatgttgacaatgataatttgataatgtaatttatactaaatcactattaataacatcttcattgcttacatggctggcttttacttgttaaatcttgtttgtgcattgtatttgtcatacaattaaacagcatgatgaagatggttatttggggaattgtatgatcagctttactgatttggaatggggtgaattgctctggaggttttttcccttcataaatgttagcttatagctgtctactcgtgtcaatcaactagcttttcttctttaacttaaagctcacaaatcttcccttactacagtgtttggttatcccgggtcaaaataatatattacaccatattcagctggatgtatggctttgttggatctcacgcccatcttgccatggtaaattcttcgtggactcagtctcatattcagaagctttggaagatcccagatcgtatcaagagagtttatcctccttgtgatacttctggacttcaggtttgtctagttatttcataaaaaggttcttattttcttgttcttcagtacactattgtctttacatctattttcctgtttatcttattgttgatgtttaaagcaaatacatttgggtttaactacttcttttaacaggcacttcccttagaaaggccgagtaagccaattaaaatcatatctgttgctcaatttcgtcctgaaaaggtgggcacataaaccttatgaacagaaggtactaatcttctggtcggttaattacgaggcctttccttgctgttcaaaccattttgacttaattattctgtttcaggcgcatacacttcaacttgaggccttttcagttgcacttggaaaattacaagccgacttcccaagacctaagcttcagtttgttggtagttgtcgaaataaatcagatgaggaaagactacaaaatttgaagactagagcgtgtgagctaaaggtggatgcagatgtggaattccataagaatgtcacgtataggtaagtaccaaagaggttttaatacatgcatgttttatatttaaagtgttgatttgcaaacatctataagctccgagtgcgtgccctgactgtaaaatccatgacaaaacatgtgatcaatatcaatatggtgccctttggtgacttgattacattggtttggttccaatgtaatcaagatattatgcttctgctgaaatagctgaatgtagtttttggtttttattcaattagttatatattttcttgcgtctttgtaactttatgactccctgttggacctgtgcgcttctccttctccgaattgattattattatttttatttctgcagggatctgatggaacttttgggaggtgccactgttggaatccactcaatgactgatgaacactttggcatcagtgttgtggagtatatggctgcaggtgccattccaattggtaggtttctcattctgaatattttatcatctgctttgactttcaagtgtattgacagacaaatacttggtttcactcgcttcagcgcataattctgctggtcccaagatggatattgttttagaagaagatagaaaacaaactggttttctcgcccgtagtgtggatgaatatgcagatgcaattataaatgtgattgaaatgccagagaccaagaggcttgagatggcatcagcagctagaagacgagctagcagattttcagagcagagattttatgaagacttcaaagctgcttttcgaccaattttaaatcatgcatccagttaacaaacacaaaaataatacaaatactcaaaaacttgttaaactcctttcaagattttgtaacaccaaatacttgtggttaagtttaagttccatatgggaaattgatttcttacacggtgtgtgtatactttgttttactagtttcaaagttgaaacttgaaactaacatacaagaaaatagagaaattaccatggtcaccttttgtcatttatgttttgatttaaaacttcaaatttgcttcaaacaacaagctctttgaagaagtgttgataaaattcctaattcaattactcaggtcttttggaagaaacgggggcttagccaatccaatc

SEQ ID NO: 162855 - DNA, 2141 bp, Cannabis sativa
tgtcctgatatcatataagcgagcttccctgttagacactttcgggtccaagaaaggtatttcgccttccatgtccgggaagttgaggcgagtatgaataggcttccgtgtatccttccttcgtgcatagcccccagttccaagaaacctttttgtgacagagcaatatcaaaggacttcaattaaggaaggattgaattatccctcctcattaaatgccacgggtcatgcttcgtaataatgcggatgacatttaaccccaagcttttaacataacgcggtccgggagcttgtagtactcctccgcttctttgtgacaaattcttgacacgtggtgctggtggggatcgtggatgaatcccatgagctgtcatcaaacaacgagtcattaaccgtagataacattggcgtggcacacatgcggcgcctttaaagcatttgttggccacacgcacgcgttgggagcacgttccttgggggaagttatagtgatggcaggatgattgaggtgatccctcttttaatacgtataagacacgagacgtgtaatgatggatattaaatgttcgggctaggcattaaatgctgccttttcaactccccattcatcagatcaaaagatgcttttttggaagaattgatctgggccgtttatttcaaattgctaaggtctcaattgaggtataaataggtttcaagagcttatttttctttttttcatcatctttaaccttcaaaagccctattgcaattttcaaaccagagctcgtattttccaaacactatcgctttaccatcaccattaacagtgaatgcaagaggctcttgactgtcccatccagtacttccttaacctttcttcatttcatcatcccaacactgaacccataaatccaaacttgcttcaccaccagccagacgagaacttcgacgtttaggccaattacgaccacgtgatcgatttggttcaacactcttgggaaaatttgtacgaaaaaccttctatcatccacccaaacatcaagtaagtgccctaacactctattgactttatgctatttcatatctaggatataaatgttaagttcaagcaaggtctaggacatactatgtgtttgaatggctgcatgctgcttatcgaaacatgtttccaaggttgggttgtgtatgagtctcctgcgccacaagtgtccatactaagtagctagttaaggtatagtcatcagtaacttgtaaactttgcatgtcgataggattttagaattagggttgaatggtagtttatggattcttgagggtacacccaaaaagttcatgcctttatgtctgtaaggagttcttaggactctctaatggcctttgttttttggaactgtttacatcagtgtcatttttggttgtgtcccctaggttcccgacaggtttctttgcctaagagcgaagtttttgacggggacctctccaagcaatttttaggggaggccttccctgatacccattttgtcatttaaatagtgggtatttaattgattgacgtttatcttactttctttttccagtgatggatttgaatgaagagtttcatcttgacgcagtggaaatcaaagacaactctaccatcgtccatgtcgaaggaacttccattgagggaactcaggggggagttcctgcatgggaactttagttggctgccatcttggaggtcattatagaggttatttagggagaggccttggaaactattcaggaggaggctccatttgggaccccaaaaaaatccaagagaaaagggaaagctaaggtctcgcttgctactcaggaagtgaatgattccatctagtagatggatcaaaaggagatctacttccattcatacaggatgctcgagtcgtatgctactagagctgaactactcaacgttctaggattaatgtggcaccggatggccactccggaggaatctgcgtctgtgagaacaacaggttccaatgcttggagttggtcctatattcaaagcgacgcacacctcctgcttaggacatactttgcagagctcatcgctcgcatcattgccccatttagttaatacatgttcggttttatgccctaaaaaaactccatttcaatgtaatccattttat

SEQ ID NO: 162856 - DNA, 4988 bp, Cannabis sativa
cttcttctttttttttttaaatttgggaaggaggatttgggggagattgccttacttaatttttgagcaattgatgcagcctcagcaacacggctatcatcagaaaatagcggagaaagttccatcaggtcacccgggctgccattgaactccatcaagtactgaagcattgaattacaagaaaatgttaaatcattctaaatgaaaagtagcatgcaccatgatcattttacaacagaaaatacctttattagttctattgtctgactagcagtttccctctgagaatctgcactctgacaccagatacacacacaaaaagaaaacatgaatagcaacaactttaacagaaacgaacactgctaagaaaaatttatatgtacatagtaattccactcgggacatatctcacctgcaaatgatctccaattttagcagccgtctgtccaacacttgaaatacgtgaatctaatcttgcaaagctatcaaacaagccatctacacctttttctagctgataaataatgcataagattagcttactgaattttgattaattattcaaatccaccgaattccctttcaaactattattagttattggaaatgtttttttgagcccataactaacctcagtgagtgttttccggtgcttagaatcttgtgaagaaacctccttcttaagactattaagtcgtccatcaatctttggggcaaaaaattatatatcaagctcagcaagataccactacaacttttttattccaccacttttgcagtctcaaagtcatacctgtttccgaagatcaaccaattccttacaagaatctttgaacaaagataagagcttatccacttcaggaaatagtgggccagacactccttgtgctgatttggctgcatctggtggccctcgtaaatgaccatttgccaatgcatcactcccgttgatgttgctatgtccttcagatggatctgtatcttcttcttggaaagagggaaggagatcattcaccaagtttccaaacaatgcatcaaaagaaaagtccccctgcaatcgattaaaaataaattatcttaaaattattggagactagtcttttaaaaaaatcaaaacacccaaacgtagcaaatatcaaagctaaaaaaacgtaactttcagtccgttttaccttgaaatcttctatgtccaatatgagaggcagagagttgacagatgaagattttgagagcttatcattcttaaatccatcattgctctctttcatctacttcaaccacaaacaataaacgaattcaacaatttttttaagataaaacaaaaacaattactgcaaaaagattaacaaaaactattgcttggaaaactgaaatcagaactataaacctaggcatgaagtcaacccaagattaactaatatgagctaaaagcataaatgaagttgcatctacaataaaatatcaacctgtgcatctacagcaaaacatcaatctgtgcatgtttactaaaccgctagggatttccattcctatgttcaaacctcaactaagattaacaaatcatgtgtaaacgttgatatgggtcctctgaataaacaatttaaagccaatgctgtacctaaaccttagataattttattaataaactgaggatagtgaaacctaaaaccaaaattcattgagttcaaaaaataaaaacataaagtactattaatttgagagtgaaaagttcataatttcttttaaaaatgcgttctttattctacaaatcaaaccagaatacactcaaataacataatgcaatttaacaaaatatagaaacaaaattagtacggtaataccccgctgagttgagttaataactccactctcattgtcctattactttcgtctgtttccacaatttaaatatatatatcatgattctatcatccactaaaaccatactctaattcccacaaaaagtaactattccaaatcaaaccacctgaaattcgataaattaaaaactctactccatccaaatcttttcaaagcttaatcgaaattcaagaattatattaagcaaaacacagaatgaacttttggaataaaagttcttcggaaaccgatcttggggaacaaaaatggaaaagggtataaatggaaaccagacctctttcttcgaataaatagagcaaaggcgcggaggaggaggaggaggagaaggtagaaagaatagagagtagcagagttcggctcttcaatcttcttcgtcttcggtttggttgggtcagatcgaagtgatggagaaggagagatcttcaacgacgaatacaatgaaagatcttttagcatagttagccctctaatttgtgttaaattgataagcggtccttcaaatataccatcaccttttctttgaaaaaaattaataaattaccgataaactttttattttcttattttgataaatgacataataaaatttatattttttaaaatagtaaaaatagtattttaagtttaaattttagtaattttatttattaatataactaactttaacaccatttctaacacaaataaatacaagaaatataaacatttttataataacatctctaaatcagattattattaaattttattttgacaataaatcggttcagaatcctatttgtacaattttaaaaaatataaagtctattttgttattgaacaaaacagataattcaattggtaacttttgcaaaacacatagtccaaaatagtatttaccttaataataataatactgcgtacaatttattacaaattgtacaaaaacaaattaacgaaaattaaacagatgtatttttattttattttttttaaacaaaactttcaatacaaacaagcaacactaaggcacatctgctatcaaattagcagcagcacaatccggcaaattgtttgtccaaacaaaagacctttgagtcaaatgagcccacttagctaaacaattagcaactttattacactttctcgggtaaaaaataaagtctaagtacttgaatttgtttctcaaaatgctaatctcctgcaccagaagaccccaatctgattgagtctgcaaacctgccaccagagttgtaattacagcttgacaatcagaagccagatgaacactcgaaaaggaccaacgcaaagccaagctgataccaatttagatcgccacagccccagtcagcaacaccgagagacaacgaggaagaaacttagtttcagccaccaccaagacaccttcatggttctttatgactgcacctagaccacaacccagagtgccccgtaaaagagaagcatcagtattgatgaggaacaaaccagtgggaggaagcgtacaagtcttcaagtcctgggattgcttggaattttttacagtcaagacacaacccaaatgaacatccaggatctccattgcccaagtaatccggtaatgatcatccggtgctttgtgttggaagacaaattgatttctccgttgccaaaccagccaagaaaccccaataaatggaacatttcttctttggacagttgctcaaccaacagaagaaggaagttaagagccttatgcatagtagaagaaataaaattggagaagccaaactgattccatatattttgcaccttaagacattgccataaagcatgacaaatactctcttcctgaaccttgcaccaatcacagagaatgtccatggacataccccatttgacgagctccacctttgtcataatccaatggctggacaccctcaaaataaagttcttcatttttggagtgagacgagaccccaaacaaatttccaccaagctcttaaggttgtattgttagaacagtcagttatatccgaattgctaaaacgtaatttatacccactcgtaactgaatactaaccattgggagtcaagctccaagagaccgaatccgacctattaatcatggggatgatgcctaacacctaagagatatcatcttgatggaacaaactcataacctcattaatcttccaattccttcattattcaacaaagcatggatagtaactccttccggaagcttaaccttagtatggagggtgaaaggagagcttttaggaatccaattatggtcttcattaattcgaatactgcgcccatctccaacacactagcgagaacctttgaccaaaagctcccttccccataatattccatgccaaattgtcgagccaaagtggcccaaactagcctaaaaaaagtaccattaggatagtaaagcgcctttcatcactctatccaaaagacagttgggcatagcaagcaacttccattcttgtttagccaaaagtgcctggttaaaatcttctaaatcacgaaatctgatactcccttgctcttttagcctacatagcttcctataattactccaatgaagtttatgtttttagtagaagatccccaccaaaagcgagcaatcatactttcaatgtcatggagaattccttttgtaatttggatgcaactcgtgaggtaacacggcaaagcttgaatcattgccttaagtaattaccaacaataattccgtaaattatttattgtttacgtggtgggatgtaactattcctatattaaaatcatcgttttgaagaatatgttgcaataatattatttttttaattaaaataattaatggtgtaattatagtttttttaaaattgtaagaaaagagaaatagagatagataaaaaaaaataattaaaacttaataagtcacctataaaaaaatgtggcaaaaattcaaaagaaagaaatgaactgagggctaatatatatttggcacaacactaatagtaataggtaatatagtttatttttttttttattttcatcaattaaaataacaaaatatctaatgtttcagattttatacacttaaatactttatctttatttttagaggcaaaaatacttaatgttacaat

SEQ ID NO: 162857 - DNA, 922 bp, Cannabis sativa
ccgccgttagtttcagggtttttggctgtggcgtttgtgatggctactggcttgtggctgttcttaccggctcttatgagattagaagccgatgtaatggcttatagagaaatgattgcgtttattgacttcatcaaaagcgttagcaatattgagctgagaatggacaaagttattattgtattctcagcccttcgatcatcctgattattatatgtttgcgtattctttctttcatatttttataataacatataatgttttgattgattaaatagatattataattcttttgttaaaacatttaattaagtgtaggactttactattgttgtataattaaatgtaaatgtaacaaaatattaaagtgagacaaactgagtttcgtccaagcacacaatacctgaaaaattatcaaaaaaaaaataatatgtaaatataattaagttgcgcatgtttgatttgatttgattttatgagttagaataatgattattttagggagcttgtgtgttgacaatggaggttacatgagagagacgattaatggtatatatatatatttggaacctagctagtactatttaattattgtataaataagaatacgagcaaggtgttaattactattctatcgctatactatagatcatgaccttaaattttgccctaattttattaggatccctagtccagtccacggtgaagatttttcttgatgtatagaacctccgttaaacacacacacaatgagtcaatttggaaaggattatagtaatatatagtacacaatgggtgcttcactctctatttgtttcggtattcgtgagaatttttgttcactataaaaaattattacttttagttacaattttttagtcataattttttttttttttgactaaatatgacttttagtcac

SEQ ID NO: 162858 - DNA, 2929 bp, Cannabis sativa
  modified_base (2766)..(2776): a, c, t, g, unknown or other
atatatgcatttttgttaattaataattataattatatatttaattactattttttaaaacatttatttgaagtctacaacatgtgtttttattattcttatgttttttcttgttcagatattatctttcactttcttatttttttttttaaaaaaaattattattcttttaccagtcaatctaattttttgtatttttggttagtaattattattttttataacttactcatgttttgaaacttattcactaacatgttgtgcttgatttttcaaatctagatttcatatgttttttgtcgttccttttttcttcttgggcgttttttttttcttaaaactagttaccgactgttttgttttctgaatggttactaattactatgaagtttctatttcttttcttcttattcagtaaccaataactttaaagcattgaaaatattggtaattagttactgatatattaataagctattgtttagttgctgtgaagatttttgtttttgctagtctttctgatttagtttataggttactagcttacatattgtctaattactacaaaaattagcgaacaatctatatctcattactgaaaatatagttaccagctacgattaagttactagttaaacaactattatatattaatacattttgtttaattattgtgaagatttttgttttctagtctttatggtttagtttctagattactaatgtttttatagtggctaggggttactagattacctacgtgttgtccaattactaaaaataaaagattagtaagtaccaatgaaaagattagttaattataaattgtgtaatatataaacgtttaaaaaacaaaaaaattaattatgattttactttttatttttactgcaaactaataagggttggcaaaatgttttaattaaaacatgtacactatcaatattatcagcaaagttgatatgatttctttatatgacatcataattaatgagtataaacacttgttatttgcccttaataatgtgactcttaataatgtgactgttatttttattaaacgatctgtaaataaaaaattttaaagatggttgtactattaataggaattctatctctgctaatttattatctttacttttgaaggatgtttgaagttgatctctttctcaaaaaaaaaaaaataaataaataaataaaataactagttactactctgaagaaattgaaagaacttacttagtaactgattactttgctatgatttttagttttaaaaaaaaaaataattttaaaaatgaaaattcaaacccaaaaattgattaggattattatggatgaatcttgctatatttttagctagcaagagtaaaatgaagaatgatgggattaacagttagtaagttaccctcttattgagtatggattagattttacttttaggtaaagtttagatgagcatgaatatgaaattattgtaaaacttattggaaagatccatataaaatgttaatgttaaaaggaaatcccatagaaaagctaatttatcaacatcctgcatatttcgaaatggttgctgttttttatggaaaaaatcccccaaagaaagaaacaaaggtagttttgaaaaaatatctcaataaaactacgaactagtgtgatattactcgaaatgggccaatgtgcatgccaaattgtagtctagttaggtaggcctctcatagaaggcccatccaagtttactaagcaaaataaggcaattttcattttttatggtttttaaagtataagtttgcaaacatataattttttttttcttaaaaaagttattttataagaatttttttttaaaaaaaaaaatttaaaaaatatgaaaaaaaaaacatcactagttacttgattacctccttatggtaactggttaccctttggttaccctttggttagccttatctgttttttctataatttttaactttttctttaattttccataaaataatttttttgaaaaaaaaactatatttttgcacaaatataaaaactcataaattttataatcatgttggctaatttacaacggtgttaagtaggggtgcacacagggcagagaatttatagggagtgctctcccagtctccattcccgttaaggattttaatccccatccttgccccatccccacttattccctatcggggatgggacaggaatctcttaataggacggggatggggtgaaatcccctaatagaaaaataaagtatattttaaaaatttcaatgtataaaattattaaattacctaaaaattaaaatattacacaatatttattattcaatatactaattaatatgcaaaaacacaacttaaaaaattataaaaataacactaatatgctaaaaaaatacaaacacatattataaaatataaaaatattagtaagaagataattaacaaattaaacgggttcccgtcggggcggggagtgtcatccccatccctgccccgtttaatatttggggacaaaaaataatcctcgtccccctcccgttctccatttagacgagaaattccagctccattaggggacaaaaactaatccccgccccttccttgtccttctcgttctccatttagacgagaaatccccatccccttccctatcctgatcatgaacttaagaaaagttaaaactgttaactgaaatttacatgtttgatagctattctaaagtgattaagggtggaccatcctatggtcattnnnnnnnnnnngtgtttgttttaacaaatactacttttctaagaatttgactaaatctgaaaacagagttgtaaagtagaggagatattttcaattccaaagtgttctatcatcttattttatataagatggtcccaatgcctcagttttcttgacacaaccga

SEQ ID NO: 162859 - DNA, 2172 bp, Cannabis sativa
  modified_base (2141)..(2146): a, c, t, g, unknown or other
aaccttctgtaatataaatttttgggtaaacattttaactccataaaaataaaaatagtttatctatatatttacatatttttatgtctatctccaaaaaatttatattttttatttttatcatcacaattttttttgttaaaaattatattttttttcattaatacttcatttttttacccactaaattattcaggtggctcggccacttcttatgggggctatagcccttgttattcatgttttcgaaagaggaacacatgtacttccaagacctaaattcaatcaacaaaggtccagttgtgggtccagtcaggataatagattaaacttagtaagttgggccatccgagttctgaaagaacatctcatccatgtgagagaagggcctagtagagagagcattcggatacctttcggcaatgcttcctaaacggtaattaaatagatctccgaatgttaaggctaatatgatgctcatttaatattgaatctcatcatattaggactttgtccccaaagtcaaatctggaaaccatgcgaaccataaaaagaaatatagtaattgtgcaacgactgttaaattttctttattacatgcgaaggtggtatacgttctccacctatcactataaagtggttaccatgtgtacagataatcattgcctcacggtttgggcctcactgaatgaacctaatgtcaatatattaattgtattcaccccattagtggaccatatttacatagaaaccctagcctataaatataatgaaaccccttaatgcaaaaggtcagaaattaaattcttacaagctaaggctaaagttagggtttgtaaactagacaataacacttgtgtaatactcgaaggcttttctagccaaataatattgactcgtagactagagtttgttaacactcgaaccatataaaattactcgtcttgatatttatattttatttattttctttagcttttattttattttaaatgggattctaaaaaactcagtaaaaattttggtacttttattgagaactgaggaaatttgatattgatgttgtatactgcaacaattgtaaccactagaaccaccatcaccaaacctgcttctcgtgatggggataccaccatggatgatgttaatcctcctcccactacacatgaaaatacgggtgttgttggggatggagagatgtcagaagtaagttgtcaccctgccaagaaaaattagcaacgtgagaaatacgttgatgaagatcccattgatgaggaggatcaggaggaataagaggatgatcctaaggatgatggttataacaagaatgatgaggagtattattacgagcaagatcccaaagtaattcgaaaggctcaagaactcattgagaccaaaaaaaaaactggtggagcatgaagaattctcttgccaaatgcgagaaaccttagcacaattataggccatgatcgagcttgaaaatgaagttccccaggaaaatttcctgacgagcctactttaaaagaaaataataccacaaaaaaggataattctacagatccaggaacttctgctcctgtaagggttaaaagaaaggtatcatggaggaacctacaaacaagactgctcctaatgctccaaggaatattaagaacgcagccaactaacttatgtaaataaagaaggccgccaatgtaacgcgctaacccttagggacatcacgtgcttttataaattagtttataataataaactaatagtttaataaaataagtgatttaaattaaaaaatttactaattatgttaaaatataataaacatggcattaggttttagttttggggatcccctctaaaattttataaaatttgtcatactttattgcatcaaagtacattttgtacctcaaaagtgccataaaataaaatctagtcccaacaacttgacattgctagccaaataagttgatatatacatttgtcagggaagatctctatttcatgactaatatactttgtcctatttcttacctgcaccataaaatacccgtgagtcataaagactcagcaagaaaagcaacatgtaggcacatacaaatatgatcaagtaaacccatacttttgttaggttttatgccctnnnnnnaactccatttcaatgtaatctatttt

SEQ ID NO: 162860 - DNA, 1593 bp, Cannabis sativa
cgaaccccaccggaggaaaatcgtacttacgatccgatacgacacagaaagggagtcgttttgttaggaagggaactcgttgggttgtgagttgggctttgaatgaagtttccgagttgagttggtgtaacccggccgagtcgagttttgggatgagtgagagacgtgagagagctataacggaagtgtttaggtctcctaatccgaaacggtcgttaagtccgccgtaacttgacccgggtgggaccgtgtaatgacccggtatgaagtttttcgggtggagcggaccgttccagtacccgtcaactcgggttcggattatccaatcgtatgtgaagttttgttggttttggtagttttggattagtgttaaacatccttctaccaagttgaaatactgtaagagaccctgtttggatttttcgaaatttcaaattaggaaaatgacaaaattcaaaaaaatttaaaaatttaaccaaacaagataagaattaaataaattttgagtacttaatagatggaataataattcaagtaaactcgtattaaaagagtaatgataggttaacatataatttcaactaattaattatttgtagttaagataatatatttgtgtgtaaattatgtatgcagagtaattaagttgaaatttgaaattttcaatgataaattaaatggtgtattttaaaattgtataaaataatttaatttaaaggtgtgatgacaagattatatttttttatctgtttgtactaaaattatatttaaattaattatattaaaaaaattatcataaaattaaactaagagtgttattttatactaattttaaaaaaaaaataatttattatttaataaaatagttgatctaatagtaacttttaacaataataacaataatgtaatttaagaataaaaaaattaaaataataataaagaagaacaataacatgtggtgtggtgaacattcaaatatttcatttaaaatcaaatcctcgtgtattttatgagccaacagccttacggaacatgaatattatattttagaatacacaaacaaagacttttgacttttctaatattaaatgaactgtccaaatatgaccattttttttttttttgcttaaaatttatttatttataaaccagtcactaaccttataatagtgttttatgatgtggtccatgtggattaaaaactaaaaaatataaataaaaaaaaaaaaaaaacaactagtgcactctcgaatgcatataatttatattatactttttaatattaagaaattaaattatatcaaatataaaaaaaaaaaataaataaataatctaattacacatatataaaataaaatttacaaaatataaataactatagttaatatcataataagaaaactattttttttatgttttaattttttacactttattattatttttttgaaaaacctattttttttatataaatttaaaatattagctaaatatcaatgtctttaaatactaactgattttttagggtaaatactattttagactctgtattttgcaaaagttacagattggaccttgtattttgttaaatga

SEQ ID NO: 162861 - DNA, 5871 bp, Cannabis sativa
aaactcaaactttaaaaacacacaataaaattagaaccgagaacttaacacacacatcagaataaaaattaaaccataaatgaggatttatgctactatttttcgaatttcgatatttattagcaataaatttaatattttaagtatttatattataaattttttaatagcaaagttaaaattttaatataattttattaagtaattattattaatcaaaatacataatttattttttatatataatttgagatattttatatatctgtcgcgaagcgcgagatgtttactagtttatctaataatgaatagaaaattcaatatatatgtccactatatatacatactatttcaatactttttttaatatatatacataagtattactttttttaaatattgtttacacaaaattttatatttatatatgtctatttaaatttatggctattttagttattataatttaaagaaaactatgtttataataaatctacaataaaaaagtgtaagattgttaagaaaattttaattctaacaaatatttttatatcatttaaatttataaattttatattatatagtaaaagaataatatatgcttatagggtaaaaaaaaaagattacttggtttgtaataaatattaagctcatttgtatttgtgctaattataaaatatataaattcatcactgatactatattgcaaaaattataattaactaagtataaatatatttatttctattattacaaatggtaaatatcattacaaaagttattaatttactacttcattttcttaaatgataattattttttttataaattagaaggaggatttaaattgtttctttcaattaaaaatagaatctaaatagtattttttttttaaaaaaaaacaaaaaaaaactacatcaccagtcacaagcataatttattaaatttagaaactattatttttttataaaaacacatgcaatttttttgttctaccatttttaatatatatttttttttttatgaaattgctatcattctattttaaaatagcaaattatgtttctaatttcaatactacgactttgtttataatatacacaacaaaatattatattttaaattatatcactaaataagtacaatatatatatatttatgaaaatattataaaatttgggtaacactacgtaaagcgcggcttaattctctagttatatagatatatcaaaatagataaacaagttctttccatttcagaggttgagactaaatgtatgttaggtctaaatgggtgttagtatagtattggtataagtgaaggggttgataatgcaaattatctttatttatttagatcatacatagtacctagtacagaagaattctacagttagtattcttatgaccgaaaagtataaacaatcttgtcttgacagatttcaggtcttcaagacaaatttagcacatacaaactaacatgtatgtcttattgttcttaattgattactagacccttcttatcttatgtctctcctctttcttgaacttcaactagggtagaccacaactttttaattagagcaaaatgatccgttttctcatgtataaataaatgtctttcttttttgttcagaaaaaaaaatatctctcttctgaataatgttgcaaagaataagaaaaaggtggtagaagattataatgttacataggaaaggggattatcatttattcaaggaattatttttgttaatgatcaattttagaataagaaatatttaaataaatgggaaaattatgtcaaaaaatttaaatttaaatttaaatatctttagaaggaggtggagaaagggaaaaaaaaataaagaggtggctaaactcatgtagatcatttttcccttactcattagtcacattaaaacgtccctcacttgaattaatatacatgtatccctctttaatatggatctataaactgacttttttattaactgtttaacattcttatgtaggaactaggaatatctttattggaactttgcattggattgttctttataatcaagatgttcaggtgggcacaacctatcataaagtattacaagtaccacaaagaacttgaagaaagcatgagaaatctcaagaccattttagaaggtttatatataaaaaaagatgatatagaacaaagattacacactaagcagatctctgaacacgaacaagaagctaaggaatggttaaaagaagttgaaaatgtcacaaatgaaattcattccattgagcaaaaacttggagcaaagaaacaatatctctcgcgtgtatgtcttggaaaacttgttgatgaaaaaactacaaaagtaaaggaacttctccatagaggaagtctctatgaatcccttgagaagtttttcaagtacatcattcttggaggcggtgtctcagctggttatgcagcaagagaattcgccagagaaggacttaaaagaggtgatttggcaatcatttctaaagagccagtggccccttatgagcgtcctgcccttagcaagggttacttgtctccagaaagtccctcgaggcttcctgtttttcatgtttgtgtgggaagtggagggcagagattgcttcctgaatggtatagagaaaatgggatctcattgctccttaacacacaagtagtcaatgcagatttgtctatgaaagctctcaccacatcaacagggagaatcttcaagtatgagaccttaatcattgctactggttcaacagcagtgaacttaacagattttggtgtagaaggagctgatgcaaaaaatatcttctacttgagagatattggtgatgctgaaaagcttgtagaaggtattagatcaaaaagaaagggaaaagcagtcattgttggagggggatacattggtcttgaagttggagcagccttgagaatcaacaacttagatgtcaccatggtttatcgcgaagcatggtgtatgagtaggcttttcacattagaaatagcagctttctatgagagttactataccaacaaaggaattaaactcgtaaagggtacttcagcaattggcttcaatttaaagtcaagaagtggagaggtcaaaggagtgagattgaaggatggtaaggttttgcaggctgatattgttgtagttggcattggtggaaggcctcttacttcattgttcaaaggacagattgaagaagacaaaggaggtattaagacagatgagtttttcagaacaagcttttcggatgtgtatgctattggagatgtagctactttccccatgaaaatatacaacgagatgaggagagttcagcatgttgaccatgctagaaagtcagctgagcaagctgtgaaagccatcaaagctggtgaacgtggggtatacattgaagagtatgactaccttcctttgttctattcaagggtttttgatctatcatggaagttttatggagataatattggcgaaactgtgatttttggggaccctgatcctttgtctaaaaagcccaagtttggatcctactggattcaaagtggcaaagttaagggagcgttcttggagggggggactaatgaagaaaatgaagctattgccaaaattacaaggctccaacctacaatagtggatttagaagaactagcaaaggaaggtctctcctatgccttaaaattatctatagttcaaaactcaattctatagattattagagtggatttagtgtctatgaaattagtggcttcagcttccttaccttgttctttgtttcttttcaaagtgttgtgtgtgtgtttttcttattatgagcttgggaatcagttcatacaattttatctatttgacaataatttgtgcttgcggttctatgtgtatctttttttttttagtatttttcttttgtatgagaaatggaagctttgtccaacaatttcttgaaaaaaagaaaatattagctattttcattttagtggacttatatttttaattttgtatgtaattttcaattttgtaagcaacagggtcggtcctaaaatttagtgggccttaaaaaaatattttgggcccttagttagaactaaatgttgtatttttttaaaataagttaaaaaaaatatataattttaaaagggagatttttttggggctcctaggctaagtaggccctaggcacaggcctaacccacctataccaagggacgggcctcgtaagcaaaattcataaataccagtctttgatattaagaaccaaagttttaacattttaatgtattacacttagaaataaggactttttttctattataataaaacaaaggaaaaaaattacaataatacattgggccgactattataacaattatacaacccacataaataaaattataagaatactttttacacataatttcaagccgcacaacacatgaaccacgcttctcatcctcgaagccaccgtgtgatcaaacgagggtgacaacagcaaatcaacccattcgattgatgattcaccattaattccagcaacgtgacctgagaagaagaagaaattaattagaaaatcaatcattgctgattggtaagaaaaaatatgcatataaactggtttgaacacaaattcaaccatcaattacgattcaaattctacaaaactaatcctccattcacattatagattcaaaaaaatgtaggcctgaactaacaatttttggagttctcgactaattcaaaatagatataatttataatacatgtatcaatacattagataatatcataattgttgcattgcagttgtttttttagattttcaatcttgtaattattcaatactaatcatgacaatgataagaaattcacattcatctagcgctacagatctagaaatattgatttaaatttttgtttctttaaattttcattacagttggctttctgttttattcacacactgataattgaaggcaacgctctcctaaaatacaatatataacatggtcagtattttttatttttttcatcgactttatttaacgttggtttatagtattctaacatttatttatccaccaaattttttttgacatacaactaattgttaatcagtgtgttattctaatttttatccacatgacgtggcatgtccatgtagacaagaccgaggccacatggaatatagtatgtcaataggtgagcaaagtcaccatgcataacacatcaattgataaggatttcgaattcttaggcaagatcaagttgcaagaaaatggccagccatgagggtctggccggaccacaccctgaccggccaaggataactatgtgtcggccagccccaaatagaaggtaggtcatccaacatatataaagagcatcaccggaagcctgattgagtggtggggtccacatccatcctcctagatgggtcacgactcagtttcagctatgaaacggctccaagaacccacaaaagttgggattcaaccccaaactatctacctatctttttggaaaattaattagttatttttgtaacttaaatatatgataaaaggctgatgttccctagttttaagggatatttacttacttgaatatagatcttttgtaaagctctagagcactctcacacgccattacccaagccttagacacttagtctattttctcatctcacttgctcagtatctgtcatacataagttctcaccattaattggaacattcaaaaagaacaaaagatagaaattatatggtaaatgtaacgtccccgcttcaagcttccattgggtctttacacccacaaaataatggctcttatacatgagtatgtcactatggctgcttca

SEQ ID NO: 162862 - DNA, 1582 bp, Cannabis sativa
aaaaaaaaaaaaaaacatatggattcaaccgccggcgacttctccccttctctctctctctctaaaaatttatacacaaaacttagtaaatcttagcacaatttcaactcatttcaacccatttaaccacaacaaaggaagcttatcggttttaacttttatctatgagctactaaagttaatccaaaagtataggaaagcgatctccgttacactaacctttacagccaaagtctgtaacgagaatattccgggggcgtcaaccccattcagataagctttcacctccggtataccggaacctgcagccgccggtgctactaaggccgtcagtgtagacgcaaacagagtaagcaccaaattggaagcgaaaaacacaaaaaaccccatcctatacctacaaaagtcaagagaacaaagttcagtaatggagattctttctatttttctcacctaagtttccagggaaacaaagcaagactagctttactttttacctatgctgtaacatcatgttagaggtaatgacaaacttaacgccagcgagattctcaacggcgaggttattgcaaaatccgatcaggctaacagttaatccgatgaggaagcaagtgagccacttcatgaatatgtactgacatatttgactttttccacgactcctccaatcttgcttgaagaactcgttctcgaaaatcctgattcacaaaaccaaagcaaaacaacataaataagcaatccctctcatcatctcaatccagcacaaattttagaaagaaaaaaaaaaaaagcgcagaagagtaaggaggaatttatactcgtaatcgaggctctcgatagggcagacatgagaaccaactatggcgacctgagaactcgaattggggatcgatctctggctaaggccggaggagagtaagggaatggaaagagattcacggtcacgatcgtactcctgttgattctccgccggagcatgctccagtgcattggccatggcggctttaccggttgaattgaattcagtcaatggcaaagcttgagttagttatggtactttatacatggaagagaaatggatatagaaatggttggcaatctccggattcgagaatcttagcaagagaacagttgactgtttcttcactcatttcttactttatgtttttccttttcttcctcttttggagaaatgctaactgccatattaaggtgcgaaccacacaacacctgctggcatacctttacaacaatgagtggatttgtaattgtaacctcacttctataattagtagtatttacccattcacttttagtaagcactcgacactagtggtatctatcacctctagacgtgtcgtcttattattggttagcgaaactttctaaaaatactaaaagtcaccagtagtgcctagtgtcacgggcccaccttttcaggcagcggaacacctgtgcggcaccttggcttttctaagccaaggtcagccttcaaaatctgagtaacaatatgctcattttttgcgcgactgtgtgcctcatgcacacttccgtctctcgaacaactcccgccgagtcatgc

SEQ ID NO: 162863 - DNA, 3157 bp, Cannabis sativa
ttttgttcaaagacaaaacggagtagttttgactctactgactttgaaaagtcaggaacagggaaatgtcgaaattgaccttggttttaaaactgattatttgatgttggtgtagggccaagttggaaaagatttaaaatttcctacaataactttttgttgtgactaaaaagttgttactataaaagtaattatattgtagtgcaattataagatgatacaaaggtattagagtaccactggtgtacaataacaatactccaaaaattttctcaataattataatactttgcagtaaattaattaatagcaatatttattttttacatcgatatatggtaatgatacctaaatttgttaaaaaatatatatgcttgttcatgacaagctaatttggcaccataacgcgtatataatatttcaaaaatgtggaaagtagttactggcttactaaggggattgggcatgttgatcccctagagggtgccataacgtgttggattataagaattttcgagagaatatttaaatggaagatgatacatattttatctcaatttatatgatttgtgacttgtataaaataatgggattatatctctatttatagaactctcgatgaacttatgcctacaacttagttcgccggtgtaaatacttttgccggcgcatcttctgaagtcacaaaatgtgcccgtcaaaattatgctggcgagttacattaattacttttgtcggcgaatttagtcgccggtaaaacatttttttcttgtagtggatgaaggtttcttggaacagttagatgcctccctataacattttccttacaaaattggttgaattgttctatacaaaactctaacccattatctatttctttataactttctctcagtttgagtttcaatcatcactttcagttctttaaacttgttaagtgattcatatttatttttcaagataaaaatccaaacatgtctggaaaaatcatcaatgaattttaagaaataccttgctcctcctctggatatagtccttgatgggtccctaaacatctaagtgaaggtagtccacaatgcttctggttttgtgctttccagttccaaatttaacctttgtagcctttcccatgatgcattgctcacataaagcgaactctttgatctgatctttaccaaacacccctttcttgctaagaactttgacaccacaatgactaatatgtccaaatcttctgtgccacttgagagtcgtactatctgtagttgtcatgattgaattgaattgaacctttgttgtacatccttacaacacatagataccattgtcaatagtagctttcatcacaatcattggtcatttaatcacctttaacaatcccttctcaatgttgacgttgaatccttcatggttaagcattggcattggaatcaaggttctcttaagatctgtaacatgtctaacatgtcttagttctacagtgtttctatcatcgagctgcaacttaattattccaatgccttgtatggaacatgaatgattatcccctaacttgactgtgctactggtaactcgaaaattgacttttatctagatagttgtggaatgagcagtatccgtacattatccttgttgtttcttggtaatcataagaacacttgcactgtcataaccatcgctactatcaccatttgagactacacaagcatctccatcttttttcaagttgtaattcttgagaattggacaatctcttctcaaatgtgatggcttgttgcagatataacacctcctcttaatctttgaatttgccttccctttgcttgaactattttgtgccttgttctccttcttttggagttttccacggactagtaaaccatccccagtattctctcctaaaatctcagatttcctcttaacatctgtcgacattaaagcattaacaacttaccatatatcatggtgtctacaaaatgcacatactggtctgaaggcaacgaattcaaaacaatgatggcttggtcttcatcctcgatcttgattcttatgttctccaaatcaagaaggatcttgtttaaatcatccaaataatctttaacatttttccctgatatcattcaaaaggagtacaacttttatttcaagaacaatcagtttgcaagagatttaaccatgtacaggttttctagcttgagtcacacacttgctgctgttgtttcttcggtcacttccttgagaactcgatcaccaaggctgagaatgatcgcactatgttctttctcaagaacctcttttttctctttctcgaacagagttgtaggaagtttagcttctcctaacagagcatattgcaaatcttgctgacccaacaatgctcgcatcttgattctccataacctgaaattgttcttaccatgcagtaaacttttccaaatcaaactttgtgtttcccatcaactaagaacttcttctttgaaacttgattcaaacgatcttcaggaatcctccttagctttgataccacttgttggaaatgtcagctttgatccacatcaatactagaattctcaatacataaccaagaacacaatgcacacactcagtcacatataaacttaaggtgacaaagatagagaattgaaatgtagagttttattgattatagttacaacacttgttggaattacatgaatggaaactatttttaagtttccaaataagcatatgtcactaattgacttaacagtaaaaatagttaagtcttaactaattaacagaacacttgcactgagtacaagtaggtgtgtgtatgtgtatattacaagggcaaacaaatacaacaattatattgtggacattgtctcacatggaatagatggtagagtattaagccatatataagaacatgggatcacttatcattaattggttttaagatggaaccttaatatggtatcagagccatatcttatgcgaggatgtgatcctgcacgatttgtacctatacagatagtgactatgtctactctaatacggttcaagattggtgagaaaaaaatagacaccatcttgagggggaatattgtggatattatccaagaataaatgttaggtcatttttagtattaattttagattaagtttagtatatttt

SEQ ID NO: 162864 - DNA, 1937 bp, Cannabis sativa
gttggaaaatattaaaacaatttttatttttcattacgaaaaattgtaaactttacaataattatattttttttaataaataataataaaaatacaaaatatagtattttaaaaaaataaatttaagatttttttgttaaatgatttttttttggggctgaggcttaagccataaactcttgctgcaccaaccttgagtagactgttcagaatatttattattattatattttataaaaaaaataatattttttaaataaaaattaaaaaaaaaaaaattactaatatttaaattgtaaaatgttcatcaaatttgcaatactataattcttcacaattacaaaagtagaaagttatataattaaaaaaatataggtaaattgcataaataaataattaacaatcatttaattttataaaattaattatacatatttattaaataataataaaaaaatgttaaactaataatttatctaatactttggatggagagagataagaggaaatgataaattcatttgtttggcagaggaattgaaggagacgtagtaaatccactcaaacctcccatttaattaaaatcctttagtaagtgaaggattagcactctccctcttcaattttttaaaattacgaaaaataaagatattgtaatttcataaataaataatcatctatccttttattaatccatcccatctctcttaccaaacaagttggtaacataaaaacagaaaattattactttttttttttcacttcctttacattttccattcttattattctctttccatcttaccaaacttattagactaattaagatatatgtaccaaatcgtgtcctccaaacattttaggtcattaacatttctttttgagtactattgagattattaaattcaaagacgttcttctaaatttactaaacgcctaacgtggatgaaagcttaggtaatacgctttgatacatgtcaaagttcaaagggcacaatttaatacatatcaaaatttaggggcacaattcagtacatgaacaatcaatagttagtaatattgaacgaaattgaacataagtctttaaatctaaaatctcaatagatcagggctatttttaaatgtctgaaaaatttgaacatgatttattacatgttaaaatttgagggacaaaaattctaatttgccaacttattaatatttaaaaaaattatataataatatatatgaggataaatgtggtaaaaaaatatatttagtatttatttatttttaaatactatcatatatcacttaacttaattttaaataaaataattaatgttaaattgttaatttcaaaatattgtgttaaattcaacaaaaagtctttaattaccttatggatacttcttttttagcttgttcacatgcttatttggtaaacggatgtttaccccagtgctttgtagtcttgccttaacttttcttttaatatatttgtagcaatatttttagtatattttttaaattatggattaaatttagcacaatttttaatactatacaaatatttattttgtaaaatatactatatttcagcaatttttatatatttggcacttcatgaaaaataatattcttatgaccggccgctaatataatctttatggattatatatttatgttattcaatggggattgaaagaaattaaaaacatgtagctaagcacattcgtcacattcaatgtgtactaaacttggcatggagacagtactgctgaaaccaaagcaattatctcattaatgatggatggtactgtcggtgttgaaaacttgaaaaaaaagtgacaaactttctctttgtgtaggggtgttcattggatcacatccaatgtttttaggcctatccagatccgattcaatcatatattagatgttagattttaccatccgat

SEQ ID NO: 162865 - DNA, 2359 bp, Cannabis sativa
aaaaaaaaataaaaaaacttaataaaaggtcggctggaggctcatggctgagcaccacctgatggagaggaaggacccgcgttggacatctgctccacaacttccatataaaggtcgtgaacggacttcatgttcttgatgaagcaggcttggcaggcactctcctccttcaactgtttattggcctatagcaggcccttaatctggaacttggtgtccatgagctcatcctagaaggtctccttggcagcgcccaggtcacggtttgatgccctgacccgctctaattctgtcaccagcgcgccaacctccatggtggccctttctgccagcaaggctgcctgataagaaataaagccaagttaataggttgaaacaccaaaatggaggatagagaaaaataaaaatcaagcctcctgaagacttagcccaatggcttgacgttttgcgaaatgagacagcgcaaaagcattcgtgctgttgtaggctgcccaggtctttgtgggcagttcaaaggcactcctggccacttggtccaagaggtctgtgacgaagggagtggcctcttgccctagcttgtaggtcagccggttctcctaggccttaacctttacaatttgccccgtcgggggcatgagatgcatatcctccgtaagctccaccttgtggactgttgacatcacggtcgcctgccggtggatttgtagcctcttcgtctccagacgccctcttagggcccgatttgcctctttctccctctacatttcaagagggttgaagggaaccgccctcctagggaaggcaaaccccacaataggcattctagatggagtcgtggggagggccctgggctagcccagcctcagttaggcgtaagggggccaagggtgatcccccgatccccccatgccaaagtctattaccacgagtttttgcctctacctggtagaggaactgcgttctgccgccttagagggaccaacctatttaggagaagacatggtgtacctgtccacggattagcacaacaaaaagagaagggtcactgcttaacccgatcattcccaagaatgacgccaatgggaatcagtgtcccaaagtgaatacaccattgtggttccctcaaaaactttcaagtaaacaaagaacttaccagttgatgaggtaggcaatttcagtgtggcgtccttggcaaaaaaccagtgtccaatgaccgcagcatttgaatgtgactaggaaaaagggaacttggatggttatgacttgatgggcaagaacagtgaaaaatgggttgactgttgttaatatttatgggacgatgggaaggggcacatttcacacaaagtagaagcttcggtttgccccaagagatgtccaatgatcggatgtgagaaattgaaagaatacctcacttcccaacagacggctcctatcattacatgcatcgtagaaaacgctcgaagaaaaaactaccgaagtccaatcgctgccattttgagtttcccagagatacgcacccagcacgcgtgaaggagtccaaaagtcagcatttaaaactctgacaaaaaaatgggaggaatcatgcctcccacataatgacgcttcgatttgacggctgctgacataggcttgtcaaaaaatccacgtgcgcgaaagatctcccagaagaagatactataagctcccggaccatggcatgtctcggaagctcggggggaaatgctatccgcatttttgccagcatgacatgtggaaattaatcaagaaaaagtcaagaaatcattaaggttgcccaagtgcctcggtccgtgctctgagaaggtacgagccctaatatcgcggaacaaattcccgcacgagaagctttcccagatgcgagccccatggaagacgcctgtgagccagagactcactcgactatagaagctgggaccctatgctcctgcaaggagaatggatcttcaaccaaggaatgctagcccgggatacaccttaaacacgcagaagcttcgcgcaggcatcacagactaatgacccaatggcagagctctttttggtacgatgtcagaagttatcccccacgccatgccaccatgcaatgcatgcttgtccttgtgtactatgcaatacgatccaacgactagggactaaggtaatccgaatgagaatatccctagagtgacacgcgtccaaagcaccgccagtatagccaatacaatcttacatcggtaaaggccacatggataatataccacctacctgttggaaatattttaccaggatctacatttactacaaagtatgttttattaacatcctaatatgaagtctaaaacaatgaaaataaacacataagagt

SEQ ID NO: 162866 - DNA, 1257 bp, Cannabis sativa
gagagagagagagagagaaagtaactattaactcaataatatagatttattagtgaaatactaactgaagtcttcatctctagatctctaaagcagaagcatgtcaatagcttaacaaaaatatataattgtgatgagacaatgtgtatttatagagttatggagaggacctagtaacaaaattctagttggttgggtctcctaatcaaagacttcaactaactagaaaaactcatacgtactttttcaactagactttacacagatgttaagcctatgaactattgatcacaaactatatgagctaaaattacaaaaaactattcatccacccatattttaataaaatatttaaaatgttactgtaaacccagaaaaaagtctaatattgattctatatatgtctaagaaggtacgtacatggatgcttcttgttacacgtaatggaagctataaagatgtgttccatagtgtgacttggtttcaatggtttcgacagcatcatcctacaatcagcattatctactttccaagactttatatttgatgtttctagtcttttatttttttctgtagaatttttgtctctcatgtaataaaacttccaatgaaatggcttgataaaatatatgctaagattaattggtttgcaagggattaaatgacgtatcatgaaactgataaaaagcagtgtgcaaggcttgcagtctaaataaagtatacagaaagttacgtactccaacaaaccctgaaataacactttgacacatactatttttaatatttattattaaattaaaatatataaactcctaatttatcctcgggttcttcgaggtcaatactacaaaaaggggggttttgcgtcgatcaacgcgtctggtcaaacttgttgacctatgcaaaagtcaatctacatttttttacttcagttatccaccgacgcaaataataattaattagtgtcggttatatccgacgctaaaacaaaaaccgatgcaaaagatgaaatatataaaaaaaaaaaaatatgtatatactattagcgtcggtctacaattgatgcaaaaacccattgtatacactattagcgtcagtctacaactgaagcaaaaaggcattaaaaaaaatcagttatgggctttggcccatcattaaaaaaccctatttttttatatattatatatatatatatatcacaatttaacctacttctatcagtcgccccatatcgtttcacacacacacacacacact

SEQ ID NO: 162867 - DNA, 2672 bp, Cannabis sativa
ggacaaaaataaagaatgtagatcacataggtagagcataagacgtttaatggataacttattttatctgggttttataggcatcctacttttacctatatagccgagagtatagaaaggaaaaaaacagtacaataataactgtctgatggtctaaataagataatatcaattcacaatcggtaatttcaaggaaaaggagaggagctcacttggttaactgtacgatgcaaatggattgtagaagtttgctcacagtgaacactaactatgtctgccccagctttgataaaatctggcacccgctgttctggttccacaatcatctacacttcaacaaaatatgtgaacatctcgtttgttgattaaattttttccaatcattccaaatacaaaaagatagattaataccaaatgcacatccaaaggaaggtcagtcacagggcgcaaggcatcaaccacaagtggtcctatggtaatgtttggtacaaagcggccatccattacatcaatatggatccaatcacagccagccacctctactgcttttacctgaataatgtgagaatgagaatgtaaaatccatgaaacttgataatgaacagcatttgattcagcttatctgctaacaaatggtgtcaaactgtaagattgtcacctaaatatcagggaaataaacaaaatcagcaataatgcagattgtaaccatattaactcttcctacatatatatacactaacaccacggttatctagcacaacagaaacacagtacctgctcccccaactttgcaaagttagcggatagaatggacggagaaacaatgatatcgctttttgagcacttatcaaccctagctgtagccttcactgcagtcctaaaagttttcctaaagtgacacaacaacaggaataagagaaaatatcagtaataaatctgggaggatgactcttcagaaccactagttataaaatgtagagaagatcaaaaacagatgatagtactacaaacactgcattaaatgattaataattgagatactttacgcaattaaatggttgacaagcaggtctactaaatgttctttgagaaaaaaaggtttgacattttatgaggatgggaagaagaagtatgctatgtgagaacaataaagctagtagcgatttcagaatgccaattatgttgttagtaaagtctcttggcattatatcaaggttttgaaattcacctacattcaccagggatgaagattgtgactttggagacaactaagccgcagaggtttaatatcaccgatcctcttattgatcgatgtaagctttaaatattctacaagaattcttaataaaagagtttattactgttgaattattttcaagctatccatgaaacacaaccattaatgaggattatgcccaagtttaacttacatccgaaccataatcaaggttcctttggttatcctcattttaagtggagcagcaaaaagaaagctcagcaagcaagcaaggcatatttacataaacgtaaagcacaagttcaaaaaaccaatttactcggacaacaactatgtaattgaacaacttcaaaagcatctcaacaaattcactaaatcatttcgccagagaagattaaaaaacgtaataagtctctaaatttctcaacgtcattacaacttttgccgaactgggtgtcctcaaaagacacaaaattcgccaatcccagtcgtcaaatccaaaaaaaataacgaaaacccagaaaatcttgacgaggaaaaagaacctcaaatggagggaaaaaaataccttgtgaatgtaaacgaactgggttgagcaagattttgcctttgaagcttaagacccgaaccaagtccacttatttgggactgaagagttgatgaacataatgaagcagttgacatttttttgattttcaaatctttgtctctgtctctgtctctttctctccaaggtctcaacgcttaaggcaatgaaattttggtgcttgatttgtttctcctcctacttttttcgcctactaccaccaattgtgttcgacacaagacttagaaagaaagaaatatatgagacaaagtgatgttgtgacacgtgtcgcctcggtttgtgttgtatggatttgcttatctgaaatggttggcgtgcgctcaactttgctgaccatcaacttgctgtagttttgtgtgtgaagaggttaggctgacgaggagagttgaggtggttttagtgacaataaatttaacagcattttctccatcaacaaaaaaactttaacattttgtttagaataaaaaaaaaacaacattttcatttgtgctaaacctttatataaccaacaaaaattactaataatctatattgggcgctaaggcactagttttgtccgtagcataatgtagtgtgatgaccaagatgacaagatacaaagctacatgatgcctggtgtcaagggctcatcttttcaggcagcggaatacctgtgcagcaccttggtttctttaagccaaggttagccttccaatcctctgagtaacaatatgagctcatttttcgcgagatcgtgtgcctcgtgcacacttccgtctcttgaacaactcccgccgagtcatgctcacaagcatccatgagtgcctccatgcatcgaggctctctagc

SEQ ID NO: 162868 - DNA, 1514 bp, Cannabis sativa
  modified_base (1294)..(1294): a, c, t, g, unknown or other
ttttttttttaattttacgaaattttacttaaaaactcttatagtaactaacggagaaatctaattcgcaaccaaaatttacatagcaaatcacataaaaactaccggagaaattacaggagcaacctaaattataatttttaattaaaaataatttaaaactaaaataattattttaaaatcatacaaattattttttttttcctcttcacgcctcatcttgctgttccaatcctcatttcaccaagctcgaagacaccatccactgcatttactctttgcaccaccctccatctatctttctctttctcgttttttaagcacgatcatccgcatatgcacataggaccggccctgagttaaaatagactatagacaaaaaaaaaaaaaaaaaaaaaaaaattggactcttattataaaaataaatgatatttttaaaaagtattaaaaaatatgtatgttttaaaaaggtatgtttttattgagcccttaaaatgagtgagtccttgctatataaaaataataataaaatgagtgagccctagcgcaagcctaacccgcttatacctagcgccggccctgtcctcacagcaagtcccatggccaactcccgaccacaatgattcattttgaccacgaaatcaacacaattaaaagagtgatccgatatcaccaaaacattacaaaaatataaaaagatcaataattcacttgggagaggagctaaccagcttcgataccttgtggttcaattcccacaagtccaatctctattcttctattctcttccccaacacactacatttttcttgaactctcttctaccaaaactaaaacactcactctctctcacactccaacacttttgacccactttttacctctagccaaaaaactatttattatgacacactattagagttaagcctttaaggtagaaatatgccatattttagttaatttaatacataataactctgttaaaaaaatacataataactttgataacatttcgatactgacagtaactccgacaaattttttagtattgactccattgactttccaatcatcggtggcaaatccgccgatcaatgtactttcatttatttctaaaattttattagaaaaatataaaatggattttaataattttttatggtaatacaagtgatattaagttttttttttttttttttttattttattttaaatgcatattttatttattatgtttccttactttaaatagagtaatttgcggcaaaaccctcttatgttttaatttttatanacttaacccctttatctttcttttggtggcaaaacccccttatgttttagttttaatacacttaacccccttatcttttttttttggtggcgaaacccgcttttgttttaatttttatacgcttaacccgtctatcttttgttttggtggcaaaacccccttcagtttacttttctttgcaaatttaaagttttagttagatattaccgttaaatactaa

SEQ ID NO: 162869 - DNA, 2326 bp, Cannabis sativa
tggaagccaatcaggcctcatccaagttacaattatgggccataggcccaataagccaggcccaactaatttagtggtgcccgagcccaacagaggtacatttctcttttcatctgtcttcatcgcactcgaccccttcgcattcagtcagcggcagctcgaaatcatcttcttctccgacgaactccatgggttaccagagactgacaaatggaggtgcaagaaaagaaaaccatgtgcagaggtctgtacacatatgtgtgtctacgctgctttgttcaattgatcaccaatggtaacttttgtttgaaattgggatttaattcttgtgttttttttatctactgttcaactttgatcataattaagtttgattcttgttttgttccatgcccatctgagttcattatgtttgattcaaattaggatatattctttttttgttctttgtgtactgatattattattaatattagttctgttttcagactgtgtattttcatattgctctattttatgagcaaatttggctctatatagattgtttttgtacattaactaacgagtatgtgttgtgagagtattactacttttatttatggcctgaactgaatgtttatatgaattcaaatactgagccaaaccccacatcccattgtttatgtttgctatgtgagtgtatagcacaattgcaagcaaaagcaaaatgtacaatttttagttagcaactatgaaaaggaacagaacaaacatttagttagcaactaaggatgcacacaagccaatcactagtatgtacctataagataggagaccaggcactaagcttcaatctattttcatccttcaaaattctcccgaatccttgtaaaccccattcagtaccccagctattctgtacaatccagtaatggatttcttttttctcgggttttgtcttgcgattgccctttttggggtaatatatggttatagtctccgttccttctcctactagcaacattccatgccttctagcaatgtattcccagtcattcttttctaaactccatcttttttcattcgatggcatgtatatactccaatcgcccattttctccccaaagttggattcgaatttccctgcaatgatgagcggatgaaatctaagaagctcgctcatccgtttctcacttttcacccgttcatatccatcaatgtaaaacaagtcctgaaactgaaaaaaatataaaaagaaaacatattagacttacaattaagtaaaataaattaaaataactgtaaagtatagcacctacctgtggtgcttgtagactgtcgatcatgttctccttgattcctacgaacggatattcttgttccgttgtgatcccatgttcttgtatgtagtgcagagctatcgaagcctggtgcccgcttttgattttggcagccggccaactgaaatctatgagttgttggcaggatagtatagtttgttgttgtggctgtggctgcaacaagttgtaacagcatgatacagaatttgctgctgttatagcccaacaacagtctgcaaaaaaaacaaacaattttaaatatttatagattattaaataataatgggctcgttatgaaataagaagaattaatacatttatgtgaatcttttgtatactctatctccaatataatctttattgttactttctcttgtattgtgataccagcaatcttttgagtagtaggtttcaattttctgtgattattatcaaaattatgaattaatatagcttgttatgaaataagaaggttaaattttggtttttattactcatctgtagattttgttcaattaataaaattttctaactgcaaagaaagaaccaatttctccaatgggatttggtatatgggctcggagaaaccagcttcttttctcatttggttcttctaggcctctgcttatggctaatcaagaacaattccaaagcacaaaggtttcgtttgaggtcaaattactacaattatatttgttgggtttgctggctacatacaccactgccaatctatctagaaggtaagactaatctgtctccttttgaggtgggttttcaatcattttggtttataaataagaatgatgctgacctacattttggaagttttgaaagagtgaaatttaaattttggtagttgtttcattcctagcatagattatatttcacactgagattaatgttggtagctaacaagtttctacaagagtactccaactctctttcattcattttttttgtagtgtccataaagttgaattccaaggcttgtatagtcttttagtgtt

SEQ ID NO: 162870 - DNA, 2861 bp, Cannabis sativa
tttcaagatggaagattaattttttggaagaagcgagagttctctctccacagcaaatggaactaagtagacataacttaatccatcactacacatcatacactaactttgtacagttctgtctagtttgttaacaagtgtatgagccacaacaagtaaattattttttctgttgcaagtaaaatagagaacaccttctgcttcaaatttgcagccatatatacagagttaaaagtgagtaaaaatcactggtagaactcatcagaattgaactttcaagcatatacatttatacaaacctaaatattttacacatgtgtcataagaaaggaagatattgggaactgaaaatgagaaataaaagattatgtgatatgcactggcaaccaaaaagtccaattaccttgtgatgagtttcaaaaaacttaatgacttcttccatgtggtttctgtagaaaccctgcatttcacatgataaaaccgtttgccatcaagaaggaactataaaattcaaaaggaggcttgaatgtcttactaacctcaacatatccaaaaaagccagagctcatatcaccagcagggaagcccatagcaataatgttttcagtgatatatgtcatatccaaatcgaaacccccttcctgaaaactcaaggccgtacaaatcatgtatgcataccagacaaagaaaataaaagaaaaggaggtcaatatgaaatgctacagatactacagcaagggataaataaaatatatgtaatgtatgccttacggtaagaataccacttgtgcatatatgcacccaaatccaagtcaagatactatgataacactctaaggagattcaagttcggactttggataagatacagattgtatgccctcatatagaaattaacaagattaaacttttacaatacaacacatcaggtgctcttaaaatattctgaaatcacaaaataaattgactagaaggtcatagagctactagctgaataatgtaaagatgtcaccttcgccaacacacgcaggccattaatcaagtttttaacctttctacttgattaaactaaagctaagtaggacaaaaaaattacaccaacgaagtaaactagcaacccacctggtaccttcttttattttgggagacaacatggcgagccttaacctgtacagccttcactgcactccttgaagaatcgactaacccttttgtaattgttccaaataaaccaggctgagtatcagatgaagatccatcagaaatgtcagctggaggagatttgggagacaagcggagtcccagtccactcgtaaagcgtgaaaaggttgatttcccagaattttcagttggtgacccatcttgagtcccaaccaatggctgaggcaatttcaaactcttggtccatgatgaaagtttagatggttcatcatgggaagaattgtgtgatttgtctgtagcaacaggaggaggttgtacctcaggagcttttacaggaggtagggatgagtcagtagattccttatccatttcagctgaattttggagaaagttcacacacctggcatgcacagttcaacggtagcaatacttacgactatagctgcaaagaaaaatcaaatcatataacctcacatgactaattccaccatactcgctctacttctagaaacaaaacaataaaaatcaagtttgtgataggtgttttcagtttctgttttgttttattttgcctaaatgttttgcagcgaaaccagtgaatgctcgtatagatgtgaatgtgagcaattatcattccaactgtaagtggcaaatattgtattttctttcattaataatctgaaacaataggaaaaacattatggacaaaattagtaccagtgaccgaaaaataaaaaaagcactatccaaacaaaatttccattccatcaaaccaagttgcgtttcataataaactagtaatagtaggatcggaagtaatacagaagacaagaaagaaggaaatgatcattagtagacatatttgggcactctttgtagtaaattggtgaagaacatatcacattatggcacacaaacagtggtctgttgttgattactgtctctattatggcttcaatccataattcatattaaaccaaatagaactgtggaactataaaatcaaacgacgaccaaacaaccatttcgataacacttagcagcacatatcacaaatgtatacgtataagcaatacctgaagatgatatttagaaaataacagaaaaattgatccacaaaataagaagtcaaattaaacgcaacacaaacgaaattaatggataaatcaatcaatacgaatagaaatggaacctcgacaaagctaacagtgctgaagcgagtcagatctgtaaaccatgatcaaattcaacacttaccttattccaaatcgcaattgttccaactaatttcgaggaacagagaatatcaaagatgagtgaggcccgtctagggtttcagatgcggagcgagagagaaagagagagctttgttatccggcaagggaagaggttcagatgctggtcaaatcatttcacgtgcttaagttcggtaaacacatccaacggtggtgatgcagttttattacaatcagttggttagtagtattaccttgtatactttataatttatatcaccgctaagatcggataggattgatttttttgtagaccctacaattttaccacttttcttggctaactgccacctaattctggatctcaaaactgtgtcgttttaacggattgtatatttggcaaattttcatataagaaatttatatttatttattttttgttgtcaattctttcaattattgaat

SEQ ID NO: 162871 - DNA, 898 bp, Cannabis sativa
ctctctctctctctctcttaacctcattttatgaggaaagttaataattaatgatgctttaatggtcgtcaatcgtctcataaaatgttattacgacaaaaaaaaaatgcttaatgatggtttttcgcaatgacttagtgatggtcatataaaaactttagttaaggctaaaagaaatggtttctgatggtttagtgagtcacataaaaatgtgtagtttaggcaaaataacgatgcttaacgatattttgcaatggtttgcgatagtttgcgataaaatttcataaaaacttttgtgattgcataaacttttattcgattgttagtaatagctaatttatttacattaagttttttacatttttaaaatgagtagtgtgtaaacctaaatttgttgccccaaacggatagatgtggaaatttgttgttatacattccaaatttgatgttctaatgtgtagatttcaaaaagcaataataataattaaaaaaaaaccacttaaaaccaatcgattgaaaagtatgccttaccaaacttcttttttgggtgggagggtggaggttcaaaatcacgttccatgagatcatttgtaaaaccatcatattttttttttaccaaaaatcaacctttcattggataattactgaactattgttaagcattgattaagaatttttctttccttaaaaattttgcatatttgaaagaaaaataaaagttattcaaaaccaataaatcatgcacatatatgtttaaatgaaaccctataaattagtgttttcagtcagggacggacccattcacattaatgtgggggctatagcccccactaacaaaaatactgccttttaaaaaattaaatgtaaattttttaatttaataattataaaccaaaat

SEQ ID NO: 162872 - DNA, 1751 bp, Cannabis sativa
tttatgaatgaagtattattattaaaactttagaaataaatggtattattaaaagttttttttagtggtttaataaaatattgttttatttaggtaggaggagatagaaagaaaggaaagaagcaactgtaaagcccgggaacccaaaacagaaatcaatctcatgaggcagacaaaaatacagtgtaggggcaaaaaaaatcccataaactttgagatccgagcagtggtggtgcaactcaactcaacccaaacttcaatcttttccaatcaaaaccagagttaagggcgaaaccaaatcaaaccaccgccgtttccgacaatccaaaaagtttgaggtaaaaccaaaaaatatatattgtgaaaggtcacattcagctacatttgcaaatatatatgctttcataaacaggacacacacacacaaaaacacaatatcatacaaaaaacactttcggggataggaaaagaagaaaccccaactattatcttatcttgatttcgagcacaaaacaaaatctgtcttttgaggaaaggaaaaagctcctgagaggcccatttggcgatagtgaagtgtttttttaaaatttttatttttatatttatattttttggtctggtgggaagggaagggaaaggggaaaaaatggctgttgaaactgagaaatctgggtctgatgggaaagtttggagcttttgtagaatgccgttttggcaagggagaaatgggtcttcgtcctcgtcttcttcgttgtcttcaatgcataatattcatgcccatcatcatcatcagcagcagcagaatcagagccaccatcaatctgtggagcgtttgagccttcaatctcctactacggtctcctctgtggctaaatccttccttccaactaggaggaggctccgtcttgatcctcctagcaagctcttctttccatgtaagaacaagcttttttgtgttttcgctgatataatcgatctggaatatggttcggtgtttttcttggccactttcgttgtataaaaacccaaaatttatctcacattttggttcaggaacgacaattctatgtttttagtgttttggttgatcataaccaccatcaccatgaaattgtttttcctgttaattgcatgattttgctcaatgtttacgtaattaaaaactaatttagttgtaatttaattaagtaataacttcacttttttattatttactttggttatgataaaagattctaatcttttaaagatattaaaactggaacatattcgtccttgtttcttaattacgctcttgaattatctcatcacctaatacttgggcggatgcatttaagtttcaattgtcaataggcccacaagttgccattatctcttctgcaaggttccattatataatatctagaatataattagatgcatttttgtcaaatttatgctgattgataattgaaagctataatttgttaattctaattattgactcatttctttcatctcttttatctctagatgaacctggtaagcaggttaggagtgccattgggataaaaaacacatgcaagtctcatgtagctttcaaggtaattaggtttctctttccctgtttcttagctgatgttatcaactcattattttatcttattacatttttgtctaaacaatgtgtcacaattcagttcttgaaagaaatgtagtttattgataagagcaagaacaattacaaaatcccaagttattcgagaaacttg

SEQ ID NO: 162873 - DNA, 2130 bp, Cannabis sativa
ggtaaaataaattccaacaaatctctcttctccttatctcaagatcccttgcttcctccctctatgttctttaatatctaatcatctatctaccagcgtaagttggagttggtggtgtttaactttggcgacactctacatgggtcaacattggcggtgctcaataatggttatgcatgttgtgggttttgactgagtggtggtcgtcgcgatgagtcttgggtttggggttcgactaggagtagaaattgagaggtaaaggaagtgttatccgcgtttttaaataggtgacacgtgtacatctagtgtctcaaatcaatttatgggcccattcttaaggcccaaatagatagaagaccagtctaagaatgaagtcaaacgagtggtctaaattcaatcaagactcagttacgggtagatccggatggatgaatccaaagttctgactcgaccaaattaccaagtgtttgaaaaagcataatcgaatgccccatggtatcccagaagggtagtctaaggcgtgttgtggaggttgatcctctgggatcgatctggcgtggcacacctctaacatagaatcccaaaaagttaggagtttgtcccctaagtgagacctaggaaaatcgcacaacataaaaagaaaccttcctttttttttttttgactccactactctgatatttattgtacagaatcagcgatgcatgaacacctgtcaacatcagacgatactatgttatacgaatgacaattatccctcaattgagcctcaccaacccctacccatcccaaagtcaatattataatgtattttacaccatcagtgggcttatttcatgtacaaaacccttacatgtccgggttcacctgagaaaccaggtttacctacaaatatggctttatccctgcatgcaaagaatatcgaactttggctagaaactctgtaaaaatttggcaagaataatcttgtgtaaaacactccatagccaaagggcttaataatatttgacttgatgatggaggcttattaatgcctcaaccacgtaaaaatcctcttcttctttacatttgatcatttttcctttgcttaatttagaattaatttattgtccaaaaatctctgtacattttttggtacttttattgagacttaaggaaagtattctccgttgttgaaatcaataataatggctgcaactagaaacacaactgtcaagccaggcgtttattaagaccgtgaagatgctgtcactaacgacgagtcaaactgacccccttcgatagatgctaagtcgagcatcgtaggggacgtggagatgtcagaagtgtgtagttgaactccttggaaagactagcaacaggataaaaatgtggataactctcatcaacaaagatgaataggaaggctatggcgaggaccagcgggaagactctggcaaagattatgaaaaaaaactatgaagaggaatactacgatgaggacctataggtggtgagattaaggtaagtagtctttgatcaacaaggcaaatggcggagcagcaagaagctacctacgaaataaaagaaaccctcttacagctataaaaaatggtagcaaaggggaacctcaacgccgaaaacccaccagcaggaaagtttaacgatcctagggttggaccctctaatctagcaaacaacaaagggaaggtcgaaatggctaagcccttgaagaaaaactatccaccaaggcctgtgcaaaatgctccatggaacaacaaaaatacaggcatcccactcttgcaaaaagaaaaggtcatccatgccccagggctagatcgtctaatctatttgcaaagtagagtcaagcaggataatagacaccgtgctcaggtaccagagcctaatgtctagggaaggaaaagtcaccctagtatttttgttaaccagagcatcgaagtggaaaacttagatcccaaagatagcatgtcaatagtggacctcagggaccgtttgaatataatgacagaaaaagcaaagtgtcaaatagccaggcctcacgtaggagaccgtaggaacaacataaatgatcaaatctgaggacgtgattgttgggttttatgccctgaataaaactcatttcaatataat

SEQ ID NO: 162874 - DNA, 1447 bp, Cannabis sativa
cctcagcctctagcttagcaatatagcctatgagagcagctttgtccctgcgtcttatagattcctcatcaaaaccagcttctttgagacgcttccaaatggtttcatcacccagagggctctgctgcaaaaccctagagccaggtgttattgaaagaggcctagctgaattcggagtcatcagtagccgttctgactgcggagtcgccatttcacggccgcctccgatcgtcgacccaaaaaccctagattcttttctttctctcaccgattctttctctttgattcggtgctcctcgaatgttgatcaaccccaaattttcaagctcttttctttctctttactctttactctctctctctctctctctctctctctctagcttttggctgctttgcgctgacaatctcttttactgtttgaactgagttgaaaagagagtgagttttggtattgtattccatacgacaaggaggagaccattactatccagggtggcttttatatggacaacaagatacgacgtcgttttcttgagtccaaaacacttttttaattttgatttaaccgcctgaaatcgaatttaaacttttaattaatttaagataattaggtttatgatacagcaagctcacgaagaagagtacatctcacaccactttcttctggaacatagtcaaccatccacatcaccatgtatataaaccacctttttatttatttatttttatgtcccatctaatatttattattattacataagaaatatttattaagaatatgataataagccagaattgatacttaattataaattaaaataaataactaccaattgcaaaagaaactcatttttcaaaaaaaaaaataattaaaaagtaaatatattttcaaaataaatatatacaatttatacactaaaatacactaccaccaaaacaaaatgtttttgagaatctattatgtgcttaagttacaagctttgtccccactaattaatatatttaattttaaaatgaattaaaaatatacttaataaatttaatgtgataatttctaatgagtcgccgcgtgactagagaagacaaatttcctacaaaagatgaaaaattcttaatatttggctatagacatatgagttgctaagaataaaaattggaaacaaaaaaaaaaagatattcctaattcaaagacaaattttttatataatttgcatagtatatttctaagcaagatcattgtatttcttcccttaaaatttggaataaaaataacaaccatctctttaaaatcagaattcagtaacttaatcataatattaatagtattctaaataaggttatttttagactttagggatgtgcataaatcgattcaatccaataagaatcgaccgatctaattacaacggactgtcaaacattagatatccaattgtgatcggat

SEQ ID NO: 162875 - DNA, 1371 bp, Cannabis sativa
ctctctctctctctctcttgttctcttagacgaatgccctaccacaacccaccacaaccacctcttgttctcactccctcttgttctcactctgtccgtctctcgatctctctcactccctcacgatctctcaatcgatctctccctctgctgcccccggcgatgccacctccgccgacccttaccggtctcgatctctatctcacaaggtatatatataaatttatttatttatttaaatacttatttatttatatttatatatttatttatttacatatacatttatttatgtatatgcttaggtaaaaaaattaaagtgttttaaaaaatttaatgtgtattaatgttagttgttattataaaaattttaatgtgtaaaaaatatttggaaaatagttttagaatagaaaagatttaggtttagctaaaaagtttatttatttaatttgttattgtaaaatttaattagttattttaatttagccttggtaaaattataaatttttattagtaaaaataattgcataatttaggtaaatagatgttttagtacaagtttagtatagttatggaaaaaaagtttactataatataggtaaaaaaaagtttactttaaggtttaatttatatttatgtaataaatttaattttaattagtttgatttaattaattaattgttaattttgtgtaggtttttatttgtggtgatattgtttgaaaaattttgggacgctatattagaattggtaagtgttaacacagatttttattaactaaaaaaatattagcattttttgtaataaataaattacagaattaattatagcaataaatagacatcaagaaattttaaacgtgattttgaagttaactcttcataatcccccagtccatcttattaggggtgatctttggaatgcaaaatacaataatattagtagtaataatatattgatttttctctctagagtggtcgttccttttaccttgggttttgtccctatttatagatgtgtagggtgataattatttctttagaatctattcattcataattactaatgaaacgtggacattccccacgtttcattattatgcatttgaaataatattaaataactactctttcgtctttatcatagattgttatgctaactgtgttggattattcttattgaatatatattatccttctttactgtctttgtagggaaaataatgagtgtagagatacaatgcttctcgtagttctctcctttcattttggaaggtattagctgttatattatttattatataatataatgtttaagattaaaattgtgatatgttatatatattattacatataatataattgggaatta

SEQ ID NO: 162876 - DNA, 1984 bp, Cannabis sativa
  modified_base (1915)..(1921): a, c, t, g, unknown or other
ttgtaatatttattacaatacatgctcccaccaaacattgtaatattataatttaatacaatacagggtccttatacatggacccaaacgaacccctaatttcttatattatttaaagaagtttttatcaacaaataatataattaaaatttgatataattttattacttaattatcataatcaaataaaaaatataatttattatacatatgatttaaaatttcttaaatattttctagtttaaacttttttgagcgtgttgtttaattaattatatatactacctactaatatgtgacttatttaaaacacaccaactataataacttaattggtacatttgataatcaactctgatataattatgttttgttgaatttataagtgacatgtttgaagtttactttttttttcacaaattgatttatatttattttaaaattaatacagtaaaatttctttctttttttactataaatttaattgcttaatatatatagatgggtaatagtattacttaataaatttaactatatataataattttaaaattattaaacttaaattttgatccaatgacaaataataaaagaaaattttgaatttttatacttaatttagctacttaattaaaatatatatatatataaaaaaaaaatcatttttacactatatcaaaaatatgttcatatacaaaatacttaagtcaaactcaactttttttttatcttttttgtttgtaaaaatacttttttttttctttattttttttcgttcgatggaacaatatcagctcatataataatgatagatttttttaattagatagaaaattaaccataaaaactcaaacttttctaattctaattctactcattcatgggtaatacctattaaaaatgcacacatatatatgtaacgtgtattgttttttttttttttttgaagaaagggatgccctaaggaaaaagaagagaactaagattacatgggtcatcaccaatccaaaccgctacttcatctaaccccaaaggcaatttgccaacttatgggcgaaggaatttgtagtccagctaatatgagtgatacgggcgtcagggaaatgagacaaagcagatttaatttgcctaacgaggtctccaaataatgagaggtcctccttggggttctcgaaagcgtcagtgatagctttgcaatcaatttcaacatggtaaactgggaaactctcttctatacaccagaggagcgaaaaaaggagtgattttgcttcaagagtggcaacatccccactgccgatgtgggggaaagaaactgcagcaacaacttgagcttcactattgcgaatgactcctcgaaagctaacttttgatggggtcctcgggattgcagcatcagtgttcaacttgagaagacctgtagtcggcagagtccgggtcgttacaggaggggactgagcaatcggtgtagagagcttgcgggccgaagctgatgatttataatccgacagatagctccgtgcaagattcacgatggcatgggactgatcctgcgtttgactcctaattgccttgttcttgttgtgccaaataaaccaagcaacacaaagaaaaattatacatcttccttggttaaagtagtataaatcatgtaaacaatatcatgaaaagagatagtaaaagaagaagaaaaaatatatgggtagaaatttgtacctttccacattcttcgaacactcttgcaaaaaaacagggcatgtgtgatagattcatcatcgttaccacaacgggcacaaaccggagactggagaatcctcttaataacaaggttcctattggtaggtaaggttgaattggaggctcaaaaagcaaaatatttcaccttgggggggatgtgaatgttggaaattattttacnnnnnnnttagatctactaacaagtatgtttattaacagcctaaatatgaactttctaagacgatgaaat

SEQ ID NO: 162877 - DNA, 5321 bp, Cannabis sativa
caatttattaaagcggtcgttacagtacaagttgtggagcattgagctaggtgaacaccaaaggtatttcatcggtaaggatattgtgtttgatgaaaaatctgtgtacaaagacacactgaggtctgctacaaagtccatgaatgaggaatactcaaagaggtccaagtttgaggtggaacttggttcaagttctaataaacaaatgcatcaacctgagtcaaatgatgttgtaactggtacacaagaaatggatgaacagattgaagaagatgaaacagaaaatgttgacacagagttgcagcattaccaacttgtcaggtatagagccaagagagtgtcaaaggctcctagcagatttggttatgctagcattgtccattttgctttgaatgttgcagaaatgagagacaatgaaccaagatcatatagggaggccatgaactctactgacaataagaaatggggaacaacaatggacaatgaaatgaattcactagtgaagaatggaacctggattctaataagaagacccaaagaaaagagaataattagctgcaagtgggttgacaggcactaagacatgattctaaggtgtgattcagctagattcaaggctagactggaggcaagggattttacacaaaaagagggtatatattatactgagatattctcaccagtagtgaaacacacctcaattcgaatgttgttagctttgacaactttggatgacttggaattggagcaaatggatgtgaaaacaaaatttttgcatggggaattagatgaaaaaattcacatgaagcaaccataaggttatgaggtaaagggataagaagactatgttttcttgtttaagaaatcactttatggtctcaagcagtcccctaggcaatggtacaaaaaatttgatgagtacatcaccaaattagggttcaagaaaagtgtctatgactgctttgtttatgtcaagagctcaaatgttaaatttgtggtgtatctactattatatgtagatgatatgctaatagcaagtaaatgcagtgaaaaaatcaagaaggtgaagcaattgttgagctctgagtttgaaatgaaagatcctggtctagccaagaaaattcttggaatggaaatactgagagaaagaaaagataaaagtttagttctatctctaaagtgatgcacagatttggtttcccagatgcaaaactagtcagtgcacctttggcacaacactttaaattgtcaaagactcaatcacccaccacaatgaggaacataagcaaatggagtctattcccgacactaatctagtgggaagcctcatgtacataattatatgcactaggcctaatctctttcacagcctaagtggtagatttatgggaaatctagaacaagatcattggaatgcagtgaagtgggtcatgagataactcagaggaacatcaagcatgggactcaagtacaaattagagtcatccaaccaagaagtgcaaggctttgtcgactctgactatgctggagatatggatactcgaaggtcacaaactggttacattttcactctaaaccagcgtgctataagctggaaagccaacctacaatctatagtggcattgtccaccactgaagcaagaaatcgaggctgcattcctaacatatatgttaatgaattataatgttaatataatttttaaaacaaagcatacgagattataggggtatcaaatgcgtttctttgggcatggctaggaattttacttacaaattgtccaagatagcctaaaaactaagaatgtggtttttatgtattgaaatacacgagtgacatcgtcgcacgtgcaaaccttaaccgttacataaacaataaaaaattgtaagctttaattattatttatcatattcattatattaataaacaataatatatacatatatactaatataaatatttatttctttggaaaaaagaagacatttgatgcaaaaattgaattgttaccgttacatcgaaagtagatagaacgattactgacggtgacttacgaaggcttggacaattgatgctgaaatgtatcagaatttttctaccctagcttattttcttaggttaacttgtaattttcatatgtttaattagatattaacttgttaacatttagactaattttataatatttgtgtaatataattgtaattgttttaattgcttccataaatttaatttaagtatattggctagtcatgaaaataatttaaacaatatttaatttaaatgatgattaaatatttaatttagctttcaaaaaataaatatttaatttcatttaaataatatttaatttaaatcaataaatatataatttaaataaattaattttttgaatttataatagattttcaactagaaaaataaattaatttttaatattatatgacatcgattttaaccctttgccgtcaattcttaaagtatatggcgttggttatatactaactaccaatgtcatagtgtacatatcacattggttattattaaataactaacgctatagtgtacactatggcgtcagttatgtttgatcttatagtgttgcttgaatcagcgttggtagtaaatttttccaaaaccgatattgaaaaaccttaaaaactgcctttaaaatttaaatttgtagtagtgtatttagaaaatattatattacattaaaagcaaaaccagatttattacttaattattcactaagaagcagagtagtgaacaaaagaagaaaatcataccagtctttcccacttcatgtggcctctattcgataatagtgagatcatgaggatcaggtctgaatatttggtcagctagcgggtgcattgggcgcgtatgcatggcccgactgctttatgaaatttacgcgtgcctgggttgttgcttcttaaaagtagtcccacattgagtggaaaatattatagagattgagtttttcaccaatagcaccaattaattttaggaattggaatatcaattccttaccaaaaaccttttcttttcaattggtaaaactgcctgagttaattccagttattcttccctaggctcctcggtggccaataatcactcactccttaattattttagtgcatgtggttgctgacacttaattcgtttacttctaacttcactcttagctagctatagtagtggaagtgggtgatgacgtactgtatataagggataatgtgcaacagttttacttggtgagcaatatccaattgcatgtggttctaactcaacaaaagtgtagtaatggagatctagctaatatatggcgagaaatgagaatatatagcttaagtaattgtcactttttctttctttctttttttttttttttgggaataatatatggaaaagtatacaattgatatcgaactcactcgaaagtcttctagctttcccctttttcgttaaaataatttgggtcatttttcttatcttcttcttagtgggggacagagtgggatgtggtgggagattgtgctattttgggtaatgataatatactcaaaatggggtatatactatatataaggtggcgacttagaagaagaagggaaaaaaaatccatagacagtattacattgtaaatttttgtgacaaataatattgcagtttacttctttgtcttttactcaataatatatatatatatatatatatatatatggttttaatgacaatcatacaaatgttttttttagggaaatgtcaagggcaatttaaacactacaaaatgtatcaaacactgtaaggtagtatcagagcatctcaacagtagtaatttttaagatgctaaaaatttaaatatcatctataatattttattttatctctttttcacattatttttgatatttttacttctaaaaacactcaaatgtataacactttttaaaactctttaaaaatattataattatgatctcacaaattattacttaatatatatcctaatttttagctagcttcaatttttatatataaaaaaaaatgaatagcatcaatgttataacataatatcgatgtaaatttctagaatgacatccttttctctccaatggtatatcattttaatattttgcgtcacataatatgtccaccttaccaaacattctctcaagttttactattggagatgctctcataacgcgttattggtgcattaaatcatctttaataggttcgacaaaattagttgtgccaatattggtcccactttatttatacttagccaattatatattttattttttaattcaaaaatattaagaggtacgggtacccatttaagaatcattttatcatttcactctcatatatatgccacataagataatgtgatctcttacgcttaatttaatattaaatctcacacattttaattttaatataataaataacataaaaaatcacattataggccaattcaattagaattgcgaaaattcaatccttcttattacacatactatttacaggatcataaagagtttgtttggctgtgtttttcaattttcagtttttagaattgtgtttttaaaagtgagaatagaaaatatttttttgtcattttaaaaatttaatagtatttgacacaagttttttaaaactatttttaaatttttcgctactaaaaaaaatcaatattttaactcagttatttaaaaaactgtttttaaaaaatttactcctattagtttttaagttatgaatggaaagtgccccgaagactcacaacacaccacatcaatataacatgctcatttttatgtaaagatcacattattgttagagttaacagattaattacacatttacattgtattatctacatgatccatatgatcctgcatatgatatatatctacatgcatgtctagctaccggacttaattaattattctcttatatactctctgtaaaagatactatcactgcaaagcaaatgttgttacaatttttttcaaatctcgaatcgatcagttatttgaattatttacaaaaaaaaaaagtaatgtacgtacgtggacgcctgtatagctatgtatgatatagcaacgacacaatatgccctttgtaagaatttttcactataaaatatgggtaggtttgtaattggaagtactataaactagtatagaaatattgaagaaagtggctacacagggccggccctgaaaatatatgggcccaagacgaagtaaattttggggccctcaaaaatatataaaaaaataatcaaaagaagagtgttatggga

SEQ ID NO: 162878 - DNA, 4013 bp, Cannabis sativa
gaaaatgaaatctggaattggacaaactctttgtcaaacaatctgcaacttgatcatgagatggtatgtatctaatgtcgagagctttggcaagagctttatctctaacaaaatgcacatccaattcaatatgtttagttcttgcgtgatacactggattcgaagccaaggcacttgcccccatgttgtcacaccagatgataggggtttgtttgagagggaattgcacttcttggagtaaggattggatccatgcaatttcggctgctacttgagcaagggctctgtattcggattcagtgctggacctggaaatgacagcttgtttctttgatgaccacgagataagagaatctccaaaatatacacaatacccagccactgatcttctatcatcggggcaacacgcccaatctgcatcagtgaatccagtgagagtaagtctgtcacagtgtttaatgtgcaaaccatgatcttgagtgccttttaagtatcttaagattctttttgcagcagaccagtgaacatcagttggagctttgagaaactgactcagtttgttgacggagaagctaatgtcaggcctagtgtgtgtaagatactgaagtgccccaattaaacttctgtactatgtcgggtttttcagcagttcaccatcttgaattgacagagtctttcctactgtcatgggagtaggacacggcttgaggtgtgtcatgttggttttctcaagcaattctgttatgtatttcccttgagataaatacatgcccgtgtcatctcgaagcacttcaatccctaagaagtagtgcaacagcccaagatcttttaaagcaaagactttgttcaattttacagtaaattgcttgagcttctgagcattatttcctgtcacaattatatcatctacatagatgagaacaaacacaatgtcagtagcatttttataaaagaagagagaagagtcggctctggagttaatgaatttccactcaagcaaagtttgctttagcttgtcaaaccaagcccttggggcttgtcttaggccgtataaagacttggataatttgcaaacatgatttggatagtctttgtcttcaaaaccagctggctgcaccataaatacatcctctgttagacttccatttagaaaagcgttatttatatcaagttgtctaacttcccaggattttgcaacagccattgtcaatataattctaactgtgcaagcctttacaactgggctgaaagtctccccgtaatctataccaggcctttgactgaaccccttagcaacgagtctagctttgaacctttggtgtgaaccatcaggatttaacttgattctgtagacccacttgtttcccacaatgttcatttcaggcagccttggaacaagaacccaggttttgttctttttcaatgcatacacttcttctcccattgcacagttccagccatgatgagctaatgcttcagcaagagaactgggcagtttgtttgtatgcacagcagcagcttttcccatgtaaactttaggcttgaaaattccagccttggcccttgttaccataggatgtgtaggaattagaggagcagtgggaatttcaacattttgatctgtgctttgctgattatcagattcctgatcttgatttcgagttacagagtgttcattctgaattgcaatgccttcgagagcatagctgctgtcatggtcaatatgatcattctgttgagaattaatattacctgaaaatgcctcattagaattaaagtcaggtgctctatcaacttgggtaggagtgttgtggtgtgaggatggctgagagtgattggttgtggggacatttagagacacagaccacgaaggaagctggacacttactggtttttctgtgttgaaagtgttgagaaagtcgtgtttaaaagggaattcactctcattgaaaattacatttcttgagatgtaaaccctgccagtaacacttagacatttatatcccttaaagttctcactataccctaaatttacacatttggtagagtggtactgaaacttgtgtgactggtagggtctaagacacgggtagcaagctacaccaaaggttttcagatgcttgtagtcaggttttttggagaataaaatctcagttggtgacatattgcctaacactggtgtaggcagtctgttaatgagatacacggctgtaagaaaggcatcacaccaatatttaagtggcatacttgcttgagcaagaagagtgaggcccatctcaacgatgtgcctatgttttctctcagcccttccattttgggctgaggtatgaggacaagagtgttgaaaatcaatgccactttctatgaccaaattggtaaatggttggtattcaccaccataatcagactttagctttttgatttttctgtcaaattggttttctaccagatttttgaactgtgtaaatgcttgaaaagcatcagatttagcttttaatgggtagagccaagtatgcctgctaaagtcatctatgaagtgaatataaaatttaaaattggtgtttgacattatgggagcagggccccaaatgtcagtatggattaactcaagaggatgcttagctttgtcatgatttaacttaaagggcaatgcatgtgacttgccatattggcaagcctcacaaaaatgaagatcatcagttttggaactcttaacattcatttgatttaagacaagattcaagacatgattggatggatggccaagcttcctatgccatttatccttgattgaatttaaactaaacacattctcagtcacagactgagttacattaggactcaaactagatgacaaagcagaaaaacaagttgatttaggttgctgaactcgggtgatagcaggatttttggtggaagatttgacacagtgagattcaaattgatagagcccttccttaagcttcccttgaagcactttcttctttgtttgattgtccttcacacaacaatcacgagatgagaactcaacagtaacatcattgtcagtagtcaatttagaaatgctaatgagatttttggcaatcttaggaacatgcaacatttctttcaatacaagatgactactgttattagtggacattaaaccagaaccagtgtgtttaataaggagtttactgccatctcctacagtgagagaatccttaccattgtatttggttttctggttcaggtttgaagcttcggatgtaacatgattgctagcaccgctgtcagcataccacgcatcatcttgaagcatttcaggtgtagccacaaatgctgaagcattttgtccaggtttgttgttgttttcattgtttccagatggtgtggttcccatgaaggtttcatcaaatcggttgtaacagtaggcagcagagtgtccatactttccacaaacttgacaagtgggttttggaccacctctgccacctcttcctctaccattgaacctgcctcggctgttggtgtttgagcctcctctgcctctgttattgttgtttcctggattgtgattactaccaccagatttgttagcaagattagcagtaggagagctattattggaatgcttactgttaccagaaagagtagtgagtctatccagtttactgtcaaaactgaggagcaaatcttgtagtatttgccaagttgtcttttcccttgcttcgatctgcagtactataggcaagtactctatgtccaaaccagataaaacatttgaaacaagaagagattcaggatagggatcacctgctaaggctaaaacatctgaccattgcttcttttgcttaaggtagtctatcattgacatcgatccctttctcactgtctgtattttggttctatactcatccattttggctttggaatgagcaccaaacaatgcttctaaactgctccataactcagctgaggtagagcagcccatgacttcagtggcaataccttcggtcatggagctgtaaagc

SEQ ID NO: 162879 - DNA, 2387 bp, Cannabis sativa
tctctctctctctctcacactctcacactttgtttttgccataacttttgacttggaaatctattttggacgttctttatatcgttggaaagctcattttgggatctatgtgttaatacataattagagttcaaagtatgtatatatgtgaaaatgaatttgggaataatgctatttttgaaatcctaagaatgtgtgactaggattaccgaagcttgctcaggaacacccagggatttggaatcattacatacttggattaccaaataagacagtaaactagcacattgtgattagcgcagtggcactcatgtatatttttatgtatatattatgtgagaaatcgagattagggttatgaccctaaatttaacggttatgtgatctagggctattactctagaatttaaatgaatatggatgcaatagtacattgtatatgttgatataaattattatgcaggtaaggcataattaggtcagactcaatatctaaaactgagataaaccattctaaggccttattgtaaatagacgagtgagcgtaacacataggtcaatgtgaaatagacaatagatgtagtggcatcaatgctaagtgattttaaattgatattcaaattgttgtttatactgtcttgctcagccttggctcacgcgtgctctattgtgtaggaaagggtaaatttgttgttgattagccatggggtcgaggactttcacagtgtattatacacgttaagaccaagctagaccacgagggttgggtctaccaggggaaaatattgtaatctccacttttgccgcttaggccagcgtgtacaaatagcttgtaatattttgaaaatgttttacgtgatctcgaactaaaatgttttcttttggatgtttcgtaaagtttaataattacaagttattatttttattctgtatgtttaaagttaaatttctggtcttggctctagtaaatcccaggttagcgggattagtatatgtttagtcgtagtgcgcgacgttcctcttgtttgggcgttacaatatgagtcttcttttgctctttggtaacgattcctttacccttatccttgtgaacacctgaagttctagggtccttcagatcaacttactcaggtgcctctgtcactggaggggcttgtatgtcagggactgtcctggttagagcagtcatcacagcctccattctggtcatcttggcgagtagtgtctcgttgaattgatcttgacgtgataacctcttctctgttagttgaaattgtcgcgccatgaggaccacggggtctgatttgtcaagcttgtatttctccccagcatggtcctcaactgctttgtcttgatgatcgtcttcattcatatcttctggtgcattatcgatgttgacctcgacgtcctcagagctactttctccttatttagcatcttcattgatgggatcgtctcaattctgatcttcatcttgaaaattcttctggcagctagtgacttcctatggatcactcgtatctcctgctttggcactagggccggtgaaacgaaggctagacttgggtctggtgagggccatgtttactcaagagtaattctgttagtggtctcactgctttcttcagctctcaataaaaccaccaaaaaatttcgcgagatttttggaaatagaatgaaaataataagaactgaagtaatacaacgaatatgtaacaagagacaaatagttttttacatggttagggcgttaattggccatagcccacgagttagtttatttagttagttgtttacttgtaaatgctttgagaaatgcacaagatgtgtgttcatatgtttgcctgagcaaagtacatcagagtgttcaacccctaatccatgggattaatggggtatttatagtagctgtaggatttcattaggatttccccttttccctctaacgaggagtttacaataaataatctctttaggctttctcatgatgtccaacccatgaagagtacgaccagatcctgactaggcagatcaaagttgagttgatcaaatcaatattgtgtcccataatggtgggtagttattctgaaataaccacatcgcagtgattatgggaagtttccccttatatcgagatatgatattcaagcatgatctcacagctaaaattcccttatttataggggaggataaatagaaaaaattgaagggtcttctagcaatacaatatctctccattttggctcgttatactaaaggtgtcttacgagctcaataagacgaaagcaaaagactctgtgagtacgaaacttgtgttgggttttgttccctaaataaaaaccatttcaatataatcagatttacttattaataagatcggaagagcg

SEQ ID NO: 162880 - DNA, 2400 bp, Cannabis sativa
  modified_base (2328)..(2352): a, c, t, g, unknown or other
ttagtatttaatgtaaatttccctctacttatagtagcccgacaatactctaacaggcccaactcaatgttcttaggcccaactataagcttttacacagagtgcgtaactatatgtccaatgggccatacgacagttaactttacatttgggttcgactccatctggtcagccaaacgggtccaactagaaacacttagaatcattcagaaagataattaacttgcaaaatttacacgcacatacattatgttgggaaatgcaaatgaatattattacaaaaaaaaaattaggagcgtgttttgaaagtcgtgatataattgattttgtgtctaattgaaattaattatataaattaatatattaataacggtataactagacataattattacaaaaaaaaaaatataattttaagttggagtataaaaacgatacaatcttattgaaattagtaggaaatagatagtcaatatattggctaggttgctttgagagtagacatgattcataataataattgagggatttcaattataccctctaatttcaatgagaattagatttgccaaacaagatattagaaatttatatgtaattatcacctcatatcaaaactagagttggccaaaaagtggggcgaccgggaccttggctccaagcccaataaaattaaaagtaatatatacacatataataaaatataattgtagtatagttcattcaaataaaaaggtcttcgcagtcgtcatttttagaaagttattttctggcgattgttagtcttgaaaggagacttgtggaatgatagtagagtccgaaagggagttcctaaatgtctatcatgtccacttcgggtccagtcttcaagatagctagtccttccctagaaaggagttccaggtggttagcttttccttctagaataacaattctggatagtcgacttcaacatgccttcattctatccgaaaataggtttagcaaaggtccgtggccctcgtgttcggaagctcatttgtgttccctgaggccttggcacttaagctgtcgtggagatttcgctcagaaagaagttggttaagttagttattactctgcgacagaaaagagcaaaagttggagatctgagcgaaatgagtcatattattctgttgccatcaatgtaatattttttaaactcttatgtgtttaatttcattattttagagaattcatatttagggtgttaatgaaacatacatgttaataaatccagatcctagtaaaataaaattccaacaagaggctcccatcattgatactttaatttggcacttctccaaatttaaataactgaaagctcggatattatgaaaaccaaatatctatagatgtagcaatctagaaaatgagagtctcccctaaagttaaacactttttttttggaaattaaaccatttgtggctgccaactaatggtattttgttttgcaagaatggagttgtggaatatgtaatgcacgcaatttggagatgtctgtcaagtgtgaagttctgaaagaaactacctactggccaatgctcaagagttacaaagaaagagattcgttgtcctccatctcccaaatgcgaagtttatgcaataattatgaatttaatatttttctaattatttattggcacctttggtatgttagaaataagctcaagcatggagagaaaaagccttatcattttgacttacaaagaagctaacatgaagcaaaggagggataaagtaagaagttttgctaaatggatatgccctctgctggctgctttaagattaatgtcgatgatatgagatagttcaagggatctgtgtagtgcaattattggtcttagagatgaaaatggcatgagtgttggtgttcaaggtatattagagatataaaaggagaaagtaaatgttttattattctgaattgttatttaatgatacaacaacaatgctttatatagggggaggatatacaaccctaggatagacaccaaacccaactaagaataacctatctctatacccaaacactaaataatatttaatatttgatatgccccctcaagatggagtgtacaagtttgtaacattcatcttggaaaataactccttgaaatgagatggaaaaagaggcttggtgagaaggtcgacaaggttgcgtttggtgttgacatgaagaagcttcaactggccactttgaacccgctcacggacgatatgacagtcaatatcgacatgttttgtcccttcatggaagatcgggtttttagaaatatgaatagcagctttgtgttgggttttatgccnnnnnnnnnnnnnnnnnnnnnnnnnttagttatcaatttagaagtgaagcatgtttacatgtatgttacatgt

SEQ ID NO: 162881 - DNA, 3139 bp, Cannabis sativa
taaggaaaaacgatagtgtatggaaaaaatagatatttaggagcactgacagcgatttttttattgagagatagccggtaaagaggaagaaatgagaattttagatatgatattagggtttacattatcgaatattatgaaataactgaaaaaataggcctctatgtgtatttataggctatttccacaaagcaagattgtctttaggtccgatagattaataacatttatatgaagaattgagattttttgttgttttctcttggtttggacaaaagctaatactttagaaaactcatcaatttgagaaatattgatgacaagcatgagttgttgggtgctggtagctcaaggaagtttaaagttaaaaaattctacttcctccttattttcgaagagaatgtgaattaccacaaggtactctagcataagttaaagatcccgaagcatcgttttattttatggcaggcggttaacgaacatgtcttaacttgtgatctccttaccaggtttattaatgtggagtctttatcatgtcctatttgtgagttaactttagagtctcatattcatttctctttttaaacgtgcttttcctagaaaggtgatttatgaggtaacaaactggttgggccaaattaattggcagaaaaatcttaatgagtggctgaacagagcagttgagcctctaaattgggtaataacccgcgtaatcccgatattctaactagtaactacccataaatcttgtcccgctaattctaagatactaaatcatatttgagtggcataattggccagaacctcgatttccactattactgggcataaagcgtgaaaaatactaaaattcatataggacatgcacaacacaactgaaatttaataaaatttttataattgagaaattataactctaatgcctttttatgacaatagggcttatttttttcctaatgcacaaataataataaattattaattaaatcaataatattctgctaattttcatgtctagttatgcggttattatattaataattttagccaacatatctgttcttttaacacctacacaagtaattcagctagtgaaggataaggtccaagctttaaatcacaaccatttaaaaaccaactcactagctctttgagaaaatttacagtaaaaaaagagatggccataactaatatttatttaacaaagttgaaattatgatttttaaatttagagaaaattagtgaacttttcaaactcacttaattttgttattttccttaaaaatgagaaataaggagatttatgcatttaaaattacttagcttatgattttgatactaaaagaaatttttactgtttaaaaataactcattttatgttttcatctcaaagttatttatttattttatttaccaacataaacctacaagtttaaacttattttttaaaaattatttttttaaaatttttttttctaagtatcatcttaaaatctattcttatactaacctaaacaaaaaatgatttattactcatcaaaattttgctaagctaaatgagatgagaagaaaaagaatcaaggaagaagaaaaaaaaataaagaagataaataaaaagtgataatacataggagagaggagagagaaagagaaaaaaaaagaaaaaagagaataaatgtgagtaattatataaatgggtctcattatattaaatattaataaaaaatatatttgaattatgataattttattacatgacacattgtattggagacacatgtcataatagacctttccttttatttttaatctactacatgcaactacactttatttaatgtgtataatcaaaagtcatacatacatatcaatgatcaagaaaatgtcttcatagaatgaggataaaataggtatgtccaccataaaaattttcaatatatataatactaaaagataattttttcttttctaaccaatgacaaaaaaaaaatgatattaaagaatttagaaatgaattcactaattaaagtttaaattttaataaaatttttatcttctcatatgcttgctaatatatatgtgagaatttatttcttatgcaagttacaaataaatacaaataaaaaagtagtacgccgacacttactattaaattaaattaagtataattattaattaattttttgcaatttattactatagaataattttttagcaatttatacacataatttttatgtatgggaatgctttaaatggattttctcataaatgggtaatttattattggtcattaaatcaaatctaatgattcatacttataattattaagtcaatttcaaaaattaatatactttttttttattttaacttattacttgatgacatggcaattaattttttttccttatttttgtttgattctttgtattccatcctcattcttaaaataaataaaattattaaaggaaaaactattttgtgtatgaaagtgttatcaaagaaaaaataagatttcctaaaaaattatttattgctgagaaaaaataaaaacaaaaaaaaaatctcaaataaaaaaattctaatttcactcaaaaggttcatatttgatcttaatcaatgttatattaaaattacatgaaatccttaaaaaaataccaaaaaaaaaaaaattgtagttgagcagcatataacatataattaattatgttaatttagagtaatataaatgtcatgaatgaaaatcaaagtttaaaacctttcttcaactacatataaactaattatatatttttttcaagacctattaaatcataatgaatgcaatttaattaatatttattattggtgtaaagataaagtagtaatttcagcaaaataagttagtttctaaaaataacttctaatttcttcaaattatttgatgaaattattgttcccaagtttataaaaaaataatataattttaaaaaatatttttagttacttgctatagcaagaaattagattcccacattataaattattttagtacctattgttattccaaaattggcactctgacgtggcatcacgagagtggtgactcgtggactccacttggagcatctgttcggaacgatatgccgagcaggatgcc

SEQ ID NO: 162882 - DNA, 1594 bp, Cannabis sativa
ccaaaaaaaaaaaaagatacgttcattcataaagcattaaaaaatattagacctcacgatcgttacaacaaatgttcgtaggaatagtagtaacatcaaggcacccataaaggttctgggtaaaagtccaattagtcacgttatgggccataaaattacatgatctagccgtaaaacaaaataaacaggtaatgaaaaaggaacaattcttttacaaaataaagagtagttttcaatttctcatcggggttcgacaccgttgagagtgttgatcactatctttgatcgctttccaccaggagaaactaatgtcctttgtcctttgcaacctcaagcgccaagcaaaccgcagttgctttgccacaaagaacattagaaaagtctattctggccgtaaacacccaaagcaccttgcacaggaagtctctagcaacaattgctacacacatatgctcatctccaaccttagcatcacaatttaatttgatccagtcttgaagttaaagaagcaaactcgtttctctcttgttccttcccattgctcctcatgctcacgctttcttttccacatctctttgatttctttttcatcctttttcagcctaccttcctcttcggatatctaaatgcttaaaacaatagccaaaataatggaaatagccaagacttcaacataccctcatctgcatttttcttctccaccattcttgtttagttaataattctctaatctttaatttcagttcttgtttaaattcttttgaatgttcgtagtgttgatcgtatttcccttgcatcatagacacataataattagtacaactagaatctgaaatcattaaaaaaattaactgtaattaggcaatgtaatctagtgctgtctttataataattaaaatcatatatgtattatacaaaaagtttttattttttatagttactttgatgattttgagaatattcttaatggaatgttgggtttttgggcttcttattattgaatttttggcttctttctaatttcaatttgataatttattagtggattgggcttattataaagataatatctttcttctaataactaaaatcaaactattctaatttaatttgtttgttatataagacttttttttttagaaaaagctagaggccatggccacctcacaattatacataccactgtatatgaaattaaatgttagttgtttcatttcaagattatgctgtttttattttgtgaggttaaattatttttatttttaaattatttttgctactagaatacaataattatttttttcatataaaccgtaaaagtaattaaatgattgaaacccttctcaggttataattcctaactctgggtttataaaatattctttatttgaaatttggattttatagagcaaatataatgagttcttgaaagaagtgtacaattgcaaaaaaagaaaaaaagtatttgtgaattaaatttcatcttactgtataaataaataaaaagttaagagtaatttgcggcataaatacttaagttttatgccgagtagcagataaatacctaagtcctatttttggcggtaaaaatacc

SEQ ID NO: 162883 - DNA, 2904 bp, Cannabis sativa
aaaaaaaaaaaaaaagcaataaattcataaaaatgtaaaatttatcatttttgtatatttatgaaataatccccatataaaatgtgcatataatatatctttatattcattatatcattaactatcacttgaaataaaaaaaaaaaatattagtaaaattattttttttaactaaggaacatactcaatttatatatacaaccatacaaataataacatataaagttaaaactttatcaattatttttatatattatatttattatttaggagaaagaatactattaatagaatgcgggttgaataattaaaatgtatatgtcattttctataacatacatttatttgttatttgaaatagtcactattcttttatatagactgcttttcaatatattcttgtaaaattgcggccactaattaattatacatgttattttttgtatcttaatgataacccttgctggagcaggctgcccgactatgtctctgggtgcccttgccaggtgccttgggaggaggaggagttgtcctgggcaaagagttgcgaatgacaggctgattggtcggaggtgggcttgaaggaggtggcggcaaagaagtctaggtcacatccgaggcagtccccgtcatagcaaccttggactgagcacgcccgccagagaggctgctcgatcgttgcctcatcaaatcttttagtctaaaggccgtgtctgcaaaagaaaaacaacgaggtcagtatataagtaataaatataaaatgcaagcaaaaataaaagagttactaccgtcaatttcttcatgatgatctacccaaggagtgccacctaaaggcccctcatcctcagaagagaactcactggagctatcttcagtcatgacagccttgcccttgcctttgtccgccagcacaggctagacaggtcttgcatgcccctgcctctcaggcttgatcaaaattgggacatcaccaacagtggccccacatacaagacgccgccgcagagcatggttcttcctggtctctgtctgggccaccttggccaaagaagcctccttagcagacatgccctttcccttctcaacagcaggtctcttccttttttttactcattcctaaagggagcattaccagggtcctgaggagggttatttgaagcaacaacacccccaccagaatggtacaaaccatacttcctaaaattctcctcaaatgccagtgtgcaaatgttgcatcgagttgctaagagaaacagaatatggttggccctatccctcaatgtcaatgtggggagtggccaactataggttggaacagtgaaaaaactgatggatgccctttatgttgcatgccatcaagtaacttctggcatagcctccaacctttgacatggttgtgtcattagtaccgacaagccactgatgccctcctggctaaaataaaagtacccagtccaattctgcctaggaatgtatttcaactcaagtaattcacctcgagtaactttaaaataaaaaagattttaacaaaactaatatagatacaccatgatctttaagtaatatgcttttgattctaacaaaatatgaaaaaaaatattaatttttctttctacgtggcaaaaagacaatataaataataaatagtgtataagggtcatttctctacaagttttgaaatgaagacatttacttacatagtgctatgatttggtcatgcatttgctataattttccaaacaaaaatcacattatcaatccatttaagttttatttaactgtgtagtctcatacttacacagtctcagaatcattacacttgaccttcccccaagcgatgtcggattgcataggtcccaaatttttcccttgcggatcatgagactctaactatcacatatatagcttgaattgattctctctatgcgcttgaaacaaatatttagtgtattagttgtgtttctaagagacattctttttacaatgatcttgaatcattgttagttgatttgtagcaagtatgttatccaaattttgaggaatatctctaatctatgttcatttgatggtcataaggttgcacataaattagatgtatatgctttattatctttggaatgtttagtagttgtatgactatagtttattatttgagaaatgctaaaaaaacaccttaagatgttaagcattacaagagatatcatactacaatttgaaatctaatctcacctattttaatttaataaataacataaaaaattactaatcactgttaaacccgtataatattagacaagtggatttattatttgaaagatatattcattgctttcaaaaataaataaataaatattttgctacacaatggatggaactttcaagtcaatcacttctatccaaaattgtaagagatatatattatatataatctccggcactgtacacgcatgggtgagtacactgaaaatctcacgaactacgtattatactgagagccgaaaagccactttcagcctctgctgactatagattgaaaagatcgtttttttccccagttatatgtgctttttcttccttcgaaaaacccacttattttttgtgtttttaattgaacaaagcatcgtttgtaattttatttttatttttattttagtttaattaggatttttatctccctacatctattaaattatttctctgaatttttaaggtcattcaaaatgtctcttgaattattgagattattggatttaaggatttttgtctaattgtagtaaaaaagataaaagttgacggagcatgatttagtatatgtcaaagttcgaacataatttaatagatatcaaaatctgaggagcataatttaatacataaacaattattgaaatagtaaaattgaatgaa

SEQ ID NO: 162884 - DNA, 870 bp, Cannabis sativa
ctgcacgtaaggtcttgaagactggctgtttcttgttagcagatgcggcaatctaagataatgctcattttctaatgctttttgccatttctgcagcttgaacccaacgtagcttctgctttcctgaaggtactctttgtcaatgtcttttatttaacagttaaacttgttcacatttcagatctttgacatttcttcaacctcatgcagttcaaaatctttctgcaaaagaatgaccaggctggttcactaaatcagattcaagtaatgactacctgcgttgattttagtccagactttctttccctcgcagcccacgaagccattgcttgccatgtttttcccgtggctgttgctgctttgtcaaatctccttaacttctatgtctctggaaaatccatgccaacaacagaagttgtagttctacgcacgctggtatctattttaagtcaagaatctaacaacgagcaggaaattctaaagtttgtaaaatgggcttgtaatagggcatctgaacttgggccagattgcttctttggaaaaggggaagttggaagacgagaatggaattggtttactgtgagttcttggaactttgggataaaaagtggaaaggagatgaaatttcaattatgtgctgatttcttgagattagcatcagaactttttggtcttaaggttgatgatgggaaagtagatgaaaataatactatgatctgcaagtcaatagtactgtctgtatctgccatgatagcttcggaggatcagaggaagattgcattgactgatacagaagtcaaacaaatcatggagctgctagatagagcagggaaggtatcgaacaacaaatttcttattagatatatgttt

SEQ ID NO: 162885 - DNA, 6623 bp, Cannabis sativa
tatatatataaatattatataatttaaactctatatttctctctatccttacagagaaaaaataagtagcttagttatgtttgtgtatgtaatgtaggcgaatcagtgatatatacagtggcagttcttctcttgattttgtcagaaatttgacaaacttgaatgagttgtaagagcgaaaactcaattcagttatacttgttgaccctgactttagtatgtaactaacttatttataaaatgttttctctctttttaacagaattctcagaaatgctttaatcaatggaaaaattccatcttatattgaaggatttctgagcctaaaaacactgtatgtttcgataccaaagcaatctgatcaactgaagtagctttcacaatcattatttatgactgttattcattgatcttttgtagggatctgagtttcaacaacttaacaggcgagatcccaagttcattgttcactatgaatataacatcattgtaatgaagaagcagtgattatctatttttctcaagttcatttccttaagcttgatttgtaaacttcaaatagaaaaccttcaatactaactctgactggtatctattctttttatttgtggtgcttctcttattggacagatttttgggaaacaacagtctgtctggaatccttccaagccaattgaatgacaatattcagaatatgtaagttcttataacatatgattgtgttatgttgactatgtatacaaatatctcaaggaagtatagtcattatacaaaatttaaaggacttcacaggtgacagaaacagttcaaggatagcctgctgaatgaatcttaaaaataatgcaatgaaatactactgtgtattgctgccattttacttttcttttttcttttcctgaatttaacatgctgttgatttttcatgtatattactttctctgatctattctaatatgtacaataatctgtgcagagatgcatcttataatcacctatcaggtagtttgccaccatgggtaatcaccatgtcccaattgtatgtctctttattttccttcttcaactttgtaattgttgttcatgtagtgctgctttatcaagtgtgggtgtgggtgagcatattatattgctacagaatgtgattatagtaaatttctgcaggaacttagtggccaacgattttgtattcgacagctcaaataaatcgtaagtatggtattaactgtatttctgtagtttcacaaacttagacacttctttctactgatttttttttcttttaagagttcttgctggattggaatgccttcagagagactttccatgtaatagaaatgctgcaccttgtaagtgtctttcattcaacttatttgctcatttatagggcactgatataggcacttctcttcaatctgccttcatcatgagctttaaataatagtccatatgtttccctgtgttatctctgtgcaatggaatgaaagatcacaagttgaatgattcaaggttgaattaaaatacataatgtgttcttaactcaccccaatagatcagaaaaccattttttactgtatgaatcattgccgtttgaacctattgaatttcacagatacaaacttctcacttaaatgtgggggaccagaggtgagaggaaatacaggcatagtttatgaagctgaaagattatatcttgggccagcaaaattttatgtaatagatgagaggtgggcagttagcaaggtaggcttgtttgctgacaaacgaggtaaactagacattgaaggtaacctggcacaagtcaccggctccactgagaacccggagcttttccatactgcaagaatgtccccaggatcgctaagatactatggtcttggtcttcagaatggaccttacactgtaactttgcattttgctgaaatcggttttccaaatcgaaactctcaaaagtgggcaggactagcacggcgcatgtttgatatttatattcaggtaatacttagtgcagtgttagagaggacacaatttattgcatcatgtgaagatcaatctccgagcaatatgcagtcaatgctttaactacagatctcatcattttcatttcagggaagtcttagacataaggactttgacatagcaaaggaagcaggtggggtagagaaagcattagttaagaaattcaaagttactgtgtcagaaaactatcttgaaatccatttgttttgggctggaaagggtacatgttgcatacctaaacaaggttattatggtcctttgatagcagctattcatgctacttcaggttcttaacatcaaatgacatcaaatattttaatatgatttttctacttatattttctattgacaaattccaactatttttatcagatttcacaccttctgggatgagaaaatctagccaaagaggcaagaataagacagtgttgatccttgcaattaccatccctgccgtggtagttttcattttattactatttggagtagtttacattaggagaaaatcaaacaatggtgatgacacaggtaattattaactgaataggaacataccttatagtctagtctagtcttgttaatagccatatcagtctttgatatcatattcttgtttcaaatctacagctgttcttggttcaagccatcatctcaatacttatagctacgctgaactaagagctgccacagatgacttcaatttttcgaataagctaggtgaaggaggatttggccatgttcacaaggtaaactggattcttttagttcaaacgatatttttctatggattttagttaccaatcattgaattattttgtgaatacttttcagggaacgcttccagatgggaaggtagtcgctgttaagcaactttctgtagaatctcaccatggaaagagtcaatttcttgcagaaattgcaaccatttctgttgtgcaacatcgcaatctcgtaaaacttcttggatgctgtatggaaggagacaaacgattgctggtttatgagtatctcaaaaacagaagccttgatctagcattatttggtaagaagccattgggtatcggtaatgcagaagtgtttcattttgtttcttctgcaacaaagttaaactcgtaagaaaaactagattttttgttttttttcatttgtttgacatttgagattgcaaattcaaagcttcttgtctaatatggttttcttgtagacaaacacaatttacagcctgaaaaagcaatacttgaattgaagttgaataattgaattctccaaagcacacttagccttataggaataaactttcctttacatgtttttccccttcctttttcaacttaaaatgcattgacttgttcctgtgctgcaagtttttttaaagtgaaatagagaatgttttgaagttaatcatatgaaaatttgtctacatactattgcagaaaagaaagagttccaccttgactggcctactcgcttcaatatatgcttgggaacagcaagaggacttgcttatcttcatgaagaatccatgccaagaattgtacatcgagacgtcaaagctagtaatattttgctcgatgcagctctttgtcctaaaatatcagactttggactggcaaagctatacgatgacaataaaacacatgttagcactagagttgcaggaacaatgtaagatcttttaacaccataccatttcaagtttttatatttcttacttatccttttaatgaaccctacaatcattagacgcagaaaatcttagtgaatttcttggtaagttcccacaaggaataaaatcccagagagcaaactatgatacctaattctcatgacttaacacaaaactgttataaaatatagtcaggcaaaggaatagaactgcatatacattgaactagtaatttcaatatatgacatcttacttaatcttattcaatgatcttgtagaggatatttagcaccagaatatgctttgcgtgggcacctgacagaaaaggctgatgtttttgcttttggtgttcttgctttggagatccttagtgggagaccaaacttctgcaatggcctggaaaatgagaagatttatctccttgaatgggtagagaaattttccttgcataagtttcttccactctaacaaattggcatcacatagtgaaaaattagagaatgaatttttttcaaaacttgttattacatcatagttatggttggttcccatatgttacaatctatgtgatcaaagttacaagtcttgattaatatgtacaggcatggaacttatacgaaatgaaccaatctttggagcttgtggatccaacattaaccgaattcgatgaaaatgaagccacaagattggtaagagtggctcttttgtgtactcaagcgtcattgtggttgcggccaccaatgtcacgtgtcattggaatgcttcttggagatatggaaattgaggctataacatcaaaaccaagttatcttacagattttgattttaaagatactagcactagtgtcttttcaagcgatgttgatacttcacgtgattattcatccaagtctatgtgagaaccagcatggttttgctccatcaaaattgggatattattcatgacttttcatgtggtcatattttttctaattcacatggtttcttggatatgtatagatgtttatttttaggctttcatcgtatttgtggtagtgattattatgccttgtaaagttgaccatttgtaaaaaggttgtttggttctgggtataccccaaggtttttttttcatcaagtttgtcttcaagtccttgcctattgatttttaacctgaatggtcgtgctatggcacactaactacaaatctgtgagtttcttctgaataataataaataaaaaaaaaaaaaaaaaatcaaagaccaaagaagctgaaatgttccttctgataatcaaaattgcaaagtgtgtattgaaaaacaaacattttcttaactttttaattttctttctactctctcatatgatggcccaccaaagtaagttcggatcttccacaggagcaaaggtaaattccaaagggaaatttaatttttcatgcttacatgtgcttaaattttttctctaaactcataataattaatatttgtaacatatgacaacttttatattatccctaaaatatacatctcaattctccatttacatcacccccctctctcttcttctctctttttctcttactggggagctcccctaccaccacaaagcaacacaaatgtttcttctcttcactcattctcttcttttcactacactacaactaaaagctacaatattttctctcattggacggagcatcatatacgaaacatcaatgggtaattctttttttaagaaatcttttttgttgttgatgtatttagtttagaatgttgtttggatgcttgatctgtgagttgttgttgttattttgctgttttgtgtgttgaaatgcttgcggtatgtgaatactgcatttttcttggagtctgcaatttttttcatctggtctgatggagtccgatgtgggcccgatggtggttcgatacataacgtaagtatcaagatagggatggaagcccaattatggccaaatggggtggttcgatgggtggtttgggacattattttatatggggtccaatatgagcccgatgggcctgatgggtggtccgatgggtgtccaatatgggtttgggacattatttttatatgaggtctgatatgagcccgatgggctcaatgggtgtccaatgtgggtttgggacattatttttatggtgggtccgatatgagcccgatgggtagtccgatagctgtccaatataagtttggggacattatttttgatggggtccgatatgggcccgattgggttcgatggtttacagttttactgcatcttcaagaatttggatcacttttcggtgagatttttgttcaaaattgtaattgtatttttttttaatgtaagtgacaggttcaactgttaatgcatttgttgtgtataatggtgtttgggagtttgagggtagagattgggtttataactgggccgaaaatttaacatttgacattgatatgaatgtaagctactcaggtttggttgatcttttgtatgaagaactggatgttgacaaagtgcagtatgacttgaaattggaagtaaattacaagtacatgaaagacttaatgtatcgccctaaagttattagaaatgatatgcgtgcaaggttctatttgtctacacttgcgaagaagccagatgaatttattcccttgtttgtgactttgttaaagaaaaatatttgtgttgatcctagtcccacaccaagttctgttaaggacactcatagcgaggttgggagtttttttccaaaaacaaatctagaggtgttggttgtcgatgtgttacctgaattaaacactatgatgccgagtgttgatattgcagcataaatgtccatcattgatggttttttttttatggtccagaccctgaatgctatgttgagggcaatgatgatgtaagagacaaccaagatatagaggtccttgctgatgtagctttgaacttgac

SEQ ID NO: 162886 - DNA, 2402 bp, Cannabis sativa
  modified_base (2362)..(2377): a, c, t, g, unknown or other
aaaaaaaaaaaaaacaataaacaacaacaacaaagcaaacagattttgaaacgggtcggccgaagattcatgattggacgtcgcctgacagagaggatgggcatgcgtcggacatccgctccacagtctccgtataaaagttgtgaacgaccttcatatttcagatgaggcgggactggcgggcactttcctcctccagcagtcggttggcttgtagtaggccctcaatttgaaacttggcatttgtaagctcagtccggagagtctcgttggcagtgcccaggtcacggtttgtctcttggacccgctctagctccgtcactagcgtgccaacctccacgatagccctttccgcctgtagggccgcttgtcaaacaataaggccaatttagaaaggctgaagtgctagaacatgggatagcgcaaactgaatgaaaagacaaaatcttaaagtcttaccccaacgacctgcctctttgcaaaatgggccagcgcaaaagcatccgcgctgctgcaaaatgcccaaatcttcgtgggcaattttgaggcgctccctgccacttggtccaagagctctgcagtgaaaggagcggcctcttgccccaacttataggccagccagttctccagggcttcaacctcgacggtttgccccgcgggaggcgttgcgtgcatgtcatctgctatctccaccttacggaccgccaacatcacggccgccctcggtgaacctggagcctctccgtctctaaacgcccttttagggccctattcgcttctttttccctctatatctccagagggtcaaaaggaaccaccctcctagggaaggtgaaccctaccgaaggtgtccttaacggggctgagggaagagacctaggctggcccagcctcagttggaaataaggaggtcgggggtggtcccccataccccccatattgaggtccgacaccaagagcttctgcttcttcctggcagaagaactgctgcccgccatcttggaaggaccggtcctctccagagtcgacataatgtacctatcataagtcggtactacagaaaaagaaaagggtcattgtttggccctaagattcccaagaagtgacgctgctgaaactggagtcccagaagcaggtgcactgtaatgattccctgagaaactattaagtgaacgaagaacgtaccagtgatgaggcagatgatttcggcgtggtgtccttggcagaaaaatcagtatctgacagcaacaacgttcaaatgtaactgagaagaagggaactcgaaaagctttgacttggcgggcaagaagagtgaaaaatgtaatggctgctgaaggtatttatgggacgcctaggaaggtacacctttcgtaagaagccgacacttcagttcgccccaagagatgttcgatgattggatgtgagaagctgaaagggtacctcacctcccaacggacggctcccatcattacatgcatcgtaaagaacactcagtgaatgagaagactgcctaagtccaatcgtcgccattttgagcttcccagaggtacgcgcgcccagcacgcgcgtaggaatccaaaagtcagcatttaaaatcctaacatagaggcaaaggaaatcatacctcccacataaggacactacaatttgacggctcatgacataatgcattaaagggctcgtcataaataccacgtgcgcaaaaagttgaagacactgcaagctcccggaccagggtatgtctcagaagcttgtggggtaaatgttatctacattttcgttggaacgacacgtggacattaattaaaaagaaacaaaaagtcgttaagctgcatacgtgccttgcctcacgctccgggaagatgccaacatgaacctcgcaaaataagtccctacgagagacgtcttcccagaaagaggccacaaaagagatatctgcgagccagtgacatttcccattctaaaagacgggaccctttgctcccgcaaagaatatagaccttccaccgagctgcaccaggtcggggtacgcgtgtcaggctacagacccaatggtggggtttttacttgtacgatgttagaggctgtctcccacgacacgctaccatgcatatcatgtgtgtccttatgtactatgcaaaaccatctaacaactaggaataagggtaattcaaatgagaacggccctggaatgacacgcgtccaaagcaccgccagtatagccagtacaatctgacatcggtaaagaccacatggaaaatatgccacctactaattcgacggtggggggttcgtgttggaaattattttaccaggttctagatttactaacatgtatattggattaacaacctaatatgannnnnnnnnnnnnnnnaataaacacatataaagttagaaaa

SEQ ID NO: 162887 - DNA, 2572 bp, Cannabis sativa
ttttttttttttttttatacaaatactaagaaaaaaatctctcaattaaataataaatatcaatttagtttttttttgaatggaaatatatcaatttagcttttgttttgtaataaaatattgtgttgaaaacttagcactagtcaagacattttgttttagggattttaatatattaaattttgcattatttgcataattgttttcaataatgttccttgataattatttgactttattttcttttttgttattttacttggcttcgtaaatagtgtatttgtttttcttcattattttgtttgtttatgtatagaaatattttgacttgatatttttttactatgtcaaagtataataaaagaacagaaaaaaagaaagaaaaaaaaaaggatcgataactgacctgatggtctagaagaagtgtgagagtgatgatgataatggtggtgatcacggcgtggagcaatctgacgatatctagaccgaaatggccagaaagtagccaagcgactccacctcatgttccgctgattatttccaacagatgatccctcatcagacccaccaccgccacgcccaacaccaacactattggcctcacccacttcaaccggcaactcgtggcggcaaacagggcaagagttgtgaagcctaagccacggcacaatgcaatccttgtgatatatatgcttgcacggcagctctttcgcctccccacccaactcaaactcctccttacaaacagggcaatattccgtatccttattcaggtgggattcctttattttaatcgtcagaatcgagctaattgccgattcaggcgccggagcaggcccctgtcggtcgttctgagtcaattcttctattaattcgttcattccaggcccgaaaaaatagtcccttatattcaccctaggcgttccagggttttctggatggagaatcggagagaacgggcttgaaggatcgatgggcctgagtataatccatgacctgggacggtttcggcgtctggattcagtttcagcttcggttgaactattctcaatcgtcattgtagtcccgtcgaagctatggtttcgccgacgagttctccccgccggcctaggcggaggcggaggcggttgattagtggattgggcagcagggtcccaagtatcagttccttcttgattaatatgagcgtggtgacggtggcctagccacggaatcaaggcaccgtattgggaagcttcttcgtcttggtcgtagagaacggaattgaagcggcggcggccaataggggggtcgagcatgagtgttagagcttcgagaagacgagcttcaggggaaggatcgtaatcggtgtaatctatgaaaaggcgaggcctaattccaacgtcgatttcgcggacgaattgaccgaaacaccgggggcaaacgacgtcggaggggttggatgaaggagcaatcctgaccgtccgattgcattgatagcaccagtgagggtggaaggatctggttccgatgacatggtttcccaaattgttatcagaagacatgattggttgttatgaagatgaatgagggttttaaattcagaaaagggttaattcttaattatgttagagtttgtttatatataattgattaggaagaaagaaagaaggaaagaagaaaggaaggaaagaatgaaggaaagaagaaaggaaagaatgaagagagtttgcttgtgtttggagttctactattggctattcgctcaccctaatctcactttttcagttgtaacaaagaaaagtatgagtgggatttgatgcaaaatcaaacaagttttcaaatttggagggaatatagttattattaacggctaacttttggagcacagaatgtataatcgtttcttttggtttttgtattaataacttttttttttgttcctcattaataccctgatcagaacgagaaatgagtaggaggagtcttgtactcttttagaccaaatcaaaacttcaatcatcccaatgtatgtttatatgtagtatgtacatatagtcatatctgccaataaataaaattttgggattcatataataatacccatattttttttttcatatttttactgtcaaacttttacttttatatttttattgtactaaattctcaaaaatattatcttaaaattttaaaattacaaaaatactacagatctttacagttgcattcttctttattgctattaaagaaacttttttggcatatgtaaaaacaagatttttcatgtagatcacaaatgtgaaaattacatgaaatatgagatttcataaaaaaagttaaaaaaaatatggcatttataggtttgccactcttctatgacattttttttcacatttaagatttttgtatggtatttaatatgccatatttttaggaaaatttacaaaatactgtaatttgggttaacttctacaaaaatactgtcacacagacaaaatttcaaaaatactgtgtttttataaaacacaagtaaaacacaaagcagaacaactcaaaacaacattagaacaactacaaaacaccagtagaa

SEQ ID NO: 162888 - DNA, 6380 bp, Cannabis sativa
  modified_base (283)..(292): a, c, t, g, unknown or other
cccttctcctttctcgacagcacgctagcttctcaacccagatggtgccaccgacatgccgacccagacggtgaaggcttgcctctctcttttccgtcattttattcctctcttcgaatgcaaacctagacgacgctaaaggaatgactcaaaacctcaccgtctccgcttcatcttctctttgccttgcccaagcgattgaagatctgaaatcctcatcaatgaaactccaaggtatataaactgatcttcttctctatttattttctctctctctctctcnnnnnnnnnntctctctctctatctctctcttttgtgcagatggatggtgttcgtgtttaatgatgttattggtttgacgagctacgtgtttgactaatttttggtaagattggctttgggtttgacgggattggtgttcaaattgttctgggctcgtggttgacaaagggtggggcctgaagttcatggtttgacgggcttggtgttcaaacatagaggtgttgggatttattttgacgatagcgtaatgttcgtgatgtatggtggtgcctatgatctgatttattgttaatacaagaatctcattttttttgtttaggttttttttttttttttcaaaatgtgttttatttaattttggattttgtatacattttctatgtgttccaaattgttttgagtattatgtttgtgtaatatatttcaacttttcagtttaatttttttattgtgtttgttgattcatttggacatgtaattcagattatcatactttgtattactaattttaatttcgaaaaaaaataattaatatattattgtgattttttttatcaaataaaaattattttttatttttataaaaaaatcttataatattcttatttcttgaaaataaaaaaataaaaaaaatagatatagtgacactctataaacatagctattatttttacagtctgacaatgggggactttaaaagtttatagtgatgtgcaatgaatgactgtaaaagggtttagtgaaatgccgtgaagggtcactaaaaactcgctttccagtcacccccattactgacgcgcagtgaagtgtcgctaaacagttttagagtcactcaacatgggtcactgaaacccatttttctagtagtgtccttcagttctaaactgtttggaaaaacctccacttacctattccaacggtctttataattgaccgtcttattaaccgttagaaaaagccaattttgtaggcgtgtaacattgtgcatattttttttttgcgatttatgttatgttttgtgcgacattattgtgattttcgtgctacattatggatgtttgcatttttgcaatttatgttatgctttgtgcaatttggtgcaatagatatgcgatttattcttatatttgtatgcaattttgtgcgatatttgtcgatattaatacgatttgtactttttgcatatcgttgttcattaaattttgtactctcaaaattgggaggttgattattggaagtccaattgtgagggtgatgtccccacgatggatatgggcttggatgcggtcgaagaaacacaagttggcactcaagattcgaccgtattcgaaacccaagcaaaatgggtggccaaatatgttcaaagtgccaaaatcattccaccatcaccacacaaagaagcaccagagccctccacatatgccattgtgcccccaacctctattactgccaatgatgtcgactacttagggttggcaaagagattggagaatgtcgaagtgcaacaacttgcgattctgactgcacagactgagatgaaggctgactttaatagaagtcagaatgagatgaagaatcttatcatggatcaaattgcgaccgtgataagtttgttacagaagcagcaatcagcgccgacacaaccatcagaggtgacaaacccatcagaggcgacacatccatcacatttgggagataattgtgatgaggatgatgtgtatccaaaagattaggaacccaacatagatgaggttccttctactcaaatgtatgccattatgattgtcgtggatgatacacagtctcaggttgtaaaagagttggatgggccacctactggagtggaactcttgagggttaagagaaaatggaagccacttttcttgaaggactacacagaggggaagaagaaacaacgaacctgtgcaattgaagtagacactttgagaccagcagaatcgcggttgttaaaattttttcaaaagtggattactcactcatcctagggatgtccacactggcacagcaaatcgatcttagtttgtgaaagtgatggtgcacggagaatgactcgatgatgttgtaagttatttcttaactattcaaattctttgtttttcaacttttgtgcgacttatatgcgatttatgtgtgattattatataatttgtgcaacttctatgcaatatatgtgcgattattatataatttagtccaatcaatttattttgatatttgtgcaattttatgcggttatttgtgcaattattagaaaatttttgctgttattaatttatttgatatttgtgcgatttatatgcgatatttgtgcgagttcatgcgattccactctatagtaattaatttcttgcgatctttgtgtgatctatgtgcgacatttgtgagattatgtctaacttattttatttggaacacagcaacttgatgtcatggtgctcttgttgagaagaagacgaaagctctttggtgtagtgtacactcgaaaaatgtgtgattttttgacacatctgctccacaatcaaatgggatcaggccattcttaattatctggtggggatggagcatagacactttccgtgttgggagaaccaagattatatctactttgtgttaaaccttctcaaagagcaccaatgggtggatgttgaggtagatattgacaactgagagattgttgtatataactgtaatattggtgccacgactgaggagaacattaagtcatatttgaagccttatagcgagttattttcatccttattgcaggctagttgttattttcaattaaataattatgtactttcggttgatttaggtgatctcagctagcttctaccactatattatagaagagctacctctgaagttttaccagaaacaaaaacaagataaatctctcgcttttcatttatttaattttgtagtccattatgaatcacctaagttaattgttgctagtatttctaatattttaatttgtagtggcaattgtggaatgtttctcgttgaatacattgagcactgcatgttggatcgttcatttgagcttgttacggatgagaacatgctcacctttagacataggtggtgtgtagacttattttaccagaatttgacctggtagttgactgcatagtacattttttgtaattagtttaagacaatagtatttttgtaacttacttcatctacacataatcttttgtttaaactcgcccaaacatcgcacatatattgcatagtcattgtaaatattacaattcatgaaaaatatcaagatctaatagaatatgaaatgaaatcgcataaatattgcaaagatatcacatagatatcgtgaataatgtaaattttgtaaaaaacttggcgaaaaatgaataattaattagcaaaaatgtcacacaaatatcgcatataaatcataattattgcaatatatgaaaaatattaagatcttatgaaacatggaaagttaaactgtaaaaatattgcatagacatcgtgaaaattgcaatatatgaaatatattaaaatatgaaaagtgaaatcgcacaattgttgcactgatatcacatatacatcgtaaaaaatgaataaatatgacaaatattgaaatataaatcgcaccaatgtcgcttacatattgcataaaatcgtaaataatatgatttttagcaaacaaaacatggaaataaaaatcacacagacatcacagaaatgtcgcaaacacaataaaaaaatacatggccactgttaaatatttaacatggccaaaacaatccagttaaacaacaaccagtaatacaacacatatgcaactaatattgatatctaagaaactattagagaaaaggttcaaactcgagcgttgcatgttgctttgttgtgccctacacctccacagagcgaacaatgatgaggttccactagtacctgaccattagacagtcgacgctttgtcagtcttgtactggcattgctcttcctaggccaacttattggttttttctccaatggtaccctgactcttatgctcttgatgtgttttagtaatacccactcatcttcctcaccaacaatattaattgttgcaacgtagatcttcttccaggtttcttttgtgtaatatggggagcaaagtgcgtataggctcgcattctgactaattgccgcagcacatgcatgtggacaagggattttatgcaattggaacagtctaaaagtgcatgttctctctactaagtccacatcgtcacctctttcaccttgaggactcataccaacattaaattattgcgcaccattacgaaggacactcctgaacataccatctttgtgttgtgctattaaatcattttcaaaagtagtagccaaaggggtagtgcactaacttgccttttcgagacaaaaacaattttgaagtgtgaagctgatgaattcaactaaaatagttaggatattttttgaattttctgtcaccttgttgaagctttcggcagtgttgcttgtcaatatgttgcaccgatcgcttggacaataaggatgagcccacttttcaaagcctatttgctcgacgtatgtagcaatggcagggtccatctatttgagcacctcaaaatgtctatcacattccatcttgggccatgcgtaagctacaagccatatttgtttgtagcatacatcagccttgaacttgtgaacgaaattcatagtaatatggttggagcatgcacagtggcatgcttctgggaaaataaccttaatagcatgttcaatgctttgatgcctatccgatatgaacataagattttcaacctccccaatggcttcccttactttcgcaagatatatatccaagagttgtgattctcactgtcaacaattgcaaaggctacccgaaacaattggttatttacatcgtatgcaacagtaactaacattgtgcgtcgatacttcgtcttcaagagtgttccatcaatactaatcacaggacgacaaaacttaaatctcctcctacaagcatcgagtgactagaatttgtacttgaaccactcatcctctctaaaaatgtcagtaatagtacctggattcttctgttccagcatgtagaagtaaccatataactttgtataagattcttcaagagtacccctcgtgtacataacagtcttctctctgcacctccaagccttctcataactcatcttgatgccatactcatcaaacaaattcctctgtatatcttttgccttgtagttagttccatctgatgtgtacttgttcttaataatgtgcccaataacccacggtgctacttgacggtaattagaatttctagaatccaagttacatgtgtgtttgttatggaacatgatagcctcaaacacgtgacaacatgccttcttcttcccctttaatctccatttacaattttcatccttactagtaacctaaaacacatcagtgccagacttacttaccatccactcaaaattatttttcaatgcacaccttcccacttcatatttcaattcttccttgtttttgtacaacttgccaagatatatctcccctgaaggcgtaccagtaagagattttgtatacacattattttcctctatgtcttctcttgtccacataaaaggtttgaattcagtagaaacttcaaattcagatacaagagtactaatagaaggacctggccgactactactagttcatagtgtttggtgatttgcactatggggggtcttctttatcgctcaagttggtttcttagagttagttccatcctcaggggaggtacctttgtagccacatcatcatccccacccaaatctaccataagaccattgtagtaaaagggagcatcgaactaatttgaatgatcaaatgcgatatggactctgtcatcatctatattagtaccaagttggtcattcaaacaaatcctcagatcagtttttgggaaaaatgtcccaacaacacttctaggcattacatttcgaggagtaggctccaaattcacattctttctcaccttagtcacaaatagtggcaacaagttgtccacact

SEQ ID NO: 162889 - DNA, 1948 bp, Cannabis sativa
  modified_base (1895)..(1923): a, c, t, g, unknown or other
attttcagaattgtcttccacattcccctgtttggctcccaattcctctgtttgggactccactaatttcctaagctcaccaagaatgtcttcatcttcatcatcatctcatcatcatcatcattgaaatctaactcgccaatttttgactcaaagttcccaccttcaatttcaaaatccatatctgagagaaaactgtcagttgttgaatcaataaattgactcataaatgagaattcatggctcgaagtaatggaatccgagtcagaatctgaacacatatagttactttctgacaaaaacttctctcctttctcctcattaatttcttgtaccttttgagaattgttttctctgtcattctctgaatcaactttcccagaattagaagaatcttctttaatgacattaacctcttcttgtttcccaaaatcgttttcagacaagaacccagaatcaataacctcaccaagtttcaatgaagaatctccattagagtctgcaaataactccttaataaaaaagttggaaactttagcttcttcaacgaaaaagctaaggttttcaccagaaacaaaatcatatttgttgctaaaaactttcacttctggttcctcagaacaaaactggttcccactcgagctggcaaaatcaccatggcttttactgaattcttcatatgttggaaacttaaatgtgaaaccaaaatggggttttgaatcttccaacgaatcatccaaatcttcatctttttctggctcaataagactcgaaccaatttggtactcagctttagaagaattgttcatctgggtagaatcgttttcaatatatctaaaaaaaaaaacaagaaaaccccacatgaataatagaataaacagtaaaagaattatgaacacaaagatcagaagaacagttggtttacctgtgaaaaaacttggggaagaatctgaagagagtgagtaagagagaggaaatagtgacccaaaaagaggaaaaagaaaaaagaggcatctttgtacgaaaaaaggcatgatttttattagtagtaatagcagtaggagtagcagtagatgccatgttcacaaaatcaaactatgtacagaaatacaaacttgaatattgggccacccatcatcaattaaatccatcttcatttagtgtctttaattattatttcattctgaagcaaaaaaagagaagagaagagagattagtcgataggcagtttgattccaaggttgaaattttcaaaagtgaaaacagagacaggtaagctgtaaaaatagtagagaagagattatgagagcaaaaacttgtgcatgggaaagaattgagtgaggttgaaatgagacctaatttgggggaatattttgaggtgaggtgggatttacaagcaaaaatcacgtattggaaaagaacttgtcagcgaacttggtttttggttattagaactaatccttagcttattaggttgcttagagcctaggaatactctcaggaccgttatgtctatgagactatgaatatgatcgacataataacaaaagattaattacacaattaacataataatatatacattaatataattttgtatttatataagttgggaggtctgtgttttggggtttccttttttctatgcgcactagaggagatgaagaaaattgggtcaaattgaaagtttacgtctttatttatagttttatttaaggctaaatatttttttttttcagaaacttttggaatgtctcgtgtatattataaaattattaaaatggctagattatgttgggaatcatgaagttctatttcaaaaccaattggcaatgattggagtagctggctctcataacatgttgggaatcatggggttccatctcaaaatcaannnnnnnnnnnnnnnnnnnnnnnnnnnnntatatatggctcaatattcttacat

SEQ ID NO: 162890 - DNA, 2045 bp, Cannabis sativa
ttttttttttttttttttatgcgagtgacattatagctcatcattatgagtagtagaagaggatggtgattgagaattttggtggcagcaattggtggtggtacttaagctttgaaaccacaagtgatctgcctcgactgagtccaagtcgttgttacggtgccatgaccaatgtgcatgtgtctcattcaccacagtcaatctcccatgtccgaagcttgcttctctgaacaatgatagaggtgaagcaggattttcgaatctgcatatatttacatattttgtgtcactcataaaattacgtaccccaattaaaaagcctattgggcctcagtatccaataacatagtatatggaagcaacaacaaaagagctattttttattttttttaagaacaaccaaaacgtgctatttaaaaaaagttattttagctttttcaaaagaagaagaaattattatagagcttattttaactttatactttctaaatttcaagcaatgttcattttatttaaaataaaataaaataaaataaaagaataataatcctctttttcttttttgttcataatgctccttattttagttaaagttaatagattatttaattatttcatataatgtaaaaaattttattaaaaaataaagtaaatttttttatataatgaaagaaatagcttacgctaatgcaagtccctctctgttcccaccgtcaccaatggtcacgtacattggaccacacgactcagctttattgtcgtaaatccttgtctaaaaaaatcaaaccacaaaaaccaattattactccaaaaaaaaaaaaaaaatcagattaaagtcataaaatataaattataaccttaaataattaattaaaaaaaaataaagaattgaaccattttctaaaaagaaataaataaaaaagaaaaacttacaaaacgttcataggcatgaacatgaccagcgaaaacgacatcaacccgagccttataaagcaactcttccaaagctttcctcatactctccccttcaccacgatgagccaaattcgtgttataccacggcgcgtgcaccaacgcgaacacccacggtgtcttcactctatcgattccggccagatcggcggctagccacttgaactgatcggaatcggagtcgaaatcggtgtaggaaccgagcataataacgtgagaaccggcgatctcgaaggagtagtaaaggtttgaggtggaggcactctgtaggtagggcatgggccacctggcattgtaggccttgaatggatgggggaagatgattgggatggtctccacctcgtgattgccttgggtgaccatccatgggcggcggctggcgtagggctccactaatcggccgaaggaatcccatagtggctggtgtgtgtcggcgtaggagagatctcctgggagtaacaaaacgtcgtagtttttgctatctatgtgtttcagagtcgatgcggtccattccgtttggcctaggtctcctgttaaaaacgacctcgtttttagctattacaatgtcgttttggatacatatctatatagctcttgagtgtgagtctgagagacttattattttgaaaattttaaccaaaaaaattaaaaaaaaaaaccttcacatgaaatttttttatttttattcggtaacttttttatttataaaaatatttttttagaaaaaataataaattattttgtttgttattttatatttatttatagtagtatataacccttatagttatcatatgttatttttaaatttaaatttatttattattgatttataattgtcatgatattaatttgttgttcttttcttactttttattaagaaaaatatatttttataatttaaaattttacaaatatatttttatataaaaaaaatttctttgcatccaaaagattataaatgcactcttttttttttttgaaagaaaatgtcattttaaaaaattttattttacaaaaaatatatatctttaattatgttagtttttttttttttttttttaatttatact

SEQ ID NO: 162891 - DNA, 2455 bp, Cannabis sativa
ttatatgaaatttttatcatatataacactaacataaataagatgttctgatgccctactatgcatctctggctcggcaacactatcgatggcttaatttaaataatgaaagcatatcaagtgttctcacgaattgtaaagcactaaactaaatatcactaataaagagtggcttcacatttcaaatttcaataacaaaacgacacacgaaaggatggtagcttacttttctatgattgttaggatggattctgtttgctgctaccggatcaatgcttttgagatgttcatagctatcagttattccttcacaatccaacttagacaatggttgtatatcttcatctcctatgtaaaagttgaagtcggtgtttaataacttaaaaagggtaagacaaaatttaaaatagattggcaaaaattacctagagaagtatttaagcaattgtcatccatatcttctgttgtttcgtctagaaggaatggacttataagggcctgagaagtgcaaatattataagctaaacacttgaacaaagacagtgaatgtaaacaatatgtagcaggatggtcagagagttcgatcttagcggagcgaagtagctatatctccatgcacgataaaagatttagcacaatacacaaatatttaactacctaatcagcattttctttctataagtggtgagaaggcatagatcccaattttttaagaagaaagccacagttattaaaagacatcattattctagagaacagaacactaaacataaaacaatataggtgcatcataactgtttttgcaacaagaaaatttctggccttccctgatgtaaactgaagaataaagtagatttatacctgtatgtagtaatgtgtacccccaactatgactggcaagcagttacgagacaagatatcatcaataagctgaaaaaccatttcatgattcagtaaataaaataaaatccacatggtggtgaagcttttgcaaaataaactttgaaattaaaaaaaaaaaaagcttttgttttcacctaacaaaaatatattagcaaaattatcttcatggttcttgaagcaatcatatttacacagttacaagttacaacaacccttatgatcgattataaagagtgtcctttcatgagcaacccaacgccaggagagttgacgaaattaaattttggaacccctatataaataattttctagtaaattaatatcaaatatggtgatttagtgtagtgcatggtgaaagattttttaatatacaaagaggtcctatgctacagccaggtgtagattgtcatcaagagtcattttcatataaaatatgcgccttagcccaggaccgaccctgcccaacaatcaatgttgagaagattgatttgataaattcacatgatcagaagacaaaaagtagactttcaacactttccatagaaaaatagataaataaaaagcataagctccaacatcataccatactagccttgagttgtttgtctaaatgtgtcaatgaattacaaaggctcaaaacaaagagtgttttgtaaaaaaaattattagtaaaataatctagtatggccacagaaacgaccatgaattataccgtgcgaccataaacaaccattatagtcgcaaaacaaacatagatttactctgtgcaaatgttcgcatacagtaaattaagtgaggttattttgtaaattttagtatttcaaattgttaaagtttaacattaatactatgttacacaaaaacatacaatctaaattcaaaagaacagattttgaagtgagtaaacaaaacttacaggaacagcacaatctctaaactctttagctgagaattcaacatttgggttcactgtcccaagaagatgatgaggcacccctacaccatttttaacattaaaacaaaattagcactaaaagataagaatgaaagaaagtgagaaatagaagattggctaagtaaagacccttttgttcatggagtgagactttgttggttagaacatccaagcctttgtagacctgcatagaatcagcattgatgacctcaacgggaaattgagaacccaaatcaatggccaattttgattttcctgaaccagttggacccattattaccaccactttgggcttctctttcgttactgctttggtgggttgtgctccatgaatggaaaggtttatctttctcaggtgttcttcctctgccataataagaggtaaaccctggttgggaagtgccctaaacaacaaccctaagtgaagagaaaggtggtcttcttcctctctcaatcttacaactcaaaaacagttttttatgtttttgaaaagttggggaattcttaagggtaaataccattttggaccctctgttttacaaaagttatcaactggactctgtgttttgttaaatgacaaaatggaccctgcatttt

SEQ ID NO: 162892 - DNA, 1729 bp, Cannabis sativa
  modified_base (1526)..(1528): a, c, t, g, unknown or other
ggctggccagccgataatcatggaccttccttcaaggaggacttcacccataagtaggtcttcaggcaacgggggcccacaagtcttgccgaagggcttgttcatccattggtcagaggattgctaatgtcgcttggaactatattgataggactctacctatcattaacagggagctgcaggagctagagtgctcgacatccagcgaccactgggacataacatctataagttttatattttattttactcaaattatttcaattataggggctggccagctagatgggcaccactcaggggttggctgaccaaaagtgcaccactaaggggctagctgaccaggtcatcttctacttctaacttggttttcttttttattttaggccacgttgaagttcagccttactcatgatagagccaagggctcttttgaagttcattgggataagttaaaggccaaagagatcgagcttcaaatagagagggacacacatgtttagacacaggttcgtctgagagaaaacctaggacctgaataatggcctagaacacttacttggtacaggtgccaagtagtgaccaagcttgttgctaaagcttcacagttggagattaagcttgagaatgagcatcgagagaagccactagcccatatggacaataagccattaagtacgagtatttaggcttgtcctctgaggtcctctatgtggtttacttgcataaccttgatgtcaaccttaggtacatatggtctactttctgtgagaaatcactcactcaggggaaggagctctatgaaagtaagatgctggcggaccaaatcagctagggggtaggcaagacaattgtccagactgaggggtcatcatctagccatcttaacgaggctatggccagcaagcccacggaggaggtggccggccaggctactggccgaccatcctgtagaggctatgcccaaccagaatcttggagattaggatgttgcagctcccagcttgattccccctacacatgcgcacgagtagaaacttttcattattataatatgtttttgcttatattttacattggtttcatgttcttgtaagtgttggaataagttttaccaggatctagatttactacaatgtatgttatttaacatcctaaatatgaatctttaaaacaatgtaaatacacacatataaagtttgagagaccttacagttggggcagcgaaattataatggctccttccactcagatctctaaccgttatatcctatctgtagcagagtatcaccaagatctaagcccgaatatccttctcttgaatatggattcttcatagccttacgcactatgattgagtaccactttatgtgtgtgggcacttactctatcactacagggtttgaaaatatgaagagaggttcgaatatggtagaagagatggctcaaaattttttattgaaggcaagtgttcatcatctttttacttgaggccatcacaatctatttataggcaaccacctagnnntaggttagaattatttggcattaagatattgaaaaaaaataaatggtaaaatagggataagtggccggccatggatattgggcacttttcaattttgccatttttccaatttttccttattttctcaaaagcgacattcttccaattaaaccacttaaatgccaaaactatttacttattattaaaattaattatcaaata

SEQ ID NO: 162893 - DNA, 941 bp, Cannabis sativa
cccgccacagccttggcaggatcagatgtgctagtgttccctagagaaaccgaaggacacaatgttaacattccacttgacgatgtccctgatccactatgttgctgctgttgttgctcaggtcgacgtctttgagaataataagctcctgctgcagcagcagctgcagatgctgtagttggggtgttgctattagaatgtggtgtttgattaggaatgttgtaagagaaatatagttgagcatgctgtagtgattgcttagagtgcatttgctgctgctgctgctgcgacattaaattcttggatcctgtgctggaggaagaggtgatgtgtggattgccaaggattgactgtacattttttccaggaccaggagaagacttcatgtttgagacggatggggagttcttggcctgctgagatgacaatgaagaagcttggccaactttgtttgctgtggatgtggaagtagttgtccttgggctcccaccagcactttttgacaccgaggaagtcgtgggggaccctaccattattggaggagatggagattgattgctattgctattctgcagcacttgagattgccctggttgtttaggattggctgcaaaagatatttgtgtatgtgtctgttgagtgcgatttggctgctgagatagatttttgagggaggatgaggttgatgaggtcatagatggagagggagcttgagaagtcgttgaccttccagaatttttccactgaggagaatgagctggactattattgctatgaacaaggtttgagggaaaggtggataaggcattggggaacttagcagccattgatgaattgttgtggtgatcagagtacacattgccattacttgttgctggtgtcttggatcgggatgctgcattggtgaattgttgctgctgctgctgctgttgttgctgctg

SEQ ID NO: 162894 - DNA, 2266 bp, Cannabis sativa
cccataagtgtcgaaggatacaaacacttcttaactattgtcaatgataaatcacgcttcacttggacatatcttctcaaagcaaaatcggatgtccaacatatcataatagatttttttactttaatatgcacccagttctctgccaaaatcaaggttgtccgaactgataatgccaaggaacgtaatcgtcgttccttctttgcttcaaaggttgttcttccatatcactcttgtgtagaacgaccccaacaaaactccgttgttgaacggaaataccaacaccttcttaatgtagctcgggcactgttattccattcccatataccaattcactactggtcctatatcattaggactgcaacatacttaatcaaccacaccccatctgccctcttcaaagagctcacttcatttgaggtgctatgcaacaaaacccccacttatgatcacctacgaagctttgggagccttgcctatgcttctactctcttgtcttaacgacacaaattctccccacgaagtcaggcctcagtttttattggctatctcgataggatgaaagcctacactctattagatcttcaaaccaatcaaatataatagtctcgagatgttattttttatgaagatatcttcccattcaaaaataactcctccatccattgtattgatttttttaatcttaatgtgctcccctcaaacagcacctctgcaggtccacaccgtcaccatcattatcacacatttccacccaatgccactcccaatcaaaccacacaaacttcttcatcctcacaagtcattactcaaactgaaagattatctcacaaaccatcatatcttgatgattgtgaatgtcaagtagctgttgttccagcttcaactatacatcccattgagaatcatcttgactatactactcttcctccagagtttatagcagttgcccttgctacccatataatcattgaacccacatcctatgaagaagcatccaaattccaggtatggaatgatgccatggacaatgaaacacaagccttagaaaaagttaaaacttggatagtcacttctcttcctccaggccataaacccattgggtgcaagtatgtttataaagtcaaatataaccaacaaggtgcggtagaacgtcacaaattaagccaagaccaaggagatctcctctgtgacccttcctcctaccaaagtctcattggcaaacttgtttatctcacaatatctcggcctgatatctcctatgctgtcaatcgtctaagtcaatatctaaccgcccaaggttaccacacttgaacgccactcacaaaatattacaatacttaaaaggtatcccaagacaaggtttgttctttccatcctcaagtacccacaccatctccgcttatgctgaaaccaacttatccccatctacagtataattgaaacttttttttgatgctgattggggaagttgtcaacataccaggtgctccatcactggttactgtgtgtttttaggttcctccctcatcttgtggaaatcaaaaaaacaacaaacgatctctcggtcatctgcagaagctgaataccgcgccatggcgcatgccacttgtgaagtcacctggatcatggccatactcaaatattttggcatcactcccaccaatcctgcacttctatattgtgaaaatgatgcagccattcacatctttgagaaccttgtttaccacgagcgcaccgaacatgtggagatatattgccacatcgtctgggagaaagtcaaccaagacacactcattgagatacatgtcccctccaagcacaaccttgcgcgcagatcttttcacaaaagctctgtttccctcccagtttctaaatattatctccaagatgggtgtacaaaacttgtacactccaccttgaggggggctgttagacacgtgattagtttttctgttgttattgttaggttaggggctagcttaccaccgactctgctttgcctatatatatggcgaaccttcttttgtaacagaatatacaacaataaaaagataataaaacaattgcagagttttcctctctccaccaactcataattcaatgtatcttttatacaaccttacaaaaaaaccatgtttctttttataaaaatactcgatcttgatgtgaaatacaaaatgaagatgtataacaaatgcaaactaataattaaatcgataaaagtaacgtaaaagaagagccaagcagaatgttgcaacaggaa

SEQ ID NO: 162895 - DNA, 1777 bp, Cannabis sativa
  modified_base (1097)..(1098): a, c, t, g, unknown or other
ttaccaaacgacacctatatgttttgtttatgctttccttattgagtctgtcgactcatagatatgtgtttaatgtgtatgtaaaggcaaggcaaaaactgaataagcggtcagtttggagctccatgaagattgcacacttcgggacgatatgtgcttaatgtgtaggtaaaggcaaggcaaacatgttttcaacactgtaaactattcggaatttcgcaaaaatttacaataataatattataactataacaaactccgtaaaaattgtttttaaaaaatattccggcatgcatttttggaggcaaaagttgagaaaaaaaattgtaatagaaggttgtaattagcactactctgagaaaaaaaaaataagaaaatgtcattaagtaccagtgcattgaacattcaacctatagtgcttttggagcttcaaaagtctaaaagtgacttctgaaagccaatcaaccagcgctctctctatatattgattgattaggaaaggaaagcagttgttatgcattttactataccctaactgaaaatacattactttgtataaatttgagcatgctgctcctttcatcaacgacccttctttcaaactatgtctgtctctcatgatggcaccacaacaaccctccctcgttgcagaacactgcctcaatgtagctcttgctattaacaccatcttcgtcattgacactgcactaatcaatcttgccaatctgtttttttttttttttttacgataaaaaatcaaatctaatacttaaaactattatttaaagatttcgaacacatctatatataatttactaattttggttgcaatttttagctatgtaactaaatttgcataattttaaacagtaatacttttgcgatgcttaacgatgttttttgtgatggtgacatgaaaacttgttaggggaaaaaaatgatgcttagtcaatgatgtcatggaaacttaatttttttttggccaaaaataatgataaaatattgatgtttatttatttttacacttaaaaacattttttatttgcatttttacggaattctacatagaaacctatattgcaactagcgctgcaacnnaaattgcaataaaaaatcgtatagtaacccatatagaaaccaccggagaaactcaaacagtaaattttttttttaaaaaaaagttaaaaaaaacagtatacgaagtaatttccctcatttttaacgatgatcttgcaagggatacaattagataactttggggaaacaaatctgttcacttggttgtcagtatcatttataactttgggacgcagaataataaatctattcgtttgaggctacaatgaaatttaagccttaaaatttccattttatacacatttaaggttatacacattctaaatgtgtagacctccaagtgaacagttatcaattaccaaagttaaaatcattttattatactgtcgcaaagttaaaaaaatattgttttacgattgttaaaactatctgactgaaaatcattttaaaagcatcgttaagcatcgctaaaacatcagtattgtaaaccaaaaaatacgttattattccatcatagcgaaagtacttaagcatcattctaattttttagcattgctattaagtaccagtgctgtccagtaccttttatgagtgacgttatacaattaattagcgatatttaattacatcaatagcaataaaacaccaaagaggctactagcttcttttaacaattctcttcttttttttttttaataaa

SEQ ID NO: 162896 - DNA, 976 bp, Cannabis sativa
aggattgaaaccctttgtcaaatcatttctatatctatagacaagtgcatcccacttttcaatgtgttgtacggaaataagaaacttgaatgggtcgaggaatgtgaaagagccttctaggaactaaatgagcatttgaccaaggctccaatattatccaagccgatggaaggagaactgttatacctttatttggcaatgtatgatcatgccttgagtgccgccttagcgcaagaggaaggaagggttcaactactattgtattacataagcaaaagacttctcaacgcagagtccaggtatcctatgatagagaaactatccttttgcttgctaatctcttctagaaagttaagaccctactttcaggcccacaccatcaaggtaatgaataatcatcctctccaccaagtgatttagaagctggagtcattcaatagatttctaaaatgggctatggaacttagccaatttgatatccaatattagccccaggttccaatcaaggggtaggccttagctaactttgtagtagagtgttctggaatgaatgacctcctggatgagctagtcccaaaatttccagtcttaaaggtttgcgttgacggagcatccaatgaaaagggagttggagtaggaattatataaatttttctatgaggatatcagctccaaagttctctccgctttggaatttctagtctccaacaatgaagctgaacacgaagctatgatagttggcatgcaattggctaaggaagtaggagcccaaagtgtaatatctcggaaattaatatagtgtttacttggacatattttattaaatatgtaattattttggtaatgaagtaagattatgatcttacctagggaaattggtgtgactttattaaatgattaaataaagcgtaatttattaattacggatattttttttaaaaaaatatgtggatatcgtgggtactatttttttttt

SEQ ID NO: 162897 - DNA, 3761 bp, Cannabis sativa
atgagaaacacattctcatagcatataacatataacaagtatcaagttatatatcttatatacctcaaacaaagatagataaaccacactagcttattcataaaaaccacataaaatagtattaccctaatgaacaaaagaagccttccacttgaagagatcaaaagccttgcgtttttgctggatatatctattggcttcatcgttgatagaactggcttcagaaccatttgttttcataccagaattactagtacttttcctaacattttcatcagtaacaccactatttgatgagtagccaataatctcaaccttgtcctcaaattgagggtgctgctgcttcttcttctgctgcttattggtgctgttttggtagtactcttcttctctgatatcttccgaggttgctcgagaaccgacagctttcggggcatggaagaatcttggagaaactaatccatagcgaggaacattagtagagatgttagtgctttgcatcctagccaaattcaagacatgatcatggtaatcttgagatgatgatgatgatgatgacatgttcttggatttgtagtagttatcatcatcatcatcatagcttctccacattgccatattgtcttcttaatctttgtattgattaatgcttgttaattattatgaaaactcttggaattaactgcaaatttatacaagtttttttggcaatatattattccttttagtgttcagatttgcatctaattctcgtatctattgtctatttcagatagtgattttcaaaaaggaatataatatttatataaatacatattttatttggttgaaaatgatttgagagccaacaaagatggattggagtgtgatggagttgggttgggattctttcttccttctagaaaatgaattaatccaaaggcaagaaagattaaagaacaaataaatagattagatgttaaagaacaattagtaatacataaaacgtttttaggaacaattaattatgaacgaacatatggaaagaaatcattgttttcttagtctcattccattcgacataccaaacaaattaattaaataaaacttttttttttttgggtgaagtaccatagtaaaacaagttaatattattttatactccgatattttgtaaaatttattaattggactatttgttttgttaaatgacaaaataaattataatgataacaaaatagtactctaagttcaactttcaataatttgttttaacataactaacttaaagataattttcaacacgaatagatgtataaaatataatcaatcttgtcataacacctttaaattgggttattattaaattttatttttgcaaaatataagttcatagtactatttagtactgttttagaaaatataggatccaatttatcctttaacaaaatagaaagtccaatccataacttttataaaatacaaagtttaaaatagtatttattcttataacacttggttatgggatataaacttttacataaaatacttaaaatgacacttattttttacaattttattgaaaaattgagtttttttttttatatatatttttacggattttaatttacttttttttatgatttttatttatattgttatcgaaaacaacctaaaaataacataatgtaaatgtaacaacatcgtaaaaataacatagaagcaaccttttattaaaataatacaaaataattatctgaatatttattaataaaaaaactatataaattcgtaaaaatgttaaattaaaactactacacattatttttgtaagcttttacttttctttgttataaattaccattaatgttgataaaaaaaaaattacctttcaaattgctcagtataagcaaatgtttattaattactaaaatttaaaattgattggaaaagattaagtgaacgaaaaagaatacatacttaatttgatgattacctaagaacatatatatttaaaatgaaaaaaaaatagttatcaaatttatatatataatagaacatgttacaataatttttctataataacaaattaaatattgtatttgatttaatttataaaatataactaattagttaaaatattcaaataatggtcatatttgattactaaatatttcaattatccaatttaatttttaaaattaattgtcaaaatattttgataattaatgtggcagagaccttaatgaaatgtcttacctatataaatatagggtctcggtctctgagctcactactcattctgtgacacataatatatctatctaaagagagtagagagagtttagaagttcgattacacacactaattaatttcctttctttgcagatcggtgtgagattgaagctcaaagaatcaatgactggagatatttcgatcatttaactatatcgtgtatatgttcaatgaatttcgcttttcatacacaatcatatatgcttcatgttttcatataaaatatctaatagttagtatcagagcaaatttttatctctgtcttagttcatttgagcttatatacgtatatgcatatatatatatatatgttcatggccaatttaaataaaattttcattttaattattgtcggatgaatttgaacaataccaaaatttatgcgagtatttaatgctattaagaatacttagataaaatttatgagtactcacttatagtagcgagtattgaaagaattagctactaacaaacagaacgaaaactagaaataacaagagcacaaagaaagtataatggttcagtcagatctcagtttgtttagtccacttttgcaaagatttcagcttagtttatttgatttggatcactcctttatatacaaagcaagtatccttttagctttacataactggtctgttttagaaacgttcaacaataaatgacagtattaaatcagaacaaatatcaaagaataaatgaagaacaatttaattcattcttatattaagtgtggcaatttaattcataaagttatttttatgaatgttcgcatacctttatagtttttagggatagaaattgtatgagatcaataagaattatacatgagttttttttctccctgaaaaattgcatgaaatcaataggaataaccatagtgcagctcaatcccatggtaagaaaaacaaaagacaacttgagagccaattaaatttcatcaataacgggtgcactcattcgttttttgaaggggtgcaccacatataataccaagtttttatcttttatttcattttttttcaaatagtaaaataaataataactttaaggaataaaaataaataactttaaaaatggtaaaaaaaaaaatgaaacttaaaaaggaagaaaaaagatgaagaagaacaagtgactaatttgattatctaatatatcaacaaaaatatgaagacacttgaaattagccaactatatatccacgatccaccacaataactttattagaacatcttcaaccggacttcaaaatactaaatatagtgtagtttcacactatatttactcaaatgtgacattaaaactattcttataaataggtttgtttacgatactgtagaacacactatttttgctttttaagtttttaataattaaataatacttcttaagagaaaaaaaaattaaataattatatatttagtattaaaatatttttattatattaataaaataatagaataataaataatataaaatttggtgt

SEQ ID NO: 162898 - DNA, 5102 bp, Cannabis sativa
  modified_base (4017)..(4018): a, c, t, g, unknown or other
tgtaggtgatcctttaaacatgattaaggctagttttgagaagggacttcctctgcagatgattggagagctaacccgtggtgtaaatgaaatgtcgtcttatctccccgtaagaaatggttttagcacttagttatttggcatacacttatattggaatttatattgttctcaaaactagcctttggcccatccttttttttttaataagaagatatttttttatgggtggtaatgctctagtgcatagtaaattatcacatcatcaattgtactttttcatgctgatttgcaataacattatcttaactagcccttttttcgggatcaatggttgaagccaacaggttctggccgacattttaccaagagatacactactttggaagctacaaatgcttagatcagcttctgcatttgctaattcacgcctccatgctgtaaaagccgaaactctaatactttgcaggtctatatccattcctttctaactgatattactgattggaattaatagagttacaattcttgtcccaaaccattatgtatagtgtcaactgtcaaagctgaattctttgaaaaacctgaagaagcaaaaagaagagtaattaaatttacttatacactttactcatgacattagtgaaaattagcacacagaagcttattgttttgcaatgtggcagagccatttagaactcatccataattttcattataatagttctttgctgcttaagcttgtgcattagtcagaatgacaacactttcactgtttgttttctttagcggaaaggacctgttgctacctagtaaggaggaaggtgaaagactctaccaaattttgccaaattctaggattcgcaattttgaggagagtggtcacttcattctaatggtaggactaaaatagtagttgaatatatattatttgttaattaattatttttacatctgaaacttcatttgaattgcaatcctatggctccaatacatgcaggaagatgaaactgatgtggtaactatcatcaagggttctattttctaccgccgttcgaaaaatcatgattatgtttctgattttattccaccaaccccttatgaattcagaaagatggtggaatcaaaccagtaagtataacttatgaagaatatagaactagttatcctcgtctattttaccgtatgctctcttgtttgctgatgtagactagccaatgagttttatttattgactaaaacagagaagaccaagaattgcaactagcatatgtatacacatcataggagtaggactctaatgtacttttgagatgatttaaatctcgaacatactagctttccaatgcttgatattggctttgtatgcttttatcacgttagtctgcatcgtaatactaatgtttcatgtatgaaaattgattcttgtttatttaataatagttaataatccatagcctgctgtatgggttaaagaagcagtttttcacttgtgcctgttcatgtatgctttttaatatcgctcttgcttgcccaattctaatcactatcaattatgttatacttagatggattaacgtggctgccagcccagtgatgttctcgacattagatgatgggaagatagtgagaagccttgcaggaataccttcagaaggtcctgtcttattcgttggttatcatatgttgctaggattagaattggctccttttgtatctcagttgttgatagaaaggaatatccttgtcagaggaatagcacatcctatgatgttcatgaaagtagctaaaggaagcctacctgagtatccacatttcgagtcaatgagaattatgggggcagttcctgtgtctgcaatgaacttctacaaacttttctcttccaagtctcatgtcttactatatccaggtgggatgcgtgaggctcttcaccggaaggtaacagttttgacctttaacatcctagattttggttaaaaaagtgtagattccacatctctgaagcaataacattaggttcccctattctatcgtccttgctcgtttaacacacgaaaagaaaaaaacttctcaaatagataaaggaaaaggtgattacttcattttcaaacctgtcagcaaatatcttttggttgatttggaaatccatctttaatttatgatgagaagtactgtttccttgttacccatatgtatcaaacattggattagtcctgaaaactaacccacagtggttcaatcagtttgatgctggacttgtactaatttttagggtgaagagtacaagttattctggcctgaacagtcggagtttgtaagaatggcagctagatttggagccaaaatagtaccatttggagtcgttggggaagatgatattggagaagtaagtaaccaaacctcatatttctataatacaatctatctatctatatatatatgtacgatattataaatgttttctttttccatacaaggacgtccatgggttttctcattaattgtttataagaatatcatatttacatacatgatatttctaggaaaagaaacgaatatcccaatgtaatgtatcatgagtggtatggtggtatgggtttgatgtttgctatataattagtgatgtgaatgaatgacaattcagtgaccattattttaacataagcaccttccttgtgctcagctcttttttgattacgaagaccaaatgaaaataccatatctaagggcccagattgaagaattgacaaatcaagttgccaagttgaggtacacacagatattgaatgttttaatttcaacaaattaagtatttctttactagttttctttgtgaaatacactagtgatgatcttgtgagtacaggaataacgcaactggagaggtagcaaaccaacaagtacacctcccaggaattctaccgaaaatccctggccggttctactattattttgggaaaccaatcgaaacagaaggtagaataaagaagggatatttttctataatcataatatataatgaactaactgatttggataatttaattaacgataaatatataaatgatgtgattagggaggaagaaggagctaaaagacagggaaaaatctcatgaactttatttacatgtgaaatcagaagttgagagatgcataggttatttgaaagagaaaagagaaaaagatccttacagaaacctattgcctcggttagtttaccaggccactcatggttttacaactgaagttcctacatttgaaatttgatcaattcatacatttcatttgtgttgtgtacatacattacatacaaccccccattgccaattgccaattgccattgctgtgtctttataagctcattgaaattgtttgtggggtaattatatttgattgcaaagcaaactagtgttcatttgtaattttattttcgaggccatgttgattgtaaaactactaatgaggcctctgattaggacattgtcatgtcatcttgtttaatttccatttgtgatgaatagtcaatccttcgtctatatcattgaatagtctcattgatttttccccacaaaatactcagaagaaaattaaacaataaataaaaaaacttcagccctttaatctcgagtgttgctctaagttacacatgaagtgattttttttttttttggtaaattgcattataaatacataatgttttagattttatacacttaaataccttatcttaaattataaatatggacacgtggagagtttaaatgcattacatttatttattttattttaaaaattaatattcttaatatcataaattaaatgctacttgtttaaaaaaaaaaaaaagagatgcaaaacataattaccataattaggtgaaccagtgtagtatatgtgaaaattattaggaggattattttttttttttaaacaagtagcatttagtttatgatattaagaatattaagttttaaaatataataaataaatgtaatgtatctggaccctccacgtgtnnatatttatgagttaacggaagtgatagtaatcggtgtaagaaaattgtaacataagtatttttgcctctaaaaataaagataagatatttaaatgtataaatttgaaatattaggtatatatgccgcaatttatttattttttattttttttattttattattaaagagaattgctacggtcgaacatttttaagaatccccgtgttttaatgttaatggtggttcttgttaaaacatattttaataatgatttaaattttataaaagagaaaaattgagctcattgagctaaaaagccaaaatcgtgatgcatccagattaaaaatattttttttttatcatatacaatatttacaattagagctattaatattttagatggagtacatatgcttattattgctatagatatattttgtagagaaaatagaaatatctattaataggtaaattagataaagttatgatgaagttatagttcaaattttaaatttctccaagttagaaatttggtcgacatttgtatagtcttgttattactatttataggaataagatgacatttttttatcttatctagacaatagttatattagggtgaaatcaaaagtcaaaaccttgataatttttttatttgattattatcaactttaatttgttattctagttctttttattctcttttaattttataatattacttgaaatcgattgcttaaataaaattaagttttaatatttgttataattaattgttttaattatttttaatctttatgggatgataatcggtcacttgaccactattattacttgtcgatttgtacatttacaagcatatatataaaattcgcaacaatatcacacagtcaaactcatatatttattgctcaaaatacaagtataatacataataaatagcaaataaaaatctgaagatcccccaaatttgatgcctaaagagaaagatcaagaagacgtccttgctgaagagatttggatccattattatcagtgacggaaccagaatttttgatctgtgggggcttaattgttataaaaatatttattatttactttaca

SEQ ID NO: 162899 - DNA, 4384 bp, Cannabis sativa
  modified_base (1238)..(1240): a, c, t, g, unknown or other
  modified_base (3679)..(3688): a, c, t, g, unknown or other
tgtatatattataggtagaatattataggtagaataatttatatagatatgtgtatatattataggtagaatatttagtgttacgattagttaatgatactctataaaagttattatattaaattatatgggatccgatacttaattagaccaatactgatacagtcacatatgagggtgctatgcactactgtgcccaacatttctcatgtactctcttctttctacaattaatgcttcattatgaggaatttctaatatatgatacgaatccgacatggtcaaaaattatatcacatttacaagatatttaatagcttgttttgatgtatgttccattactttatagttatatatgatatttattataatgtagtgtataccaagttgcaataacatacatattatatttttgcttttcttataatgtgtatatatatagatttgtgtttgcattaattgttttgtttagattccatatatggttgtgctgtgccacccacaattgtcataaaatgtcctaatatatattaattaattacttcttaagtcaatagttgtgttagttagatcagttagaatattgaaagaatgaatcaatatatttatatttatagaaggttatggtatctattagtatctgataaagaaatcaattttagaatttctatttgtattattattatctaaattaatatttatttatttattttagaagactaggttgatttgttgaactgcttttttattttagtttattaatttttgtattattaatctcattttttatatggtcaaacatatttatatagtttattatataccaattaaatccaaataatgtccaaagccaagcagttgtgacaaacatagcaaacactccaacaaaccaaaatccttacaaatttttttgagaaatttgcggtgaaatttttttatgttttaatttttatacacttaatatttttattttttttttggtggcaaaatccccttaaatttacttttctttacaaatttaagatgtcagttaaatactaactggattactactatattgacttcgaaattttactgttacatatacataggtttatacagtggtcattcagttgatataagagaatttcgtcacaaattgctcaagttttattttattatacttatcatacttcagttgttctaatgagtaattttttaaagagaaaaaaaaatatttaaatctatatatatatatnnntatatatatatatatattaggtggatgttatgtaataagcgactttatttaagattttttctgtttttttttccaaattttaactatgttttttatttaataaagaatatagtgtgttttgtttgaaggaaaaatatatatactcaaaaaattatttaaatgtattaaaaacaatgagtatagttaagaaattacaaataaatttaatattaaaatgttaggatgttctttttaggttttttaagcatagtattgtaatgtaattataaatgaaaaaaaaaactatgtaaagtggtatgatcgtatgaatgattggtcttataaaagcaaacggtaggtcagtgtgtttagtaagtaaaacacgattgttttataaacaattgttacgtatattgatattaataataaacactacattaatctcaaaatatatactcctgtagcacttactttcaacgcaaaaatatcttagagcatatctatatctatatttatatatccaaataaagaaaagaacaaaagaatttatgtggcatcttacattcttttctttctagtttttctatttcgtgaggcattttgtgaaaaaaatcattatttgtatatttaattattacaataatagttaaaactatttgtatttttccaataaaaaaaaaaaaagaaaaatgctaaaagatatcagtagtgcctagcaccctcctatgtgtcaatatcgctataaggttcgattaagtatcgagtcccacatatagtttaatttaataacttttagagagtatcgctagccaatttttaaagaccgcttaattttaatatggaattagtagataattatggcttaattatgagtttgagattattatttattatttatgaaattattgagatttatttgaattcagggtgtattatttatgctatgtatgaaattttatattttcatgttttttgcccgacaacattaaaacgcggcgtttggccaatagaatcacatttaataatttttttttgtagtagtggggacacttagatagacattgggaatgttagaaattgtcaggattttagaaatgaccaaattacccctaggaagtttagaagctttttggtataagtgggggtgaaatggtcttttgccctaaatgaggttttgtcttttagtgacttagtatattgttttgttttatgtaagaattttattttaatgtttaattttagaatttatctcattttatcacaactagaaaaaaatcaagaaaatacttagctctttctctctccaaattctctctctttctcgagctccctagaagcaacaaggttttgggattttttagcttcatttttgggtaatctagcaagtttttggtgtttccaattgaaggtaaaccctttagcacctttcccctttgattacttaagctttaagttaagttattgcatgaatttgtgagttagggttctatggttgttaagtgtgtttgattttaagttctggtgttgtgttgatgttatttaagctctattatgttagatttgtaggttgttgtggtgattgagcaaggtttgagtttatgaactcaagctttgctctctaatgctggattttgattatggatgtgttgggttattttattgcttggattatgtctattatggtgtaattaggtactctggaaggtttggttgcatttgggatcgaattgtggttgttgtggggttttaggtgtttcctgcactgaatctgtcgaccggtttagtgggacttgtaggaactggagttccggttggtccacaggaaatccctcagtatcggtctttcggttggggaaccggtctgccagttggggcaattttgggaaccctagttttttctgtttttgtgatgtttagggtattttcatgttatccattgataggaaaacttttagttttgtttttaagtccttgaaaagtgatttagtgtgtcactcatccgttttacgaataatgtaatttaggggcatgttaatcgtcgaacaacagttccactcaggttggccggcacacctgaatttggaagtgagataagattagtataatgatatgcattgtgtttacatgtttagcgtacatgtttattaagcctgttagattacatcgatagcagtattagtaacgtagagttatattggatactaatagatgtatgtttagctcagatactgatcgacgctatcatatcggtacaactagagtatgactagcgtactgtgtatggttaatatttggtcgatagaattgtcgtacaaatgttctagactcagtactgtgttggacacggggatagggttatggttggatgtatgggcgcctgattataatccaggttatagttatattattgtttatgcttttcttattgagtctggcgactcacagatattgtttgcatgnnnnnnnnnnggcaaggctaaggttgagcagccgtgagagcaagtggatgaagattgtatatgtcagggcggttaggtctggagcatacggtctttgggacagctggttgtattttgtctaatcgctagacgacaacttttgtagtacatactttgtaacagttgaaaatattttctaatgggatcccggttatatatatatatatgttattttggtatttataagtatttaaataaagttttaattaatcacgattttcaataaactcgttgattagcaacgagctgtacagttagtctaaaatcactataacacgcctaaactagtagggtgttacacaatcgcaaggcgacatgtctagaggtgctagacactactggtgtccaatagcaatgctctaaaaaaattatttatattctttgaataattctatttatgtgacttttaatcttcatcaaaactcttaatattcttaccatactatatgtatatatatatatatatcctactattactcaatgttagaaatattaatgacagaaaaactgagtttttgtaaatgtcaataatatatatgagaatataaaacggtatacgtcaacagaagcaaatgtaattctgttactgcagaaaccagttttgcagcgacaaaacagaacagacagaatataaaaaataattgcagaaaattaaatcacttgacac

SEQ ID NO: 162900 - DNA, 6268 bp, Cannabis sativa
  modified_base (4832)..(4841): a, c, t, g, unknown or other
taaagctcactcagttgtattttcggattcaatcaatacaaactaattcattgtttttccttttctctagttctttgttctactgctatgttttgtaatatggtatcagagccactgatctagtgtggccctttttcttcttccttctttcatttccgatttgttcatggctcgtggtggagctcatggtggaactcgcactcgaagcacaaataatcaagaagatggagctgataactccaacatattctctgtcctggagcctggaaatcagttgcctcgagacaatcctcggagtccatacttcatttctggtggagatcaatccgtggttaacatagttcccaagatcttaacaggatgcgaaaattatagctagttgctcttactgctagaaacaagatcaagttcgtggatggtagattacctgaacctaaagaagatgatgatgattacacagttggtttaggtgcaacaacttagtcatttcttggattcttcatgccatttctggagaaatcgcagacagtgtcacatatttggacaatgctgccaagatttggtctgagctgcaagaaaggtattatcaaaagaatgctccgagggtgttcgaggctaagcgatctatgcaggctttgagtcaaggttcgaactccgttactacctattttactcgtttgaaatctttgtgggatcttatacaagaatttagaccacaacctatttgtagttgtggtgcaatgaaagtgatacaggaataccaggatgaagatcgggttcttgagtttttgattgggttaaatgagtcgtatagtaatgccaggtctcaaatattgatgcgagacccttttcccaacattaataaggcctttgcttctgttgttcaagaagaaaggcaaagagggattactactgcccctcaagaagagaaaaatccacatgattcttcatcaaattcagggcaatttgctggtagtgtccagccacacaagcccaaaactattttccatcattttagagttgcaggtcatatcatggaaaagtgctataggttacatggctacccttcaagacacaaattgcatgggaaatttcccaatagcaatgcccaggacttgcaaaacccccactgccaacctttctggtgtgtaagaaaatggtgctgctgcaggagaaaaccagaatattcaacaggactttatggctgcctttgctcaatgccagaagctgatgaatatgttgacacaaaggagcactgaaccccctaatcttggccaaaacagtcaaccatccgtgtcctaattatctggtaaaatcctttcaaaaccttctcaatcttgggtgttagacactcgtgccactcaccatgtctgtcataatttatctttattcaaagatacttggacagatgtgtctatttcttctgttaagttgcctaatggtttttctgccaaagtttcttgaattggtactattgttctttcaccaaatctcattcttaaaaatgctttgtatgtccctgattttcaagtcaatcttatttcagactcatccatgcttgattccaacacatgtgttttcactttttatttagatcattgtgaaattcatgacagtacgaggacccagctaattgggatggctgagaggcatgggaaattattctatacgaaatcgcacaatgagaaaatcagcccccttgtttttcctttaaattctgattccaagataaataatgatactatatggcattatagattaggccatccctcttgtatcaaaatttatcctttgaataaaagtttacagtttcataatcatgcttgtcccaattttcattgctctatttgccactatgctaaacaaagaaaattaccttttgtttcaaatcataatattgccaaagaatattttgatttaacacatattgacatatggggaccatacaatattcttactattgggggacacaagtactttatcaccattgtagatgatcattctagatacaattgggttcatttcatcaaaaccaaatctgaagcacaaacaaccattcccaatttcattcaacttgtgaaaacccaataccaaaagactactgaaggtgttaagtctgacaatgcaaaagagttgaaatttataaatttgttcaactctcttggaattgttcattatcattcttgcatccataggcctcaacaaaattctgttgttgagagaaaataccaacatttacttaatgttgctagagctttgctatttcaatcccacattcccttgaattattgggatgaatgtgttgctactgcaacatatctcattaatagaacacctacaccaaatttgcaaaacatttcatttcaccatttcaggttcttaaatctaaaccccctaagtatctagaaccaaaatttcaccaagagcagctccttgtattttcttgggatatcctactggtatgaaggcctataaattattagacctctactctaatagagttttttgttctagggatgtccaattccatgaaaccatctttccctttcatgtttctgattttttacctaatgcttacactaattttttccaagacaatcatcctttcagttccccgattcatgatcattttgttgaaccagatcagtttcctagtctcaatgttcctgcatctgttattcagcatgctgaggaagatgttgatgatcaaaataattatcaaagtgcatctggttctcaacatactgacagcagtatttgaggcactcaaaactctggtgtttctacccccattcataccagacctgttagaacttccaaaaaggcaacatacctacatgattatcattgttttcttgctataacatgtctcagaattcccatactgttaccccttactctatttctcatgttcttgactacaacaagttggccccccatttttgagcagcagtcttggctatttccagccatcatgaacctaaatttttccaccaagctcaaggcataccattgtgggataatgccatggataatgagattgattcccttgagaagaatcacacatgggttatagtcactttacttgctggtcatcatgcaattggatgcaagtgggcttacaaaattaaatacaatgttgatggttctatagaaagattcaaagctaggattgttgcaaagtggtcaatcagcaagaaggcattgattacatagatacttttgctccagtaactaagttggtgactgtcaaacttgtccttgctcttgctgccattaatggatggcatcttcaccaacttgatgtcaacaatgcttttttgcatggtgatttacatgaggaagtgtatatgactattcatcctgggtatagtcctaagggggagcttccacctaatgcagtttgtaaactcaataaatccttatatgggttgaaacaagcttcaagacaatagtttgaaaagttctcttgtgcattgtttgaggaaggttttcaacattcaactacagatcatttcttgtttatgaaacataatgaggagagtttcatcattcttctcatttatgttgatgatgtgataatggccaacaacaacatatctgcactagaggaattaaaggttaagttgaacaaaagatttcagcttaaagacctaggaaagttgaaatatttcctaagattagaagtagcaaggtctgaaaaatggatcttcatatcccaaaggccatataccttgcaattacttgaagatcttaggcatctagggtgtaaacctgtcaatacccccatggaagcaaatctaaaagtgtgtcaagacaaaaaggataagctagctgatcccaagctgtacagaataacaattggtaagattcaatatttgaatatcactagacccaatatattattttctgtcaacaaattaagtcaatttcttgctaatcctcaagccaaaaatctcaaagctgctcaaagggtattgcaaaatgtcaaaaactgtcctggacaggggttatttttccttgctaagtctgaagttaaactcaaagcctatacggatgttgactgggcagcatgtcctgacaccagaaaatccaccacaggcttctgaattttcattggagtgtccctgatttcctggaaaagcaagaaacaacaggccatttcaaggtcttctgcagaggccgaatgcagagctatggcaaacacgacatgtgagcttgtttggttgctgtccattctcaaagaacttaacattgaacaccaaggacctgctatgttttattgtgacaacaaagcagctcaacatatagctgctaatcttgtttttcatgaaaggacaaaacacattgaaatagattgtcacttggttcgtgagaaggtgcagcaaggagttataaaaacttgtcatgtttcttctaaagatcagttagctgatgtttttactaaagcactctttcctactcagtttaatgaattcaaaagcaagatgggattaatgagtattagttccccatcttgagggggagtatcaagagctagttggtagttaggagagtttgttttagttagttatgttgtccttgttttcagctaactgttttctcttttctgcaactactttcagttgcctttcttgtatttgagcttgagctatataaagctcactcagttgtattttctaattcaatcaatacaaattgattcattgcttttccttttctctagttctttgttctactgctctgttttgtaatagtggtttggactatcaccaataattaaactatcacaaatacaacaaagataaagcaacacttgtcaaaaataccannnnnnnnnnaaataaatatgaaaaaaaaattatgtttcaataatacaataattagtgggatttgggttggatattcagacctaaataactataaaaatttatatttttataatgtgcagtgtggtgcggtttgaaccgcatattaacaattcaaaaccacaaaccccaaaccaaaccgcgcagtttaggaaaaattcaaaccgcgacaccgtaaagaatttaaaactgcattttttgtttgcggtgcgagcagtttgatgaacacccctaatagaagatagatctatattatataaactactgaaaaatagggtttgggcgactctttaaaatagtcgggtaaattattattgatggtttataaaattgacgcttaccaccaacacaaaatggaatgaaataagtgtcgggtcactacaaaagattagatttttaacataacatctataacaaagataatttgtgattaaatatgtttttttttgtcacaactcatagtaaataatatgttagttacaatgaatttttggtgataattttaaaatttttaaatgccataattactaaaaggttaaaactaaatgttgccattgaaaatacatttaatcacaattgtaaaattttataactaaaatttctaattaattatcatttagttgtcacttttttaaattgtaactaataactttgtttttaatcacaactaattaatttataaactcacttagtcacaaccatatttaatatctttgtcatatattaaattaaatttaaagtctatatttaccatatattaaaaaataatatcctaaatgttggaacttattttattaggatctagatttactaacatgtatatttgattatattctataatttaacatcctaaacataaatttcttaaaataataaataaagacataaaattctagaaacccttacattggtggcaacgaaatattataaatctttctatacagatctctaactcttgttcctttctgtcgcagagtattaccaagatctgaacctggatctcctttaggtgttggaattcttcacaatcttttatactatgattgagtactgacttgaattgagtgggcaaggtactcttcagtaggggttcgagattatgaagagaatgagagaggaatttgaattctatatagagaggctctcaattttacagttgtctgacaaagtagaaaactaagttattatgttatgagagccatatcttattctttacataggattcatctagggttaggatttaaattatatagaattaaaaaagataaaaatagcttaaaatacccttaagtggccggcctcatatgtggaccccactagttttaattttgtcattttacttaacaacttatcttttctttcacaaatgctatattttaatttcaatcctataaatatca

SEQ ID NO: 162901 - DNA, 1416 bp, Cannabis sativa
aaaatctcaacttttaaatgttgaacagattgacaaaatcatcaataaatatgtaaatattatacaatgaaaatttatgtatgaaataaacatttcatcaatgagagtataaaataaaatgtaaatattgagaattgttggatattggcactatcttcatattggtaaacatattattgattttgagtctatacctttatagatttgtttctaaactctacctagtaccaatgaaaatattgtctatcatttatattattcatgttcttctcaatttcttttggtttgaagataagaatctataggggtggaaattggcttagcaaaagaaccacacacacacaagatttttttccccttaagtgctgtagagcactatttcatcaaaccagccacatacaataaccagatgcagcttttaagaaaaatgagccctaccaacacgaaaaggtttatttttgttatgatatcattgctgataggatattttcaagtctcaaaccaaaagagaaatggggtatacaatgcaaacaaatccatatataagtcaattctttttcacatatattatgtggtttctataaagttggtataaaattatacaatttgtgataataaatataataataaaaataatatagtacaactttaataaattactacaactaattaataatttcaattaaattatattttcttatgtacctaagaaaaatagtgtgaattaaaactcacaatattaattaataatattagttaaattatactttttcaattcttatattatcaatttttaacaattttaccttaattagtaacaatctataaaattatattgatcaaaccttctaatttattgaataacaatttggacttatttttttgaaataaaatataatagtactctacctaattttagtcattttttttttaataaaactaaaatataacaaatttaaagccaatttttagcacaaaaagatactaaaaatgtagtaaacttggtcataacacctctctaactcaggatattaaattatataccaccttattaaacatcaaacaaaaatatgctatccatttttctaatactaaatatacccctcaaagaataaaattaaaccttttcaaaaaaaaaaaaaaaaaaaagaataaaactaaacccttcccctctttttcctgtctctctctctctctctacaaagtcacacacacacacacacacacacactgtttgtcggagcaccatttgtcggagcaccttttgccggagtccattaacttagcttgacaactaagtaggggtgttcatcaaaccgctcaaactatttaaatcgcccatactgcactgcaccgcaaaaatatgtagtttgaaattcttggcggtgcggtcgcagtttgaatttgtcctaaatc

SEQ ID NO: 162902 - DNA, 1399 bp, Cannabis sativa
atttcggtggttttgcacttttgatgcttcaaataataaattatttactgctcgccttaataattatccattaattggttatttggaaacaattttgtgtccctttagacgaacagatttcgtttccctgttcatttttacttagggttattgtaactgggtgggctggatgaaggtcagattttgagtgcctgaaaacattttcttttgtgttgatatgcagtggcgaaaagatcatcaatgtttgatgacccgcttgtagaaatacaggagttaactgtgatgataaagaacgacattacaacgctcaatgttgctctcactgatttgcaaactatacaaaatatggagatagctgatggcaattactctcaggacaaagttgttcactccacagctgtttgtgatgacttgaaaggcaaacttatgggggctaccaaaaagcttcaagatgtgttgactgctagaacagaagtcagttctaacttaattttatgccttaaatgggcaattttgacccctaatccttgtttaatgtatctattgtctttcacagaatataaaggctcatgagaatagaaggcagatgttttccacaaatgcatctagacaaaatcctttcaagaatcaagcaaaaactctgaatgaaccactcccgtggtcaagctcgtccaatgcacctggcagttcccaaccatcagtgtgagtatctttctagtcatagtttgtgtgtgtgtggtcgtaacttagtacatgctccatagtttggtgtcaaatctttggggcttctgctgctttattcctagtaactgattcatctatttctctttctctccctcttttagcagtttaccacctaatggagctcaagctagcaaccaattaaggtatattaatggtcttaaacattgtatcttccccaactttgctgcttttcgttgtaactgctgtttcacttgtaactactttgcatactggtatttgtatacgcctcatagttaagcttaacaaacagatgtatcattcaacttctgtacatttcgagggcaataatactcgagatgctgtggtagaatttctgacatttagataattgaggttgctattaaagtgtgttcttcaataaaaattccagtgctttaccctgtgaataatcagagataattttttttgattgtacatagctgcttctgaaatattttttatttcagacgaagattagcaggggacagccctccaacccagcaaatggaaatgtccatgctacagcaggtagttccacggcaagagaatcatatgcagagcagggcggttgctcttcacaatgtagaatctacaattactgaacttagtgggatctttacacatttggctactatggttgcccaacaaggggaac

SEQ ID NO: 162903 - DNA, 4003 bp, Cannabis sativa
  modified_base (3944)..(3965): a, c, t, g, unknown or other
attttgctaataaaaaatttcaaataactacttttacaaaatacagatgtaagtgggttctgattaatcgaatccaatgaggaaggtaatgctgtttttttttattattattattataattattatccaaaatttggaaaatacatatataaattattggaaactaataaacaaatacacagatgataagagaatctcctcatggccaaataaatgcacaatattatttttcatctgctaagcacacaaattctttctcacccaagctgaccagtcccaatgctttacatacccaaaaaataaagacaaaggaaaaagtggctattgagaatctctctaaagaaaatacttctttgatctagccattaatgtttggatgagaaaactcagattacctaagaactacctgtgttttaatctcacagaattggaagagggtttttttcaatataaacattgtaaattggacataggtagtaggcatatggtccaacggtaatccgatctttctttctttcgatttaatcgagcttgacattagaatacaaaagggtatctcttgtgagtggcatatagaaaaggaagtatacctgcaaaagatgaaaaaaaaaatgacagttttagccaatatttcagaagcaaaatatggtttgttttcgggttttgtcttgtcgacaattcattagctttgtaattataagaatagggtagttgttggtgtgtgtgcgtgtaatcttacccctatgagggttgaaatgagaagtatgattcctgtgatccaagcaaggatcttcctaaccaacaacacttcaataatcaattcacgggggactttgttctcttccaacaaacgcgctgatcgctgaggagcaaaactcacatccagcaacttgcttgattccatagaagcttccccggagcaaaagatgactccgacaatttgacctgccattcatgaattttagctgaatgaaatctgtgatctctattacaacgggttcatatgcaatgctgttatctaaaatgtttactctgtgatcttgaactcaaacaatcaaaggtgtggctaaatttccagactatatatctgcatcacaaaatcaagataactgacctttgtatgcatcttgcagttcgttgtatagcttggacaatgtagcgagtagtaactccattccatattgagcggaaccctcacttccttgctctcgtaaaatctgttattgccatgttaaaagtataagagaaaaaaaaaattacataagaaccaaataaagcacatctaactattcttcgtggtcattgagatggattctcacattacacaaaaagagatgagcaagatttgacttagttacaaatgtacaacttctaaactaaactcatccccgtaccacaatggccaacggaaaacaactgagaaaaattacttccatgtttacattgtttgaaaatctactagttgatagccatgatacttgtaacacaaatgaacataaagttcatagaagaaaaagccaaagccaaaaccagataacaaggaaagtatttgtgaaatttcaatcccgaaaaagtcagttagtttaacatcatgcatagctataggcatgattcccaagccttctatcataaaaatttgattattaaataaatcttaaatgtaaaactttagccatttcaactaattggatttattcagcaaaataccagaatctacacaaattacaaagcacccacccaaacaattaaatgaacaaatgccacatctataatatttgattataagaaaataaacacctccactacccccacccacacaaaaaagaaaatgttaccttaatgccatcaaaggaaccaatcaacaactcagccggattgcttttaacatgagataagtcttcatgcagctccattgcactccttaagttacggacaagagatagaatactaacaataaattccctgtctgctttctgccaaaatgttaatacaaaacatatcatcttcacatataaatgtttcttaaaatcaattaaggaaaaagaaaaaaaaattataatgtcatttgattattaatcgttagtgaggagtatcacctttgacatatgaagcttcacattagcaccattggccaaaggaatgatcaaatctccattcaaagtttcttcagtattgtagatataggccccacccatccaagatgcctaaacaacattcaggataaaaacaacatacttgtcatgtaagtgcacagtggaaatgaaataggacatggaaatagaactgtctcagtatgagacatcaactcacaaaaatgctaatttctttgtcggtaagatcagtgaatggctcatccaaagaaactacagaaacttcatcttcagctgcatcaaataaggaatcataagaaattccaacacattaccgaacagagtcaaacattcatacaaaaaaatataaaattaactacctggaagttgaatttcagttttctctgacccgaacacaatcttgctactaagaatattgccagagatggcattatcttttgccaatagttcagaatctgcatgcataagacaattcacttcaatactagttcccgaataataaaagagattaaattttcattaaagttaagtgcatagaccatcaactcctctaacttccagcatgaaaacagcacgaggccgattgaatggattcgggacgagtatttgattcaactgccagacgaataaaaggaaaatatcacgaaccaagtcttacaatctaaaaaacaaggagtaactagaaaatgtatttcctactacagtaaaaccttagatgagctagcttctgaaagagtagaaggtggtgcaaatccaagcaagactgataccgcagcaccagcttctgtgtccaaaatcaaatctggctgcaagaacacaaaattggagaaaatcattaaagcaataaaaaagatatataactggagaataatcatttaattcatcattgttgaattcatgcaattacagtaacaaaaacatagatatcaaacaacaatacaacagtgaaaataagggagtgaaaaactcaataattagtgtcagttcagactccatagaaatccaaacctacttttaaatctgctctataaaccttaatctagaacaaagcacataaatacaagcactaacattgaatatcaaacaaaatctcctaaaacaagtagaatcagttcaagaattcttgatattcaaattacataatcaacaaagaaaaatcataattacagataaaaattatcaaattgaatccgtattggcactacactaattataaatttgatgaaatgaagcaatcgcggagaattaccttgactaaatcgtccgatgctttacgaaaaaactgattagaagaactatcaatgaagaaaacagatccagtagtttcggcctaaatcaaaaatccaaaacaagaaattgtcagatcgagtatctacaacatataacagagtatctaatcaaatagaaagataaaaagagagatacaaaccctagattgagcacagataagcgacaagatgagtaggaggtagaatctgtggaactccatcgaagagaaagagagagagaaatgggtcgttttctgatctatggctatgctcgacgagttaaggacgagtcagaaatttctttaacgattccaatagaggaagaaaacgacaatttgcagtgaaacgacgtcgtaatgggagaaatcgaaaacgacaagaggagcactgattgacgacgtcgttttcggattgtgggctaatggtatacatgggttgttggaaattcttgggcctaattttggaaataccactttattttgttctaaatgcaattgttttttgattaaagatttataccatttttatgcgggataatttaacaaatacacaaaaacaacaaaannnnnnnnnnnnnnnnnnnnnnacggaattttaaacatttttacagttttttttatttta

SEQ ID NO: 162904 - DNA, 1073 bp, Cannabis sativa
  modified_base (1023)..(1048): a, c, t, g, unknown or other
gagttaaaaataggattacttatcgtcactgtttttcttctggagtacataatctctatcataataacctacttctagataataggttcttaagttatttagttatttttaatttccttaattgtttcaatatctttatcattgagaatcaatcttatttaaactttcctctaaaaagaaaagagagattgtaaatacataattaaaatgtaataaagattgcttggattggatgtgtaaaatgactaaatggattgtttatggaaaagtactcctttggcatcaatgttccatgatgagtattgaaatgttctcttggagaaaccttattctgttacaccatatagtaattctctgcttttggagagaaaaaaagttggaagtggggtttatttcataaatttaaagtacttggtttctgttctacaattcgctgccatgtttatgcattctgctatttactttgatcatcatttgacaatacaatttacattcattcttctcttgtgattctagtgtcaacccacaaatgaggggttcgaataggctgctttggtgcagagcaatgttcaagtatcagatgtcaatggcagcaaagttcccgactctactaacgataaacgaggtcgggtcctaacaagtaagtaaatattgaccaaaatgctttctctttatgtgtactttacttttgtttcaggttatgaaatgataaccagctctaatcttttttttatttcaggagataaacccaatttgcaactgcttattttcttgcttgtgattttcaaattatcacaaaaatttagctaagcaccagtactagtaggttagaacttaagagtcaatgagtttgagcatgtacaataatttcaggagggtactaattttgttgtcttgagaaaactcagacttttcttttcctttctttcttttcattttgtaaattaaactagtgacctgtgttgttaatgtaatgcaagagttatacacaacaatattatcaaggctaattagtaatttttnnnnnnnnnnnnnnnnnnnnnnnnnntcatgccccctgaatttttttggcc

SEQ ID NO: 162905 - DNA, 3076 bp, Cannabis sativa
  modified_base (2473)..(2486): a, c, t, g, unknown or other
  modified_base (2887)..(2917): a, c, t, g, unknown or other
aaaaaaaaaaaaaaaagttgattggatcggatgccccctcttaattaagatcataattaggaaagaatggtagataatgataaatagcctaatttagaagtataccggatagggctcacaaaatctactggaagactgagtgacaattattaactcacaaaatatagggctcacatctcacacaggatatagacaacagcaagtggagagcgtaaaagctaagcatgaccaatgtgagctcgcagccactagctaggatagatggaaaggcttcccatgagcttgttaaagagttgatcgggactatagcaagaacagctccttaaagaagatacgactgtccatgtacagatacagatagtaatagcaaaaaaaaataaataaataattcaccttttctgcaatcctgtacaaagtacaagggtacaatcattatccttgtaatcatgtcgcatgttaggaacatgcattgacctcttcttccaacgaaattactttcgggatgacttagggaaacttgttttagatgccatagatacactactatctttaagaaactcatttcacaaatgatttaagaaaattttgttaccgcaatgctcaacataatcactggaaggaaaacagctcaatgaatcagagtctataaaaagatacaaacatttggaaacacctttgtgattatgatttgtaacttgcataatgtcttaagaggatacctcaaaaaagaaggcttctttaataaattactatcattaccgtagtgaagtgatgggaattaaactgtatttacagtgtctgaaagagaacggagtatgcatcccaaaccagctctctctgtcaacttttcatgaatcctaaggcactgatcacatgttgggcgatctccagttgacaagcctctatacaggtaccttgagtaatggtaataacaaagtgttaagagtattgaaatgtcatcatctgacaaacataaaggtaatatgcacaaaaatggttctttacaaaacagctgaaattcctaacagaaaactggttaacatattcattacttcatgtagaaaatcctaatttccctttcacaaaccatgagttctgttcataaaaaaaaatgagttctattatcgtcaaacatgctaaaagctactcatatatacgtgctagaactaaaataagtatttatgtaatatgtatataactagccaatgcatcattttctaaataaggctccaattatttcattattatcttaccttaagattcattcaaatgatgacggtattcagcaattaataagctttggagacaaaaactataaattccatagctaaattgcatccaaagaaaggagcctgaacaatgtatatctttttattaccttatatttatccttggtcaacctattctttcaagaatccttaatccaatttcatcacaatgttttaagattatacagtctaattatcaccgttcagtatatatactaatatccctaaaaatgaatcaccaaaattagcaaaaagagaaacagaagaaaatgccgaagcacgaaatggtatgacagtatacgggttctcacttcattagaatatcgtagtattcgggatccagagaagagaacatagcatccacatctttaatcgccataagagctctatgaaccacaatccagttcgcagactacaatcaaagcctaattcagcatcaatttcccattcgattctacgatataaggtctaacaaggaaacaatgtggttttcttcctatccttttcaccttgcaaaagaaaattatcttaaaaagcttatacaaaggcatgaagaactcaaaccttgcagcgctcatctggagtcttgggaggtgatccttcaagtgcagttttcagagcttcgactggcttagacctgtacggagaaaaaagtattgaaagctttagattttctcctgagaactattgtaaagtggagattttgcatgcggttattactgtttcagtaggctttcgatctttctggatttatgctcgattctagttattatagcatctgtattatctgctccagcttctgatcctgccattttctcacttcctctcttccgtttccttcctcactttggattttctcgtgcgccaaacaatcgagttgggagggagagaaacattttcccaagaaaataaccaaaccatgtcgtttcattctactttgtatgggcctgcatgattggcccaaataatggtaacaaggcccaaacaaaatttaaaacagaaataaaaaaaaattacactctatctcttttttatattgtcctcttttattcttactctcttttttaaatattgtaccaattttacccctgtcacttcacgatactctccatttgacgctcttatattagggtattttgagtacaatacatataaaaagaagaatatttcaattaaatataaaactagaggtaaatttgattaannnnnnnnnnnnnntggtatttttcaacttaccccgatatttacctatttctaactttagtgataattaatatctattttttaaaataataaaaaaaatgtctttttttactttttaatacttaaaatatcttttattatataaaaggtattataataataccttagagtaatataagtgtcatacatataatataccttagagtaatctgaatattatgtactttattatttttttagtgatatgtatacttttaattttatttttatttatttccttcatgatataatataacatataaatattataccttagagtaatataaatataccaccacaattctataatcaaataaatatatataaaaaaaaacttaaataaacttccacaaattttttttttctctttctttcannnnnnnnnnnnnnnnnnnnnnnnnnnnnnncactctatttatttattaatatatcatagcacataataaagacataccgtacaaaataaaaaataaatactgaaaacttaaattaatatttaatagtttttttttctatccttcacgatatatcatatcacatacaaacgatataccttagaccaatat

SEQ ID NO: 162906 - DNA, 1431 bp, Cannabis sativa
tgactatcctcaaagtttgtttgagtcatatcttattcattttattttataataatattatggcatattcatgactagtgccaaaagaggtaaaattcagttattttaaaattataactttcaattacatcaaatttcaattctcatataactatccaaacacacccaagtgaaacgataaaccttttagcttaaagaagtatacttcttcgattattattattattatttctaagctatatataataggcaattatataaattaatacgttcagaaagtattaagatggatctgcatataatttctatttagtaacacatgtgaaaaatattcttccaaattagcaagaacatgtaaaagttcttctttgtttatttgtctatctttagtgttattgttactaattttcataaactaataattattatgtcaagtacattatttaatttaaatagtcaatctttataagtacagaatctacacattatagatcgatatatatatattcttcttttttttctctttttttttagggaaagatgataatggagtcggccggtccacaaccagaaaaattagtgaccgactaaataaaaaagattattattattatataattacgttataaaaatataggaaactaaataatgggtggagtagtctatttttcatttgaaagaaaatggtcgatttcaaaggcataattataattgcacgtggtacgtagtttcagtagttattattattggagttacaattacaaatgttcaatctcaaatgtaataatcttattatgatagagaaagtcggcactcggatcacctcataataattattatatatattttttaatttatattatatatgcatatttatataatcaagaaacaattgtcgacgacgtacatatatatatgtgaaacacatgcatatttatattttaattcttttttttttttttttatgaataagataagtattgcactatcaaaatatttactgctattacatctcaatttttgaaaaaaggtatactatgctcctaattttgcaacccaatttttatcttcaacagaaattttataaggcaaaaaacaacctataatctcatgttataaggcaaaaaacaacctataatctcgtgttataatctgccaaagtttttgttctcataaaacaatttataccctcagaaaattatatacaaccgctgccattattgcaataataatcttttttggattaattgctggatatgctttttgatttggacaaccatttcaacaagtgtgctatcgactctatcttcaccttccaattgagccatgttttaatagattccaagcacctcttgtatatacatttaaagaacaagtgtttcaagttttcattgtcttccccacacaacaaacaaagttgattcaaggatg

SEQ ID NO: 162907 - DNA, 951 bp, Cannabis sativa
  modified_base (892)..(900): a, c, t, g, unknown or other
gaaaaaatattgcattagagggtgcgtagctatataatgttaggaataatttatacattttatattcttatacatgatattaagttttattcattatcaatgtaaaactttttaacatacagaacaaaattcgctaatcaacagcagttcatgataagtctcaaattgtcacggatgttgctcgttctcaaaatatataatactatttttttaaaagaaaaaaagtttttttttgtaactatttgaaagtaaaactgcaaatattatcaaccaaaattgaataagctcttaaaattaaaagatactattaagtcgtgtggtgtgtaattggagtttatgatgagcatggagtgtgtcggggttccatgcctaattaattccattatttgattaaaactactattggtgaacattaagaaaaagatacatagaatattatatataaaaatgtatggaccaaatcaaatgatgtggtttaatgttgtttcaacactttttacttacttatcttttcaagtaatatatatatatatattaattagtatataactataaacataatacgttagcgtatgaaacattcttggtagacaaaaaaaaattatacctaacttattattcttccttttcctcaccaccaatgatcaatctcttctagctatgacaaaattaattacttttgtctagtccctcttaaatttgataccatcaatttagttgtttatctaatctaatttaatctgtattattttacttatgatctgtgcagattttatattttggatataacctaattcgtgtcataggtgaaatttaatttaacccaatctacaaaagtacgaattagattggtaattattttggatagattactttttaatattaaattatnnnnnnnnnattaaaaaatattttttttacataactaacaacaaaataaaatattatttt

SEQ ID NO: 162908 - DNA, 1474 bp, Cannabis sativa
ataaagttaataccacgatttaatatattgggatgatttaagtcaaacatattgtatttaaatatttattttttctataatcaaagaaattaagacacaatacatagaattatgtttttatatatgtttacgtagtcgcatcgattgacctttcttttttcttatttaatcttgcttctattttttgaattatatttaaaactattaaatatatatattttgggtacatttatttttacatatatattggagttctaatataataaatatattaccattaatgtgtgtaagtactaattatatatgtatatctaattccattgttgtaatcaatattgcaacttttttgaattagattagattttgccatatataaaaaatcatattccaaacagtagataaagtgtgtacggtgagattcgtatattgatttttatgctattaattatgatcacttaattaataatttcaatttggtacttaattttaaagaatgtctaagacggagggaacacaacaaatcaaaataataaagaataataattaaaccaataaaaaggcttcttcgttgaatataatttctctcattagccgcctaatcaagtatccaaaaagaacatgtacatcaataaaaacacactaatattgaatgcatcatgcatattcaaaatgaaaatttcaaattaataataataaaaataatatattaatattatgcagtctactttggttttgattcaaagtattttaactggtttttttcaaaaaggcatagaaagaatatgaacttttgtcggcgacatttcatgtcggcaaagttttaccagcatgtatttttgccagtaaaagttttacggttggggaagaatattgttttgtcgacgaataatatgaactttgccggcattgttgttttcaccggcaagaaaaggttgctggtgaaatttgtctatcgacattaattccctggttgagccgcctttgaaatattttttcgacgacaaaatgtgctggaaaaactttccgctttaatacttattcctgaaaatgtattatcggtgcatcaaaatgcgtcagcaatacattttttaacttatttttttattttttatttttgttggcgcaaaaaacttcattggcaagtcttgtaattttttttttttgaaaaaataaatttgtgaaattaaatgaaatacaatattaatttacattaaaactaaaatttcataaataatacactaacataatcctgaacgtatattataataggaaatatctatcgtagagatattggttttgtccctatgatagggatacttttctagtccttgattgttgatatagtagtaataaagttgagaaaatataataatgatagtgaaatagtaatatttttacaccttttttgtcttttacactattgtcttattctttttctttttctttttttattttttttttgggtaaataccat

SEQ ID NO: 162909 - DNA, 2211 bp, Cannabis sativa
aaaaaaaaaaaaaacatatttctactagctttcagaattgtccttcaaattcaaattcatactataaagcagaaaaaacacatctttgccttttgtcaacatccattatttcaaaaccacttgtactcaagaaattaagaaaaaaaaaatagcaagcattgactttaataatacaaaggtcactagatttcagattcacattgttaagctaaaaaatgtgtcattgcattctaaagacaaccattattcttataacatccacaaagataatcctttatccaaaaagatacatcctttagcatacaatccaccagctacacgaaacgactccaagtctcaaatctcaacaatttagtgaaagatagcactcagcactagattgctgaaaaatctttcagcgaaaggaaaaaaaaaaaaaaagtgtctttgcctcttgtcaacttccattatttctatggcatccccaaaagatacattactaggcataaagcccaccatatacgcaaaactatttggataatacataagcacacagaaaagtaactcacacaacaatgtggataccaaacaaattaaagttattcagcatcataatatactttaacaccatatcatcttatgtttcaaatgttgacaccagaacagtgattctactcaactttttagacctcacagattgattcaagatataccagcctataatctaaacactacaaaaggagtcttcggtgtacctacaatttaaacaaaactattaaccaaaaacaaaagtaagggaacaaaagaactgggcaatctcaccgagtaaccagctagtgaacatctcattaataaagcaaaattctaatccttttttttttcatctcctcgaacccgcagtctccctctccaccttctgcgaaaaaagcttggttgcaaacatgttatcatcaaaatactctctataaggatgctctttgggaatcagcctcctgaacttatcgaactgtttctcagcctcatttttcttctttagcagggtatatataatcccttggcataaatagggtctgaagtccctcggctcatccttggctagctcctggtaaagcttcaaagcatccgagtaattggactccatcactctaatttgagcaatgaggagcttaaagtccctaacctcggatttatttctctgtttctcgcacatcttcattgcctcctcaactctcttagccacagcatccaaattactatcctcagactgagaagccgccattactagcccatgataagcctcgacgcgtaaagggtccttcttcaaaatatcttcgaactcatattttgccaattcgagctcacccatgtaactatggatgttggctttaagcacaggccactcgttatcgtccggttcaagctcaatcagccggtcgagcacttgaactgcttcttgaagcttattcgctttgatcctgatctccatgagtgaccgaagcgcttccatatcatctgggttactactcaaatgttcctcaatgagcttctcttggtcatcattggcagcctccttagacgattcttcgacaaccgaaggtgcagcaattgggacggcggcgaaggcgggtttgtggtggaaccggacgaaaaagagagcagcggcggcaacggagatgcaagcggtcttgagaatgggtgagacaatagaggctaggagcgagggtttagggttatgggaagaggaggatgaagaggctttaatggagagggaattgaacttgaagggaggtgatgatgagtatgatattcgaaaagaagaaatgggtttagtaaatgatagacggttggtattgagggagaggtggaaaggttggtggagcttagcaagggactccattggagagggttttggtttggagtattgaaaggaaggttgaagaagaagagtttgaaaaaacccttcgctcacccaccgagtcagaactcaaggagaaccagatttcgagaagaatatgccgttcaaccttggcccattgggactcggcctacggaattcaatccagttcagcccaaactacccccagacctgtcccggcccattggataagtatttgggctataatgtactataacatttggaaaagaaaaaggaataattagataatgcacaattttttttaaaatatttacattttttacatttaaaagaatgttttttttttacatttttac

SEQ ID NO: 162910 - DNA, 1936 bp, Cannabis sativa
tgtttatatatctaggctatctaggtagtacttacttgaattgcagggatgttgaagtgacccagatcagcgaacatggcctctgaccctgtgatgcacagaaaaatgccaccgagagaaacccatccatctcttccatttctcttgaaatattcaactatgtattgtggattgaaagcacgtaacacaccgatgtcatgcttgaataagttgtaaagacctatgcctgtgaggagagaaaaccagacgaagatgatgggagcaaaggaggaacctactttgtctgtgcctaatcgctgaaccgaaaacagaatgatcaagatcactactgagatccccacaaccacgttttggccaagagatttgatcccactaacggcagacaggactgaaatggagggagtgagaattccatcccctatcaccatggaagttcccatgatggtaactgtgaacagaaagagcttagcgaatttgctagtctccaacatttccttaatcttatgagctcgcttcaattggttggagggtgtttcaagcttgtagttggaaagctccctatcctctggttggtaatttggaactaggctcacctttgcatatcggcatagtaaggagtagagtgcaaatgttccacctatacacatacacatacacatgcatgcatacatatgagttgatcagtttggtaagacccttttatctggaaattaaagtacgtaccatcaccgttgtcgtttgcccaaaggacaataaagacgtatttgagcatggggatgagggcaatggtgtaaatgatgagagaaagaacaccaatgatgtcatcctggtcatgaatagttcctttactgaaagtgctggacataacatagagtggggaagttcctatgtctccgtacacaatccctatgctctgaaacgctaacaacaacgttctctgccaattcccctgcaaccccatatcatcttcattatcaatctattatattgttatatgtatataattatatatgtatataatatgtatgtatgtatatacccctaaagtgtggttgtggggcttattggaaactcttccggcctccaagttaagagagtccaatcgccttagcttagcccatgatggcttccggtctttcatggggacaggcacaggaataggctgctcattattattactaaatacttctgcatcttcccctttatgatctcctgccattgccatatctcacttcagctttagctcttggtagttaattaattagtagtattagttttagtgatattacgtactccttttataggcaaaagcaaaaattaaggaaacaagtaagtcaacaagtaatattgtaatatattattagtatttgatttaaggttggtatatcatcaattattgctttaatttaatcagtatacgttattgggatatttttcaacagggtgaccatgttcttgggcaacggattgattcattactttgatatatgattaccattaatttatttaattttttttttgcagaagattatcatttaaatttgaaaatattgcacttgattttgtataagatgaattttattttggattaaactacatccttatttcttttcttttcttttttttttttaaaaaaaaaacctacatcattatttaacatacaaaataaaataaagttttctttttttttttttcttttggggaacacaaaatagacttgttgtttagtaggcagttaagtattgacaaagtcaaatacaatctcaattgtcatttagcgtaataaggacaaatatcttttttatttatttatttttaaggcagaacaaatagctttcattcagtctcaatttgagttttgtccttattcaaattactttttcggcaaaaatatcctgttacagtaactattgaaatatgttccttaataaaaaaa

SEQ ID NO: 162911 - DNA, 1908 bp, Cannabis sativa
tagaaagttaaaattcacatgtaattaatgtcttttggaataaattccaacgtacacaacgaaattaattaaagcttaaaaccagtttttatgtcattataattaattctatgggcggaatttatagttttgacatgcatgaatttacgtgaaattaattaatgaagctacttcctaggctttgaagaagagatcgtatagatacaaccaaattatatagatatatatatatatattatttgtttgaaatttgagtagttttgaatactaatccgtgaataataattcaatgatttactactttgctttcgaaaaatgagacacaaaatatgattaggaatattttagctatatatagccacaaaggttatttcatgatatatatgtttggtatgtttaatttggattatatatatagcattgataatcgagagcttattatatatataaaaatattcattataattatatttatatatatttcttttattaattatacatttgcatgcatgcatgcatgagactagcttcttcttcttcattttttttgttgaattaattctaatatattaatgattttctttcttattaattcccttccttacaaggcaggtaattaattaggatcaacatattaacaatcattattttaaaaatagattaattacctattaatttatattttatatattccttgagtgaatgtagctttattaacttaattcaatgtatgtcatttaatcaagagttataaaaaaatcctttcatatatattttgaaataatattacatatgtatatatatatatatttcacagtggtataataagatgatccgtactgggttttattttaaaagtaaaatcatatatatatatatatatatgataactttattcttacaatgatgatcaagaatattaattatagtagtatatatataaatattgaagaaaagaaagaaagaaaaggaaaaatggtaactttaattggtaaaattaattttttatgttcactacatatgcactttttttgatgtgaaatcctagctaacttctattaattaatttttatataattaaaaatttgcaattataaactaaactatacttaatcataatcactcattctaataaagtcaggccgattttcaaagtagggtccatctgcaaaattgactaggcctcacatagtcacacactctataaaatatataaaaatgaaaatttggtaataaagcattgtggattagtggtgtctatacagcgctttgcgaattattagtaattttttataatagttattaaattaaaatatataagattcgatatttaattacttaataaaagtatgatactttataggcatcaataatattagtgtcacttatgagatgtttggtattactacaaaagaaattatgtcataacataaattttttgtgactaattgttgtttttagttacaacaaaaaattatttgtaattaaaacatagtatttaaatacaaattgtcacatatttaatttttagtcatcaaaatatagtgactagaaatatatttagtcataataaattgtaattaattttgtgactaatacactttaattatgcaccttttaaatatataattatttataattagtcataatttttttaattttagtgttatgattaaaagcaagagttgagattaattgaatatatatttcaaacttaattaagtatttaaaatatttgagattaaccgaaaaataaatttaaaagtaagaccaacttaatcatgaaccttctacaaaaatcatatcaaacaatcaaacataggtttgtattgtgggtgagactacaagaaatatcacttttactagcacgtacagtttgctactgcactggtaaaagtaatttttacc

SEQ ID NO: 162912 - DNA, 6012 bp, Cannabis sativa
  modified_base (1902)..(1919): a, c, t, g, unknown or other
ttttttttttttttttgaaacggtcctagcccactaacaaacaaaagagctctatgaggggaagaggacacaaaaatatgtactcattttttacttcttttatgcaatagaagagattgaaaacaagtaggatagtcgggtcacaatcttactaggagtaactaataaaatgtacttagtcaaggtgtaagtagccatattatgagttctaggacaatacactagactggccatactaaagttattaaaagacaaactaaaattattcaaaataagtcttaaaaaagactaacaacaaataattgttaaatttagacacctacttaagataatcaaactcaaaaataatattattaaaactaaataaacaacattgtgcatctacatttctaagggtcacaacttcaccgatttcagataataaacctccatccacaaacaaagatgttgaacctaacacctctttgtgatcatttctaacaatcatgtccaacccacaatacccattagtcaagtccaaagcagcattaacattggcttttatgaagccagaaagaggaggcatccaatggatagccctctctaactgcaactacgaagagagacgttgaacagtaacaatctgctcctctccactagaataaacgactttatgttgataagcagctaagaaattataaacccatgttagcactaggtcagaagggatgagtttattattatgaacccaattatttttttcaaaaccaaactctccataagacaactaaaatcaattcaatctaatgctttggaaaagagtcaattaaaatgtgaatgaaaccaaaaaaatccgtacaagaagcaagcgggtcacctagttgaaaatcacaaagcttacgacactgagcaagagaagaacaattccataaagcatgtgtgtagtctctaattgatcatcacatactgggtacacaccatcattcaaatgaccatagataacttaattacatatctgttcatgtcatatataatttatattattacaacaccttgatttagatgtcatactacatcaacaattcgaatcgagaatgcttgcattgaataacgggcatcagtgaattgcgctagtaactgttgattaaagattccataactttaatatgttgctggctattttattcatggctaagtgatcttaattctctgtacaatacaagtcacaacctcatgtatgaataaggaattttctaatatttatgtatatatgtaaattatttaatataaaatattaataatttaacattcaagtatgtataaaaaatgttcaatttttatttataaacagaaatgtctttaccgacttttcagagtataaaccttaacaattgacacatgtcaaagaaaagtcttagtggattgacacctaagggtaagagagaggaataaatggaagaggtagccagggagaaaagggggcccaaaaggtgcggagaaaagatcaagaatgaacagggggtaaagggttcccaaaaaaataaaaattcttgactagtcttttgatcaataatgaacgatttttggtcaaaacagtttgacgtcatctgtgaaaactcttttaccactattttgaaatttcttgatcttcttcaggccaaattttttctacaatctctatttccaaacacatctcagcagatgtgttcatccaatccaatctgcactattttgttcatagtacatctgattcgcactaagtgaggatttcatatttggatccaatccaatctacatagtaattcaaatacaatccattctaatccgcaaaagtgcaaattggatcagatattttgcattggttacttttcaatatttattaaaaaaataactttttttaacataactaacaacaaaataaannnnnnnnnnnnnnnnnnatgtctccaacaataaattaaaataaataaaacaaaagataacaaatttaaaggaataagaaaaaaaatgaatgcataaaaaaaatatttaattttgttttagattataatttttttgtattaagaatgaaataatttgatttattaaattttgaaatatatttgtatcatacatattagatttttaaatttttatcttttacatatattaattgtatatataatatataaatatgtggcgattggatttaatcaggtacttttatataatagcatattttaattttctaatatagtccaatctgtacaagtacggatattcgcactttgtgaattaatttggattgaatcgtgcgtattagatcttttatgaatactcctacatctcaggtcacatataaaagaatcggtaggagttaaaaagtacactaaggtagtgtttggttggatgtaatgaaatagaatagaaaggaagcaatttttattctattcttttgtttggttgcatattaaagtattgaaatgtcattctaatggaatgacctttgcaccattttagtagaaagactattccattttgaaatagaaagaaaaaccatttcaatacataatgagaaaaatttaataatttttttatgcattttaatattattcatttacattcctattcttattctcattctcattcctattcctacgttttcattactcccaactaaacgccactgacttacccaataatattttgtactcaaatgaaatatcatgaataaaaaaacataaaatttattttattttctggaatgttattttgtctgaatcattacttcataatagatagaataaacaaaaataaagagatactgttaataatacatgcttacaacaactcatacataattacatatcagttttcaaaaaaaaaaaaaaactcataatacatgtgagatttggtcaactgtgacaaactagtcgtgttactcgatgagtttgccctgcgaaactacttatcgtgtacatactcaaacataacataaagcatcaacaaatggtgaattggtttacaaaatttgaattatgtccgattaaagaagaaagacaaaaaaaatgaaataattagaggaattatgggtcgagataaggtaaccgagctctattctttatctttagtggttgcagaagaaccaaaaccctgcatggttctcttaaatgacagaaccaagtatgtataaatcacagttgttgccacaatagagaccccaatatagacacacacagttgcagcacacacataaagatacctgaaaaacaaagaaaataaaaagccctcacataagataagttcattcactctcaagtctcatcttatcaaagaaactcccctatcccccctcctttttcttaatgagattctcaggtgtgagtatcctatttcttcccagcaacaacaaaaataacattatgtcagagagacttactttggagagaaaacgctccacacaaagagatggttcctcattaatatcaatacaatggtgtacgacaccaacaaaatggagttcaagctcagtagaagtagacaagggaagcccagcaattttttcaggagtagtttggaatccatatttattggaagtgcaatatagttacagctcttaatcgagatgtacatcaccatgctaagagcggctagcattggggaggcgtaggtaatcataaacattaaaatcccagaaagtatagttgaatgacttgagatgccctgaggaaaaaaaaatgctaaaattagtaagataattagcttctgagataaaaatcattgcacagatcggaaattcaatgtggtttcttttttaaaaagaataatataggctgttcaaaatgaggatatacaataaaagctccagcaacatcaatggtggctaaagaattactgttccccaaagcataatggcccgccatccccatatagtaaaacactgcaacctagaacaaacaatacagcacaacattagtaccgagaaataaaatcaaataaatcaagtttcagtaaatattctaaacatatgagaaacctcttaaaaaaatttccatcattcaattttgagtaaataattgtctgacttttagtcatccatcaaacttgatgcttttattgtctggcctactggtaccagaaactagtttgaaatgcatagaaaaatatcatatttattcagaaggaagatgattctaaaactaacctcaacccagagcttgttatcttccccactgtgaaaacaataaagcatgccgactaaaacttgcaaaaacagcaataatataggcattgaattaattggttgttggagtaacaactgcagaaggcaccaagagcatatgtatgcccacccaatcacaaacgagcaatttctgaactccaccagcagaggcttgtaacaaagctcatcagggccagaagcagattcataggaaaatctatttgagaatgacttggaattcaaacaagatgatagccatggtaaagccacagtgataccaagtgtggcaaaaccgagaactgtatagattatttgtaccagcattgttgcagtatagctagatggtgcaaacatgctatcctgatgtttcataatatgttgcaaaaccaataacccaggagtcaaaaagcaaaatccaatcactgcaacagattttctatttaaatcaaatacagatagagaaaccaagcttaaggtaatgaatagaaggcctgcaactagctgaagtgctttaagtagatggtcacccccagcttgctcaagccacttggatatatcaggaagatccctccaattcacgcctccttgatgccagcctctcaagatcctaccagaaataagaagcaaaactatggacaatgtttgaaaaccaatatatttgttttttccactgaacaaattaaatatattctgtgccctttcaacttgtaaatactgtgctgatttacgcagtaataacaaaagcaatgtcgaactaacaaaatgccatatatattgctcttcctccaccatagaactcgatcccatacttactacaaggataaagataacaccaattgcaaaagcctcatctaaatgccatgcatgcatgatattactctcaaagtttgaaacgtatttcctttctctgccataaacttctttgcacattagacatagaaggctcagcaatattacacaagataggaccattgcagcaactccaaaaccaagcaagttgaaaggtttctgcatatcatacaacattatcagtattaaaaagaaagaatgagaaatttccattgttccatccaaacaagttgtcacttttcatctttcatgttacaaaaggaaagagttcaaagctgttagaaaagtacatacatcggtggctctgcgtgctaaccactcacttgcaattcttaaaaactcgttgtatgctccaacagcaatgttatactcatccccatggttaaacctatttccaatgatttacaatggaaagagagtacgaggatattagcagcatgcttcataaaatcttgtgttgtgattaatataataaacgctgtgacatacccacctcgatacatccttagacatccaggaattatggagaaattcagcagttgtatataagcaacaaaatttcgtctccaagctaccattgcacttacttattccagaggttttatcaattgattcatgatatgggaaaccttcacatgataaaccaggtagttgtgcttgcaataatctaagcaactgccatgaattcaactcaagtgcccttagcttttgatcatctatacaataaaaatgctattatctcacaagttcaataggatgtcagcatgctggcttcgaacttgaaaacaagacgcagaatttaaagaatgtgttaataaaacaatttgttaaggccaaactattcaaatgaaaaatgcagcaaaaactgtatactgacatcaatcttctatgtaaactactgtacccataaaaagagtcattaaacagataatcaatcttatgttattgtgtgtgtgtgtgtgtggagagagagagagagagag

SEQ ID NO: 162913 - DNA, 1557 bp, Cannabis sativa
caagtcttgttttcaagtttctatcgatgaatcaagtttgtggcatcttaggctaggccatccttctctaaatgtactcaaacatattttacttaatgaaaagaagcatttgccttcccatatgcaattttgctctagttgtcaacttggtaaaggcacatcacaaagcatatccttcaacactaaaagaatccaaataaccccttaaattaatacactcgaatatttggggaccatcaccaacaatatctagacatggttaccattattacgttcatttcatagacgattacagccgctacacatggatctttcctcttatcactaaagatgaagccttatctgctttcaagacttttcaaaatcaaatcgaaaaacaacttaatgtcaccatcaaaacagttcaaacggatcggggggagaatattgcacctttgaaccttgtctcaaaactataggtatcaagtttagacaccattgtccacacactcaccaacaaaatggcaaggccgaacaaaaacatcgtcgcattgtcgaaataggcttgacccttttagctcactctagcatgcctcaacgattttggtgggaggcctttcaaacaacaaccttcttaattaacaaccttgctacacaagttgaatttgaactataagtgtcttatacaaaagctttttggtctcatgtcgaactataagttactcaaagcctttttgctactttccccttggttttcaaaatttaatctcagattcatctctgtttttttataaacaaggtgggtcgatttgtatctccttgtttatgctgacgacatccttctcacaggcagccattatcaaactctcaaaagtattatttgtaagctgtaatagtactttctcctaaaaatactcggttcaatgacatgctttcttgattttgaaatcactcgaggtccctttgacattcacctctctcaacgcaaatacaccactgatttacttaccaaggctgatcacatgatctactgcaaaaccagcccaacacccatctgccaaggtgataaacttagctcaaatgacagcaagccctttggtcaacctacattcttttgcaacatcatgggagcgttccaatatttgactctaagtcgtcctaacattgccttcacggttaataaattaagccaattaattcatgcataagccaacacaacatcattggaatgtctgtaaggggctactctgatacttgaaagggactattggacagggtatcatgttccaaccaacaaaagaatggaatgtcaaatgccgactagacaggttctatcgatgacaggaaatcaaccacgggctactgtgttcacctataggcgggaatttgataatgtggtgttcaaagaaagaaaaggttgtcgctaaatcctcaacagaggctaaatacagagcactctcacaacacaactactgaagctgtgtggttgttctccttttttaaagaacttatggcatgtttacttaaaaggaatgggaatgaatggtatggtattaattctcatacaattgtttacta

SEQ ID NO: 162914 - DNA, 1957 bp, Cannabis sativa
  modified_base (1900)..(1928): a, c, t, g, unknown or other
acccgaacccagacccagacccggtgccgaagctggactgaggccctaaacccagacccgaaccccgatcccgaactcgacttaaaacaaataaaaataaaaataaaatttacaaaaaataattttgttttttgtttttaaaattaaaaaaataggttgtatttggaaggataaagtggacaagataggtatgatttcctatggaattttcataatcagatttgataattgtgaaataagggatgaaatattgtcagggggttatattttctttaacaagagaccggttatcatgaaggcttgggatccaaatttgaatctcaagaaagaggacattagaacagtaccaatatgggttcagcttgaagatctagagcttaagtattggggccaaagatccttgtttaagataataggtcaattggataaacctgttatgttagatgaggttactaagggtagggagaagttagcatacccgagggtgttgattgaggtgactatgagtcaagagttcccggatatgattagttttgagaatgagtatggcactaatgtgtcggttagagtgcattatgaatggaagcccataatttgtaaacattgcaaaggtatgggacacaaggctgatgaatgtaggaagaaagaagggaagaagcaggaatgggttgttaaagagaaaaggggagatttcaaaggggagaataaagagatagaagttgataaggatgggttcaaaccggtttctaagggttggaagtagaaaaattagatttcgttgactgatcctcaaacttccaataccttcaatgtgcttcaggaagttgctgggcatttgatagaacagggggaacttaataacgaagaatggcctaaaattggagaaccaagaggagggggacagcctcctctcctcaatggatagaatcttgagttggaatgtccgaggaatcaacagtcctaaaaagcaacaagaagttaaggggttcattgagagatataagataggacttgttggtctcctcgagacgagagtcaaggcttccaaacttggagccttgtatgttagaatgtttgctaattggtgtttcacttcaaatattgcttgggcaaaagggggaagaattatagtggcttggaatcctggcagtttcaatgtcaatatcttgttctgttcaagccaaatgattcatcttcatgttacaaatttggacaaccgaaataatttctatgtttcttttgtctatggttataacaatgttgatgggaggaacttactatggaaggaaatgacaacaattaaagtgaaggaatcatggctagtgcttggggattttaatgacatattggagaaaggggaaagaattgggaaaaaagaaagctatagtcattccaagttcaaggagtgtgtgatagaatgtcaattagaagatgttaagcaaagtggaagcttcttcacttggaagaacaagcaaaaaggggaagatagagtatactcaaagattgatcggattatggcaaatcagagatggttggctactttcctgaatgcggaggccatgttcctcaatgaagggctatttgatcacacccctgccttattgacggtgtatcctactacttctagtagtaggaaaccattcaaatatttcagaatgtggtcaagttatccttctttcaagcagagtgtggaagatgtatggaaggtcaatgttccggggacgaatatgtttcaagttgtaactaagttgaaggctctaaagaaggtttttaagcaaataaatcagcagggattctcagatatccaggcacaggactcgaaagccaaagtttggctagatgagaagcaggcagcggtgcaaatgaatccaagggatctggtgttggaaattattttacnnnnnnnnnnnnnnnnnnnnnnnnnnnnnttattaacatcctaaataagaactttcta

SEQ ID NO: 162915 - DNA, 1955 bp, Cannabis sativa
agctggatgacaactcagactcccttcataagggcgtcgagcctcccctgctcggggagtctgagaccatgaaaacatatgttaatagcaactttcaagctgttaacaactccatcatgatgggtggaagctacaacaccaatgatcctggcgtccatgttgagatctctgattttggtgagcctcatgagtctaacaataagcctgagtacaagagaggatggaaaggtaagaagaagagtaaggaagctttaaaaagtgaccacaaatcgtctagctctgactgagagctaaatgagtacgtaaaaaacataaatgcatgcaagggtggctgaattttaagctattattattattatatatgatatatctattatactttactttgaaatctttgattatatagccttgatgaattaataatattacaaataatgagcctttttttggctaaaataggatgatttaaatgcagttgagagttgcttgagagtgctacctcggaataagtttgatggttttaagcatagtgtaatatttaagattaaaaaaatacattgcatgtgattatattaaactatccttaaatgctatgttgtgttgtgagtcaggtcgagcaataaatttgtttaagctctaatttgtacttcttttcttttcattttttgtggttgctgttgttgagaaaaaccatattatcctatttattgattttgttatgatcactcttacgtgcttatttgttttgcaataataaaaaatctggccagaaaatgcaaagagattatgttttgtgcaaatctggttggcaagaaaattaggttataaaccttccatgcacatgaattgtcatggtgtaagttagtggagatgggggtttttattcaatctaatccgcactattttagttcatccaatccgcattcagtgagaatttatattttaaattcaatccgtacaatagttcaaattcaatccaatccaatccacaaaagtgcggattaaatcggttattttggattattactttctaatatagaattatttaatatttattaaaaaaatatttttttcacataaataataacaaaataaaacaaattgttattgttttatgtctctaacattaaaatgaataaaaaaaattaaaaatttaaaggaagaaaaaatatatatatatataaaaaaaaaaatgtttaatatttttattttaaattatactttcttcgtatataagaatgaaatatgtatttgatccataaagttttaaaataaatttgtatcatatttattagatttttaaattaatatttttatacattaattaaaataataattatagacattttttaaaacaatgtataaatatgtgtggattaaatttaatcggttactttatcatatcaatttacatctaatccacacaaatacaaattttaaatttttcaatccaattagcataaatacatattaaattgatgagcagccctagactggtgatatatttagtttttttaatttgatactaaattgttcactggagcaaagaaatttaccttaggtgacgtttggttgggaggaataaaaatataagaagaagaatgagaatgggaataagaataagaataggaatagaataaaatttaaaatgcatcaaaaaaattgataaaaaatcattaaattttttctcttgttacattaaaatggtcattcttttctttttaaaatggaataattagaatgtcattctaatactttaaaatgcaaccaaacaaaagaatagaatgaaaattgtttccttttttatttcattacctccaaccaccacttaaattcttatagtgaatttatgattaattccaaaaaggttgttctgatctattaaacatgcagaagagcagcaacataaaatataaggctaattagtaatttttcctcctgaactttgacatgta

SEQ ID NO: 162916 - DNA, 1192 bp, Cannabis sativa
ggccttgtcaaagaagatttctaatattgtatcataaacataattgcagcctttattatcttccttcaattctaggctatagtcatcttgtaatttgtctataaaagtataggggatgatcatgagataagaaatcatattatttctggttgtatcagttttgatatatatgaaaattatgtgtccttgtggatatgtaattatctaatgcaaatttttatacaatttgcactatatatatgcctctttacttactagacctcatagcatacaatccacctaattttctctatatagtctcttcaccattcatttcagtgcaattcatatatctatgtatctatctcttctacatatcctatcaagggtatcatcgatcataaataatacacacttttgatgaacctacttagcacttatttagtataaaaaacttgagtcttttcaaggatgaatccttttgtatttgtacagagtgtatgactaattattctaagttgttaattaagagatagaggtaaatgggttcaatcaaatatgttcaatgaaaggagaacatgcaagaaaaaagatagtagtagtgactaattattcttgcataaaacacaatattaattcactcatcgatcacctcttgctagaattcaaacacaatcaatcaatacattaaactaaaaagaaaaacaaaacacacaaatttaatcataatatcattggatgcatgatcaatgacgaaaacattatataattaatgaagaaaacagagaggtatagagagagagagagataccttgtaattgtaattatgagataaaaaaaagaagagaccagaattagggtttatatgatgatcaagagattatgagggggtataagagaaggaagaatagaattgaacaaggtcttagggtcttaggtgggtgtgggtgttttatattgatattgtctaattaaggaattatataaaatatccaaaaatatattacgtaaccaaatcttataaatttttaatttagtatattttcctttcttatattattaattgacaatatcacattacattacagatttgcttattttctttatatttatacatatttttcaaacaatttgttgagtaaattccacttataaccagtcccttatacaaatatccacatcagcaaagtaaaaacagaaacaaacaagttga

SEQ ID NO: 162917 - DNA, 1295 bp, Cannabis sativa
aatttggaaaaagtgattgtgattgagtgcccttgcatggagaatttctctggtggaaatgtaatcacttccaagttagataaagtaattacaaagctagcaatgcttgcaagcatttacaatgtggattcatgtaagggtgtagaagatgtttggaaaggtgatatcaaaacaagtgtaagaatgatttgggagaaattaacacaacggtatgcataattctatgttatcaatcatgaattatgcctcttgatttatttatttattttttgtattaatttcttgattgattattgtttcagaacaagcaagtaatgaagagcatgcaacttcatcttccaaataattgagttggtccaaaataaaatggtaagagtacatatttattaaaatattttgtatattagttatttattgtttggggttgttgacataagatgaaattgtattaccagggtgatccatattggacattttaccagaggtttctattttattgatctactctttttgattcctgttgaagcatatactcgaaagtcaaaagtgtgtgtgtgcaaagcaaacgatttcgaaaacttgtaatttcattgttatgaggtttgacctttttcttgctttgaattactttgatgggagttacatttatgtaaagatatggtaaataattggatcttttgatatttgtattatggcaaatgcatgccaattatcaatgacatttgcctaccatgaaaatgggagacatctaacatttagattgtagtagtgtattaatgacatttgttagataatctatttttgtatagaggttttccaactgagttttgcttgatggtatttaatctttttactcgtaaaaaaggaaatgaatcttgtgatattagttgttactttatatattatttattgtagagttagatgaaagactaattcatcaaattcattgatttaaatttctttgaaatgataggtgaagggttgttttaaattaaaaaattgcttgtagaaagatgtggaatatagcttacaagagtaagtttacaataatattatatgaggatattagtgataatattatttgaattatataaatagtaacacttaatcccaacaactaagtttttagagggaaactctccaaattttagttttgttttgctttttattattcggttaaattttaactgttaagtgctaagatagatattttatagggtgactatttaatggttatatttttattgtacccatatggttacatttttttctaacttgtaatagcaggttactaa

SEQ ID NO: 162918 - DNA, 3113 bp, Cannabis sativa
  modified_base (2934)..(2943): a, c, t, g, unknown or other
attatgtgttgcatctgctaataactggttttttggtctgaagaacaggtggctgatagtttgataaattgaagctatgaagcctggaatgtctactttgaatccatatgcagctgcttacattccactctcaaaaagagaggtggaacctgctctaatgtccccgaaccagcgctaccacaattcttcttttgaaggaagtttccgttctcctgtagaacaatttagtcaagatgttttctctgtgaggaaccagcctcaccacaattcttttggtggatcatcacagaatgtgaatgtaggattagaaaaacagattttggatgaagagttcgacatggatttggattttcttcagatgacatttcctaatttctctgagcagtcacttgctggtgtttatttggcaaacaagggtgacttagacgccactattgacatgatgaaccagcttgaggtaaatattctttcttacttttctacttgatcaataatttacataattaacaagaaaatgattttttttaattaagctatttataattgaattgccattaaataatggttttttttaattaggagcaatgctcaataattgatttattttctattatcatatgcaccacagacaatgtattggcctggctgagctgttaattgtttatatattgagtccttatctttgactttgtacaataccatttctaattaaccttttcgtttgaccttttgattgtgagctattctatctccctgaccacctatttctgcacgaagtttgaaataagtttgttttagccttgttagaaggtttaggacataattttacatataggcttataatgtattttaaccaattaaaagtctaacatatttttaccaatcaaaaggcttagaacatatttttactcattcattagaaagcttttcataatgggtgataattgtgtaggctaatacagtgagagaatttaatttctgggttgtgttatatcttatactctaaacttttgatggaatttgctattagcttgccactgttatacatagtgtatctgttttttcatctaatagtacaaattggtttttaaatttgataggcaacattattctaatggtaatgtgagcatctgatgtgccagcacatgaaaattatgcccgaggcacactgcttttctagattattttttccttttctctgtcttcttttatttatttatttatttaatctgtgtcttggttaccctgggtagtaaagtattattaaaatttggataggtttcaagaaagtgctcagtaaatataatgattaatcttgaaatctttgatttttttccaaatcaattcatatattatattctagccattttcttgagaggcacatgtttcctgttttttatagtttcaaactatcgagtcttctgagagtcttccagatactttggatattggcgatgtttctgaacctgggtcatcagatcactgtgcatcattgaaactgaagaacattccaggctcagctggaggctcatccgagtctgcggatacccaggttgtctcctgatttaatagtcaaaagcagtggctttggtttttaacttggcatgttgtttggctttgtaggtaagaagtatattaaatagggaatattcccatgggaacacaagaggtacataatacagctatggttgtatagttctcagatgcttggtttctttctttctctttgacaggccaaaaagccagtcgtgtcggtatagcttagcttgcagcttgaacctctctaaaaaatgatagtgatcttctttgctttgtttcattttctgctatattttttttcttcctttctctcttgttttgttgcaaagggcatcagattataaaaagtcttacctaaaactactacgatatgtgatgtgatgatggggttgagttgagttaaatgtactgcagttacagtattatacagtttgttggtcgatgatcaaatgagtgttcttcatgtactctttatatttcagtaattgaaggccctcttactacatttagtctcttggagaaaagtataaacttgaagttgtcagtttaatcttagtaaagaattttattttacttgggattaaaggaatgaaagagaaagtagagtttgacaaacttgtgcatctcttcaaatgttctatgacaggaaacattgaatggcaaccaaactaaattgattatgtagaacggcaagagcgtgtgaaaaatagtaaaaaagtaaattaaattaatttttaaaagggcattttaaagcacttcaaagcattttcaatagagatgttttaaaaaatacttggacataaatatatttctggcgccttttaattgataccctattattagagtgaaaaaaaatgtcaatgtcaaattctttatattttttatattattataatatttttaaagtactattagaacatttttgaataaaaaatgttgattgaataaaatattatatttttatgtgattaaagtttttgatattttaaagaatacaattattgaggatgttcgtgaaaaatatataaatttaattacttttccttttccacttatttttaaatgatgtttttctacattctaaaattgaaaaatatgaaaagaaatatgaaaattacagtattatcagtaaaatattggaatattggcctatatactaataattttagaatttttttttataaatatgacatctaaataaataatttcctactataataaattaaatatgttgaaaataaactaaagcataccaacatattacataatatcatattaagagcatctctaaggaaatactaaatttagtgttacactatcactaaatttagcattaaaaaatatttccactccaaccacaactttaaaaattatactaaaaaatattttttattnnnnnnnnnnttttttaataaaataaaaaaaaatcatattaattaacaatgtatccctctaaataaaaaagtcacgcgacagaaaaattgaattttattttcggcgttttaaaattttacaggatgtattaggggtgttcgcggtgcgggtggtgcggtttttaaccattttttcaaacc

SEQ ID NO: 162919 - DNA, 2375 bp, Cannabis sativa
  modified_base (2311)..(2323): a, c, t, g, unknown or other
agagagagagagagagatcgggtaggaggcaatgagagtaaccctaaaagttaattgttcattttatatgtgtagccgacccaacaattaaaaggcccagatatatggggaccttttatctcgattcttatgtaaaaaccggaatagaaagtcccatttaaaatattaaattgtgtttggcaaatgcataaaaatagtctttccaacactgttttttgtccgttttccaaacaaaaccctattccaaacatttatttaaggctccaaatgtataagtgagattaaaagtttttatcttacttttttatttttttagtgtaaaaagtaggataaaaaatctgttttgttgtagtggtttacaactttacaagaataaaagaattcattcacaagtttatagagaaaatttacaagaaaaataatgtttggccaactcaagggttaaagtttttatttataggtgtttagctactaattacaaaaaatagaattggaaatctttctaacagcctagctaacttggagtaacttggaccaataagaataggatttgatgactggaccaactaattgatactaaataatatattattttttatattataaaagggagggatttcaacttggcaattttttttaagaaaaagaatgggtgtcatgaataataattagtgactaattacataatgaaaaatgccatgtattaagcatctcacgaggtgatatattgttattggatatcacataatttaataattaactcactgcaatgagccacatcactataatgttgaacacgatatgatatatgctcttaaacaataactttattgtgtcgtcgaatagcattctgtatacaaagtaagtacttatcaataaaatctaattatatatgctcttaaacaatattaatattaattaatgagaattcccctgctgagagggagaacgtagttggccttggcctttcacaaagcgaccccagtaccaatggcgctcccaaacagtggccatggaatccaaagggattcctttggtctccggcaagaaaaggacaacgaaaacagtcatggccgcaatccaaccggcgtagaagaggaatgtgccatatttgaagtgacaaagcattgtcaagaaggtttgggacaacacgaaggtggtcccgaagttcaccgcaacactgatgctttggcctgtggctcgaattttcattggaaagatttcgctagggatgagccagctcaaagggccccatgaccatccaaaaccagcagcgtacgtgcatattagcactagtattactatagcgtaccccttcgttatctccttcgttcctgaaacaccactcgtagttgctaccaccccagccaccgccaccttattatatgtacacaaccattactatagaagtacagaaaagatatatatatatatatagcttataacctacgtccatatatatatatttatatatagcttatatacctggcatagaaacatttgaatccctccaacgatgaacaaaaaccgtcgaccatagcgatcaacgacaaaggaagagacgagaatggcaccaaggttgaccaagccaagtatgatggctgcgatcaaagccgaatcgtttcccaatccaacggactgaaagagaataggtgcatagaaggcaatgatattgatcccagtcacctgttgaaagaatggtatccctatcgccatcaccagctgaggacggtactgcctctccaatatgctcaagaatggagactcttcttgcccagctacggctttagccatttcgtttcgcttaactagctccgccagctcagcttccacctcagactctttgccacctcgggccttgagtagcgacaacttggcttgagttagcttcccacgctccaccaagctgttaggtgtgtcggagatcattagcgccccgactgtcattatggctgccggcaccatggcaaggcctagagatagacgccaaccccagctgcggtgggctgtgccgtagtttatgcagttggacgctaccactccaattccgatgaagaattgaaagcctgtgttgaatgcccctcgccactttgggggtgctacttccgacagatagacaggagtcgcctatatgtatagtgagattattaacaaatcttatacaaattaattgagtattattattgggaatgagtagtctctaaaattttctagatgtgtcgacttgtgattggataacgatacaccttaaaagttataacattaaacaaggaataattacataagacactattttttgtaaaatatttannnnnnnnnnnnnaaagaatgtttttttacatttttacggttttccaaaaaataacacgaaaaca

SEQ ID NO: 162920 - DNA, 2826 bp, Cannabis sativa
  modified_base (1506)..(1507): a, c, t, g, unknown or other
cacaacgttatacatttttgacaataagtatatatttgagtcaactacacattttttataagagttagatttaaaataaatagaaattagtcaatagtaattttattttatgtgtgaaatgatccccaaactctgcatttaacttgttgaagaagaagaaaatgaaaaaatacatcattatcaaattagacttgttgtaccaaatattaattatatgtaaaggaatgtttacatcaaatgattatttaagagtagttgaaatctcttagtttaaggtggttagataatggagagtaccacaaaacaatcgatttagtcattcttttcctattacaccttcacaaaaatggctatgaaaataattttaaaaaattgcgtataacaaaaatttaaaaaaattacaaaaaatacgtcaaaaaaaaaaaaatattttgacacttttaaatcttttatttacaaaaaatacatttttagtaaaaataataaattgttttttatagtttatttataataattatgagcttgttttttagtggttttataattaatttatagttatcataagattgatttctcgttattttttaattattttcttacttttattaaataagatatatttttataattttaaaacttcacaaaacttattaataattaataaacttgatccctcattcatcaagtgaaaataatataaatattgaaacaaaggtgtagagttacccatcaaattaaagggctgagatgtaaaataactctaaatttaaaaattaagttaataaatgtcccatttttaaaaaaaaaaattaagaaaatgacgaaatatgataaattaactaataaaaattataaaaatacatttactaaatattatttttttaaaaaaaaattatataataattaaattaagttatataatttttttaatattacatattattatattatcacaaaaataattaaatatattagatcattaaatatatataacagtatttaatatatcgtatcactgaaaattaatatactgtattaataaaattatatactacaaagaaattataacaacactaaatttatactcaaaaaatagatatatcatactaaaaaaaattatatataccactattaaattatgtctacatactaaaaaattatatataataaaataaaaactaaatatcattttaaataaatgatatactatagacaataaaaaccatataccgtacaacaaaacatacatacatacaataaaaaataaaataaaataatataatattattaaaaacaattgtatatatcgtattaataaaattatatacaaccataaaataagtataacatacttgcgaaattatatatcacctttatatataataaaataaaaattaaacataatgcatgatctaaaataaaatgatatattatacaataaaacttatataccatataacaaaaaatatataccttataatcaaaaaatatatataataacaatanntaaaaataaaaatatataggatgttaataaaattatatatcatgttaacaaaagtacaatagaaataaaacttaaatattattttttaaaaaataatataccgtataacaaaaaatacatatataccattaattaaaatatatatactaataattaaaaaatatatattaataatatatatgtacaatatactaactaaattatatgccactattgtatataaaattttaaaaactaattaaatattatttaaaataaatatatatcataaaatatataaaaataataattaaatgtatatagcatgccaataaaattatgtacatacattaaaatatttgtattgtgctaacaaaattatataccactattatacatagcaaaaaaaaatatatatatatatatcatctaagaataataacatactatgcaacaaaatagaaatacactgtatagatataaaatctatataccaacaacccacaacaactcataaaaaattaaaaaaaaaatcgatataactttcaaataacaaagattttaacaaaactaatatagatatactataatctttaagtaatttgtttctaattctaaaaataaagtatgaaaaaaaaaattattaattttaattatatggcaaaagacaatataaataataaataatttaaatggaacattttgctacaagttttaaattaaagacatttactaacatatttctataatttagggtcattactataatttcctcaaattaaactcgtaattatatcaaaatcataattatacataattaattcatgcaaaccaattaaataatagtgtttcactccatgacattttcatcataatctaatttcaaattaataataatatatggctgataagatttaggcaccaaagtacaattttttccaaaagttattattattactattaataataatatcattatctttttaaacaatcaatatcatttttatcactaatatttgagtttatcaaatgctaataacaatgacattctcattaaatttttgagcaagtgatgatccattttgatcaaatgctattatcaactattgttataagagtaatttatggcgtaaatatataaatttaatttttagttatggataaatatttatgtttaatttttgacaatcttaatacctatgttatatttctaaaactttagtaggtacctgaccattaaatgtcaagtcattatccacgtgtcttagtcttatgggattatttcacaaatacacaaaaacaataaaaaaaaattacaaaaatatggtttcacaaaattt

SEQ ID NO: 162921 - DNA, 1268 bp, Cannabis sativa
tggaaaataaagttgtgatatttcacatgcactcgaccacagaagctgacttcttcttgtgattatggggtgtccgcgtggcagttgtacgtgtgacagggcacaactaacaaggagtcatcttccaggaacgactatatttcgatgatggtttaattttttagcgtgaaaatctaaaaaggagcatcttcatcattccttcatgcctgtattggagagcattaaatgctgagatacacatagattgttggtctccctgatcgttggatggaagatgtatttctgaacaaaagatcatggctctcaatatcttcctcacgtggatcacctttttgggtataaatacctctggtaacctctagtaaccattttcacttcttttttaaaatttttaatccttcaaatagcccaagtttccctatactctctagaacttgaaaccgcatttgaaaagaatcctttttcatcaatttggaaaatgccgtggacttttgtctttgttcacggctaaggattcgggaacaagaatctcctcactttcgttctccagtgatcaagatggctacaacagaggagatcgcaagcttggagtttgaagcaaaaataaattcattgatcgcctcagcctctcgtctccgagaaaagtgcaatcaacttcctgagccaaacccagtgacaatcaacttaacttctccactctcactatcaggtatgtgtttttgtctatggaatgtgttttctaaattctccatattaaattgtatgtgcacgctctattctgggattaaattagggtttcttgactgtgtgattgtcactttaggtagatttagggtttcttaaatttctcaagttgtaagttcttgagttgatcaatatgtgttgtgaatgtttgcgaattattttatctgcccaaaatcccttatgtttttgtctttatggttaatttatgtcatctcccttgctacatctttttaaatttcctatttggaacgaggaactcctagaaggtctcatttttgagtagtgagtctagttgggacctctccaagcagtttatgggggaggacccccagctccctttctatgttaggtatttaaggtagcaaactacttggattttcttatttttgtacagaaacaatgtctaagcaaacctgttaaaaggaggttgactcaaaggaggagatcatggaacaccaagagtcccctaagtttgtcttgaatgacagtccatgggaattggaccagcacatcaatatgtttaa

SEQ ID NO: 162922 - DNA, 2661 bp, Cannabis sativa
tttttacctgcttgcatattgtactattcttcatctgatcaaaatttggagtgccaaaggctacagtatagaagaaatcccgccatagtaactagaaaagaagacaatgtcattttcagattgctgcactcaaaacacgtctcaaggaaatgaatcattcaagaagattataacctgtccaacaagggagactgggggtgatgtgtgctttttcactatcttgtgtacatcttgaaggcattgataaaagtatcttgaagagagacatccaaactgccatatacattttttatcttcataaaaaccaataggcaagcaaataatacaaggcataacactcaaaacatatatataaagctcttattgtttgttactcactttcaaataaggtgataaaacagtagttgctggcttcaaaaatgcagatgggtcacccttaggtttctcaaactttgccacccactcctgcagtgtatgactgtgaatgatttattttttttaagcaaagaaaggaatttttattcaaaaacaaccaccaaaccatacaagaacaagctgcaaaggtgcagccaaagctcaaaaagagttgattacagaaacaacatcagcctcccttttactaagtctagcaaagttcacatccttaactctggttcttaagttaacttccaaactaatcgaattggcaaaattacaagtaagctcaaacacacacctatccctgttacaccaaaataaataaaaaaaagtagtaaccgtagcatttagaacagtagccaccagccctttccggttacaccaaataaaatgaaagtgaatgattaagacaaaaaattaacacatactattttagtcccctgtattttgctcaaattctagtttaatttctctatataagccaaagtcagatacatgaactccaagaaaccatatcctaccttgtcacttaatgaatctcttaacctcttcaaggcttcagattcacctcctctgaaaggagttaagtaatcctcctgcaaaaaaattattcaatatttttaccatataaattgaacttcaaaaaaatataatagtagtaggttttttgagctcaagacctgttcagtgtcttcatagccaagttctttaagcgttggaacttcaaaaatttcacaatctccatgatctccaacaagaggaagagaagaacgtgaggtcataagtggagaggatgcccatgatggttccccagcaagtttcaaaaaagattgataagtcagcggtggctttcctccattctttcaaccaatcattgcaaagagaaaaactatatatgaatcagtcagaagaaaacgaaaaaacttctcagataaaaagcaaaacgaaactagataaagccaattgcaacattcttgttcttacaatgttacaagtttggtctataaatataaattaccagcgtttgaggtgaaaattataatgaagtattaaatcaactatcaaattcagaagtaagtactagtcatttcaaaaggtcctaacaatttaaaataaaataaagaaatatatgtattatcataacaatcatgttacccaaaaaccaaaaacttgggcaagacaaagaaataaaattacatgcacaatcaaaataagcatgcccaaaaagcttttccttttcgcttacataccttttgtatgatatctccagggttaaatagtgtgtgactcacaggagagaaaacctcaattccagctgcagatgcataatcctatcacccaaacagaaaaacatcacatttttttttctttttcatactaataccaaaaattaactataatgtttaaccaagagcagagattaccttaactctaacgtccaaagcttggtaatacggttcagtatcatattcaaagcaaagctttttcacatcccactgcaaaaaaaaaaaaaaaaagtgttctaataaaatttcaacgaaaaccataaacagtaattaagacccatcaacgagattaagttataaacctgcttcaagcaacgaaaaaggacctcgccaggttcccccttgagaaccaacaaccgggagccgagtttcttgaggttggaatccaaatccaccaggctctcaagcaagaaccgtattcggttcaacccggcccgagacgacccgggagagaaggcgttgtagtcgggtttcatgtaatgtgggtcgatgatgaaaacagggtagagggcggcggtgcccttggaggcataatcgagcgccgggttgtcgtggatcctaagacctttccgaaaccagatcaaagagcttgatccggacgccattaatgatgggtatggattagagagaaagaaattggtgtttgatttggaaaaagggttttaaaccgccgggtttagtttcgcgccttaaattagttatgggaccggttcaaaacacgccacgtagctcgtgttcgtgcatgaaataaaaagtggagaagtgacgtgtgaaagaccaaaacgacgccgtaattgataggttgcactttggatccctagcctctcgaatgcggttgcccgttagagtggtctttctaaatgagacaatgttctaggggtgttcatccgatccaatccgtatttttttggtcaaacaatatccaattcgcactaagtgcggatttcatattttggat

SEQ ID NO: 162923 - DNA, 2043 bp, Cannabis sativa
aaaataatttccaacagtaatttatatcaaccaatcatcctgggatctgcataaccacaagaaaaaatcttcgaaagtatccataaagagagcatctgttttcagcccccatggacataggaaccaaactccacgtgcgaacggacatttgcagaacagatgcagctccgtttctgcttcctcaccataaaaagcgcacatacggtcgtagtaacttaggaaaccgaaacgaactttaaggggaagacaggcagataaaattttccaaatgagtagtgtttgctgaggatgtaatttcattttccacaaagacttccacaccggtctttcctggtggaatttggccttttgagaaagccagtaggcgcttttgatgaagaaactccccttcgaaccaaccttccagaacagggtatccacatcgtcatccaacgacctaatagagaggattgcagctgcaacatcagaatcaaaacactgatttactagcttggtgtcccaattgcgagtgccattaacaaataagtcaaccaccgatgagaaggcatgtgttgtgctgtaggagaaacttctttgaacctcatcaggacaaaaacctggaacccatggcactgtccatatatcaatttctccccttgtaactaggtaccccgcaccagcaacacatatattacgtgcctctaagatccctttccacacaaaggagtccccattatgtttttcaacattccagaaatccattctatggcaatattttgcactcaggattttaacccacggtctattactttaacataagacatgccaagctaatttggccaaaagcgccatattcatatcacgaaaccctcgtaagcctaaaccaccatttctctttggttgacagattttagaccaacatttcgtagccagatagcggttgtttatgctgttctcattgcaacctttccaccagaatcgagccactattctgtccaactccgtgcacactgatacaaaaattttatgagtgtccattgtgtaacaagggatactatgtagaacagagttgatgagagtgagccgaaccgcttgagataaatgctttgctttccagccctcaagcttgtttagaatcttagatttgtgaaaagagaaatcttgtcgtttgtttgctgaaagaaagaaaggattacccaaatacttttcatgtctgctcaaaatatgcattcccaaaacgctaagaatcttctctttgtcttccctcttgacctttggggaaaataccgtgtcactctttgccttactaattcttcaagaatttagatattatggcagtttggttttaagtatgaacttattttatcatcataagaaaactcaattatgattttgatatgtccattgaagttttgaaatggccagcaaaaaacatggcgagttgcctgtttggcgatagaagaaaggcttcttcccaagcttcaatcgtcagcaatcgtagtatcttggcaactttgttatgctccatctctttgtgatcttgtttatctcgtccgttttctcattttgttttagtcgtcttgattttttaacgattattttaattttttagttattattacattccattttttaaataaataaggatagttgtcacgaaattattttaattttattattattattatttttttctttaaaatattccatattaatattaatttatattattttaattctttctatatttaaagtttttcgttattttcaagaatgagtagttattttatttagacatacattattctttattgattatttatgtatatatataattgttatgtctttattaagttttatttttggtatgttttaagttttttgtgagtacgttttaatcataatatttttgtttttagtattgttatgtctttgttttattttgctctttgttggaagattatttgttagacatttatatgtataaactgaaatatatatgtttatgtataaaatgcggaattaaatcaaacatatatacactatgaataaggatcgaaatac

SEQ ID NO: 162924 - DNA, 1649 bp, Cannabis sativa
  modified_base (1339)..(1339): a, c, t, g, unknown or other
  modified_base (1371)..(1371): a, c, t, g, unknown or other
tgatttactattattgttagcaacattagtaataagattacttcaccaaatcagaagagctttattttgcaaaattatccctgtcctggaaataaacttatgtcaggtaatctatgttaactagagataaaggtggtgtttgaaatttgatggggatactgaccaatgcaatgaaatttaagagggtaagatcggtgtacaatttgtatgattgtatattttgacctagtcttggggggcatgtatcataatgtgaggattagctataagcaatttaattccgcaattttagaatgtgcaatagtatcagagtttgctttacaaattttgtatcaactctcctataagaagtcttatcttcctcatattttggtatcttgttggcattttgttttgataaggtgaaaggtttattgtcataatgtactaagaacaactccaaggatttgaaggtgccttatcagctaattttggttaatacctttttatttacttcattacagttatctttttttatttgtttagcttattaatattaaaaaattatattatttgtattttagttatattttctttttgaaacctgaggctggattaattcatatctcatatggggttaagagagtggtactaatgactgttttatcttacttctatagagaagattatgtcatgctcatgtctcattttttctcataagccggttctagacagaagattatgtcatatctcattggtttttatctattaacaaaaacatatcataagcctgcgttgatgatgaatcatattataaacaggtaattagtttgatctgaatttgattgctagcaacgaagactattgaagaagaaaaaactaatgagggtgaagagctacaccactgctttgattataggattaatgtactaaggttgaaccgattatggtacttacaccaaattactctgatggtcggtgaggattctcttaaagtctcacaagaaagagtaccactcacatctcatgagctaaaatagttaaaaaaatatatatatatataaagatatcaagtcagctaaaacagctcaaagtagagaaaagtcagctaaaacagctcaaagtagagaagcactattcctttatacagtataatctctatctaagaatacacttaggattaagcaaattatatttctaattgagaggttataactaaatagagttatattaaaaaaaattcaaaatatcaaaaaatatcaatgtaacaacaatgacattaaacaatccttaatattatattataatagaattatttttgagtagacataatatttatacatgtattacaatttggaanaaaattactaattctacataaataattttatnaaatatatgtatatattttattaacatgtaattaatcttatatagagatatacaatgttaatacgggacttaaaaattgtataactaattacaatttaaaagttatttttatttataatagactcaaattgggacttgattttttttataacaaattagagattattttttaatagggtattcttaaattgaggttatactgtgttaggaataattgcggcaaaagtttccaaaaacttaagattgatgcaggttagtccccaacctcgaaaattagc

SEQ ID NO: 162925 - DNA, 1776 bp, Cannabis sativa
agggcataaaacccaacaacattcgcgatccttttggacagtcaacctccgtgataggcccttcgagtacccatctaggtatcacttaggcaacctttgggcttggaccactgcgggtccccgagtggtaataagtctttggtatctgggaagctaaggtaaagcaaggtggatctctgcatacctctaagtattgaccttctttcagattagtgaagtttctccgtgactttgtttaattgaggggttttaatttatgagatgatgagattattgcttctttttatgccacatgtcacttatttaaaaatatgaataacaattgctattaggttttagtgatgtatagcaaaactacaagatgatattttaaaaatagctaacgttatttcgtaagtcattatattcaattatgtaggatcagatatttaattataacaataacaatgtcacacttcaagtggtgctaagtacctagttgataatttatagtcaaaatgtgactaaaaaaaactgactataattattaagctattagtttatgattaattttcaaaacttttaagttgttggacatttagaaagtaattaatgtagggatatattcttatacagtcttacactatataataagaatgatacgttgtagtaaattttacaaaattttaaatattatatactccctatcgatcatagattttccatatatatatagccaattaagatgttatgtatatatataaattttttttttgagagagaaagatgttttacaattgtttggctctattccttcacattatcacaatcaaaacataccataaaaacccttgccaaaaaaagaacaaaagaacaaaatacaacacatcaagcacatatagacctatgtgtcttcgaaagtcagagaatactataattaccatgaaaaaattaaagaaaattacaacatcaaattgacgtcttcgttttgatatctcaaaagtcaaccgaatcaatgactgagattctaattctataatccaaaagtgtgtcccatcgcccaaactcaaactgatatttgactcatttaaaatagtgatgatggaacgtatcaatacaggtcctacgagtctaggagtgcccttattagtttattttgccatggaaactaattaagaaattataggatatatattagattatgtttaaacaagatgattcacggtcatcaatcgtcctgtttaaatgtaagcatatgtaattttctctactattatatactaaaaggtaaaatttagaaaaaataaaaataatagttgacaaaaaattatgaaaaaaagcaaaataataacaaaaaaagattaatcctatatgtatgctctacacgattatatattagaaaaatttcaaaaaataaataagagaaaaattgaagaaaatataggagaaaaatagtaaaaaaaatgtacagaaaatcgacaaaagtattaataatttgtccaaatatgatataaaaaaatacacacactcacatagaaaatttttacctatgcgcaacaagtaaacaaaacttacgaagttatgtataattgaacaaaaagttaattctaatagatatgtacatattaataagaaaaatgctaaggaatgtgctaaatactataaatggtaacatatagttattagttcatttcaatatcgagtctcataaattattaagtgtcatgtgttagaaaaattaataataaacccaagatctatttgtatataacatagaacacaataataagatataat

SEQ ID NO: 162926 - DNA, 1829 bp, Cannabis sativa
tatttaggtacggaagaagaggctgctgaagcatacgacatagcagcaataaaattccgagggttgaacgcagtaacaaactttgacatgaatcgatacgacgtcaaaagcatattggaaagcaatactctcccaatcggaggcggagccgccaagcgcctcaaggaggctcaagccttggagtcttcaagaaaacgtgaggaaatgatggccctaacctccaccttcgcacactacggctcagccgcagcaggagctggctcaaccagctcatccccattatcatcaacaatgaataataatagtcgtctgcaggcgtacccactgttgcaaccgcagacaaacagcttcatcgatcacatgaccccacacctcactctccaaaaccacgatacgtcatcaccatatcatcaagacccaaataattcttcgttgcttcatcaccagcagaactacattcaaactcagcttcagttgcaacaacagcagcccggaacgtcgtcgtatcagttttacaatggctataataataataataataacaacaacaatagccacaataataacggtaataacaaccagtttcttcaggggtttatggagaatattggaacgacgtcttctgttatggacaacactgggggcaacagttatggcggctatggtcttgataatacagcagcggctactggctcggggactagtgcggaggagcttgctcttgtgaaggtggattatgatatgccttctggcggttacggaggatggtccgccggttctggttcgggttcggggaatgcctcaaatccgggactttttactatgtggaatgacttataggcagatcaatgacaatttcaaagaaagcaccccaacaacaaatagtactggagagtttgacttgtttttattctgatgtccttttttttcttctttttgatcgataggggtctgattttaattgtgttttgacttaattaatttaatgatattattataaggtctggattggcaagcgcaagggggtgggttttgatgggttttgttttgtgaaagtagagacgacccaaattttgtatacacagatattactcatcttcaatttttgattagtacttttattaattatcatggtctgatgtctgttttattatgtatttttatgttaatttatatatgcaattaaataggtcatgtacgattggatttgatccacatgctttatagctgtgttcgaatgttaattaaaatgatttattattagtttctggttttccatgagtttacttgagtttcttgagtgttcatatattttctagagtgcacatatatttactctaacagtttcaaaatgtcaaccgtaccatacacatacaacctggaaagatatatcaaaggacacaaaaggaaaaacttctggactcttcaaaacaaattgtgctagggtttcttctactcgtgaaagtcatggttcagtcgtcgacactcggcgttcttgtccatccgggatctgcatctgcttgtgacggttctactccaatctcggccctacctaggttggcagttcacgccattaaaagtcactactacaaaaaagactttttgtttcggtttttaaatgacgtaaaaaaagttttgcttcagttggtgtaacaaacgctattgccacagacacaaatagtgttattttttgcttcgattatgaactgacgctaattggttttttgcttcggttatgaaccgaagccaaaaaaaaagtttttggtttagttcataaccgaagcaaatagtagtgcactgatgctaattagtttttttgctttagttaa

SEQ ID NO: 162927 - DNA, 2971 bp, Cannabis sativa
  modified_base (264)..(276): a, c, t, g, unknown or other
  modified_base (959)..(968): a, c, t, g, unknown or other
ggtagtggtgcctcaccttactcaattgtcaactatgtatagtataatcattttcgtttaccattttttagaaagaaaaaaaaaaaactaattacaatagtaaaaaattaaaagttaatataagtgcatcaccaatagaatatcatattttaagaaagtttaaaatattaatactataatagtgtgctaaaatttgtgttaaatttgttattttagactttgtgttttgtaaaaattattaattagactatttattttgttaannnnnnnnnnnnnccctatattttttaaaatggtataaataaagctccgagcttaatttttaacaatttttttaatataatcgacttgaagacaattcctaacacgaacaaatgcaataaatgttactacttttgccacaacacctctagatcgattttttattaagttatattatgatagaaaatcagttcaaggtactatttagtattattttgaagaatactgggtctaatttgtcatttatcataacattatgatctaattggtaacttttataaaatacaaggtctaaaatagtatttactctattaaatataaccaaacaataaatgcaacattttgtacgatagggtttcgtgatgtagattaattcaaattctcaaattaaaattaaataaatacaatatttctatttacaattttgataatttaattattagtgataagatttagttgttaagatttattataatgataatgataaggttaaaatcaagcttattataataacaaatatataaaaaattattttatataatattttattttttatatattttttttttcaaatataaatttatatgtatttgatataaataatttatagtatttttatattaagttttatcaaatgtaaaaaaaaaatagaaactagaaaaattctaggttgatgttgtttgttaatattaaaatannnnnnnnnntattttttttaaaaaaaataagagattcaataattatttattttattataattaatttattttaaatatttttatttttctaatacataataaataagtaaatatggttttagtataaataaacttattatagtcttttaatcaaaataacttttttctaaaagttgggtttgagcagctttagcttttagctatagtttctccaaaaattcttcaaaaagctattttttgactgtttactaaacactttttttatcacatctgttttaaaaagtaattttttgtttttccaaaagctgtaccaaacgggcccttaataactaatttgactgctgaagttaattggaagaagcagaagaaattataaagtacaaacttaacttactaaaaggggtctgttcaggtctatttttaccgttactatttttgtggattaatggtattttatttttattaaactaagaactttattatgaggtgcttaatattattgttgggtatcaacttaagtcccatattggtagaatatgtttatcttgaatataaatgttctacatacttcattagtatgagactttttgggaaggtgcctaaaaataaaatcgtgagggtttaggcccaaagtggacaatattatactaatgtgagagtcaagctaaggtagcggcccgacaaggtaaagaattaatagtcaagagttgtcttgaatataagtgctctacttactttattgtgcccaaaaacaaaaccgtgagtgtttaggccaaaacggacaatatcatactaatgtgggagtcaaaataaggtagcaacctcacaaagtggaagagcaaggccaacaattataaatatatgagcatagcataaagttattggacacttttatgattctatggcattgtattatttaaagtgaccttctccatgtgttgatataatatacatgtttagttaaataacaatattaggctggtttataaattaatcatatcattgagattatggctaaagggttgattattttaactcttttactctaaatgggtagtttttcattgaagctcatttttttttaatttacagtgcaagcgtctttggggtctcaactgaatcaatgcaatgttgttatgattcgagagggaacaatgtgcctactattctattgctaatgcatgagtgcctatactcacaaggaggtttgaaggtaagcaatttaaccccatcttctttaataagccattagttttacttctactcataaattttattatctattttaaaaaggttcatatttgtatctttttgtggctgaagttacattagtatttgaatgactttttatttggtgcagacagaaggatattcaaatggctctaataccatgttgagaattatgaagttccatctcaaaaccaattgacaatgagtggagtagcccatgttcaatactctaccatttctactatttattctatgtgagacaatatccataataggattaatcaaatcttggtttaatgagcttccttcaggagtactagatggactttcacctgaacaagttctccaatgcaacaacgaagaagaatgcatcgagcttgtgaagtaactaaagcctacagagacagcattgctcaactgggcagttgatctcatgactgttgctgttgaggaagaagagtacaacaaaatgaacgccagaaatattgttatggttttttctccaaacatgactcaagtatggtaaaaacagctacccccaatgatgttactttgttttcctattaactagtaatattattaatgaagctaagattgactaactctcttttcttgatcaccagatgtctgatccattgacggctatgcatgcgattcaagcgatgaacttgcttaagactctcatcactatggaaaggaaatgaaataattttcattctatttctttgtttggttgcatattaaagtgttggaatgtcatcccaatggaatgacctttccac

SEQ ID NO: 162928 - DNA, 3210 bp, Cannabis sativa
agaggcgagaatgagagaaatatagttaatgatgtattaggggtcttttttttattaagcagtacatatactgcctttttattttttattttattttattattttttttaaagaaagaatgagagagaggcgagaatgagagaaatattaataatgtatattagggttttttttattaagcattacatatactgtctttttattttattgcttttttctagaaagaaactaccttattttccttcttctttttttttttttgaaatgactaccttattttctttaaatattttcttttattatttattatttattttttatttacatattaataatatttgtatttttcattaaaaaaaaataaaattatgatatagtgacgtgcctaaagccaagtcccccctagacttggggagacacaatttatcccacaccttagggtgaattccacagttacctttctcaaacccccaccaaaaattccaaaccaaagctgtcaatcctagagataagacagttagagagcttggtagtttgcatggcgtacaaaggcatcgaaagccccattaattttatcaaagtagctctccctactttcgaaagcacttttgctttccacccttgccgcttagaagtgaggttatctagaatgaaattgaaatgtgcattttttcactttgatcgaaataaagggagccccaaatatttcacattaccttccagtcctataatccccaactcatctcgaatgcccttatttagatcttctaaggtattgttactgaaaaagattgacgtttttagcttattgacctgctacctagaccaatcacaaaatttttcaaggcaaagccagaatcctttagcctcttccagagaggctttcccaaccaaaattaaatcatccgtgaagaaaatatgagacagaataagaccaccccaagaaagacaaattcctcggatactactcttgaagcagtctggacaaaatctcagctgcccaaataaagaggtacagggagagtggatccccttggcgcaaactacacgacagatgaattgtgccaacctggcccccattaaggaacacatttagagaagtggtggagataccttaagaaacccaatttctaaacatgacaggcacactaaagcaagatagaacatgatcaatgaactgtcatctaatcttatcataagctttcaccagatcaattttgatagcaaaaaaatcatcttttcccttcttccttttgaatgagtgaatgatctcttgaataatggcattactatcctagatatttctacccagaacgaaagctgcctgggtagggcaaacaagtcttggcagaaaaggcttaatcctattggcaatgattttcgatatcaccttataagacacattgcaaagagaatcagtctaaaattatgcacccgcttcgggtttcgaatcttcggaataagcactatatttgtagtattcacccctttgtgcatattacaagtggtagaaaaatctgagatggcctcgcaaaaatccttccccactgaatcccagtaatgcataaagaaaatgactgacatcccatctagcccaggaaccttatggtttcccatggcaaacaaagttttctgaatctcgtcaaagttgggtattctaaccagatcctcctgctcttctggggacagtctatcatgaattagattagagcagtttagatccatcctagatccaaagtcagaaaaaaatatccctcgggaatacggtgaattcttttccaatgtcgcttcgtttggaaatccagttgtcattcttatccaagagactctcaattgcattgtgccttcctctaatagtagctgacagaaagaaaaacttggtgcatttatccccttccttgagctaagaaacgcgagctcattgtttccaaaaaaaaaaaaaaaatcctgtctaaggcctcattaagagctctacggacctcactttctgctttccagtctcagggagcatttacaagtgattcaacttactttctagctctttaatctttccatcaatattcccataaggtggcttttttgttttctattggaaaagtagaaagcttagagtaaaatcagtagagccttggctaaagttttgccccctacatgaagggataatgaggtttatataggctagagtttgggtctggcatacccatgacccatttagattttatttgtaaaagcaagcccattattgggataaaatacacaaacacatgacatgaggcccactagagatactcagctcgtggggcgacgattccgtaatggcaaagagaccgtctagtgcagggcacgtgttgtacaaagactacgcctggcagacaaaagtgttagaggagctgtcagacaaaaagggtgtatgtagtgcgcgcactatcatgatctgacataggagacaatattcgatcttgtgtcagagagatgggcacgtcattataggggaggcgaatgcctccctcctcatggtagacatacgactcttgatccgtggtaggctttcgggcatcaacctgtgcgacttgcttccatgtatgcccttattttcattaggagatctttgttccttctgtgtcccaaaagactaggcaccttctgggctctggaagactgttaagtttcagaggcaaggcttttagcctttgttgggttggcccattctaagtttagtttggacttttgtaaacaagaaggcttaggcccaatttttaatagtgattaccttttagttgaccctatgtcttttttcagaaacataaataacaaaaactaacatacaaatgagttacatgaaataactaaataaataaaccaattgagaaacaatacaaaaaatacatttacaatagaaaaaaaaaaaactaattatcatatactcgtaaaaattgagaaactggttgctagataaacaaagaaaacattacataatggtatatattagaaaaaatcccataaaagtttaaaaatttaaaaaatatcataaaaagtttaataaaaaaactaccatatttttcgcaagatacaaaaaagtttccatgtaacttttaagaaattttacacaaagtattatggaataattatataagacaccaatttttataaaatatttatatttttacgttcaaagaatatttttttttacatttttacgattttccaaaa

SEQ ID NO: 162929 - DNA, 1619 bp, Cannabis sativa
attactagtagagagaagaacatcatcctattgagattgagaaactcacagtggcatcatgagtcccagaagcccggttttttgtgaagacgttcctaaccagccccctagtgatacccatctattgttggcaagttttctcaaacagtttgtctacaaatactattactactattaaatgtctatctatggtgaaagaccatctggtttagtagttgagattccctaaattatttaatggcaaaaagttggaatactgaaatgacctcctcactcaactggaactaaacaacaaactaagctttgggtcctaatacaactttaatgagcaagagaagatcattaatatatttcaatgtgagaaaaagccacttataaactagtgttaaataacaagatttgcaaggctttagagctgtacatgcactttttgatcacataagtattagattagataggaaagatggggtttaagtgtcttttctctttctctttctctttggtgtagtacactttttgcacatggctatcagtgaattggcctcataaagtttgcttggtattggggtcatgtctattcctttctggttattgttgctagagtacttgcccttatgtaattctttctaatgggttagtttcttgagcatgacaaagaaagacacatgctaataaacctttaaaggtctgtttggataaccataacccagtgagtcagtgacaaaagtcatactcatactgcttaataaaagaaagttcttgaatttgtaccctacaatacaatgctcattaattaatcttttctcctttcccaaaagtgggttatgtttagatatttatttcattcaacaaactcacaaaagtgagttatgtttaattttcttattatgttttgttatatgaggtatacaatgtgggtgtgctataccaattacaaagtaccaagataatttcagaatgtactactaattttgacctcttgatgataatttgaaacacccatttgttatattagatccaaatttgagccactcgtttaagtaatgataaattgggacaaaaattgtttattgtattatagtttaataaaagggtagggtggcacgtgctatgaagtagaaatgaaagttataaagttttaaactgcatttggggataagaaggcttttagaaatgaaagaacaatgtaaatggactacatcatttttctaaaagtggtccttagctatcacaattttgattggctatcatgttcaagcacaaaaattaataattgaggagaaaaatttatgatgggttttgagaccaattatgaaactatctctgcttgcaattatggaatcctctcatgcttatctgtctcttttctcctttgtagttagcaaaggaggcaatggagctttaaccgatcatagagtaattattttattattattattagagcaaggaacaataagtgcttcacgttgttgattaaacttctgggcaagccgccgaccaattgagcacactcaaagatggctctactccactttctttaacaaaagtaccaacgactatatttatatttacatttatttatttatttttttcacaaggaatattattactgatttttt

SEQ ID NO: 162930 - DNA, 1589 bp, Cannabis sativa
  modified_base (684)..(684): a, c, t, g, unknown or other
caaggcgccatctcatggtagtgttgggcactatttgtgcctaatagcaatgccttttttttaactctatttcttatttgatttactcggtattcacaaggcttattgctctggtttactatttcttctcaaagcttttatttttgcaggcctggtatgttgggtaaaaacaagtttgaatttggaaagacatactgtgatgccaaatttatacgcagcttggatggaaaaattttccaggtaatattcagagcaaagataaactatattataaagtttattatggcgacctgcccttgtaggtttttggtagttaagttataatgttttgctatttaatcagaaggcaccccctactactaagcttgttggtcatgaaagacctctttttctttgttgatgcttcctatattacggtttcatgggttcttaggtgtttgcaatatatttatatttatatatactaggtattagtaacatgcaatttatgtttgcttagagttgttattacgtaattattaatttaaataataataataaaattaaatctaatacaatttaattatatattttaaatatataaaatttaatctagttttgaatttatttataaaaaaatatatctaactaattttatttaacaattaaataagtaaataaatttaaatattttaaataatatanctaataaatttgttataaagtatcattaattaattgaattatcgtctaattcaaatttaagctaagatttatattaaaaaataattatttaattttgttgatacttttaaattaactttaaatatttaaaattattttattttatttttttcttaaaaaaagataattaattgattaatttaacggtgttagttttaaccattaactttaaaggaaaaaagaaaaaaccgttaaaccaataatttcggttagatagccacatttaatataatagagatatatgcatttatgtatgtatattttcaaagaacaattgtagataacttttgttgccataaaaatgttttcctcaatgatttgattgctattctatctgataatctgagacactctctgaggtgctgcaggatttctcaaagggcactcgtttggaggagttgaatgtgctactaaagcagactgttatggtacactcttgttcatgatatgcttgcaagtgtacaaactttcttttttttcgtagatgcagtctggaaatgttaatcttgttttggtagactagatcattgctaattatagtatcatgagtttcatcagaaaaacaataaggaaattatagtatcatgaaattttgtccttttaaattatgtataacccaagtttttatattttatattaaacattaattgttaggtttaacgtaagtttaacttttatggggcgtttggtatgaggtttagacttgattagaatgagaatataaaatttaagttaaatttgaatgacaagggttttgtatttccaagtaggtctcacttttttaattaaaatggtggtaatgttaatcccctcaaacacatgagtttcatattccctccaattctactccctccaactctactctc

SEQ ID NO: 162931 - DNA, 2695 bp, Cannabis sativa
  modified_base (2667)..(2670): a, c, t, g, unknown or other
gaaagcattgggttattggagaaacttcaagttctcaacttgggaagtaacttgctttcaggtacattaccttttgtttttgggaacttaactgagcttgttgttcttgatttgtctcaaaattcgtacttggtgagtaaaattcctagtgatattggcaagcttgtgaagcttgagcagctactgttgcaaacctctggttttcatggtgagcttcctgattctttagagggcttgagaagtttgaccactttggacctttctcagaacaatctaactggaaaggttcctcagacactggggtcttctctcaaaaacttggtgtcttttgatgtttcagagaacaagcttcaaggtttattcccagatggcatttgtagccaaaagggtgttataaatctcagtctacacactaatctatttagtggtaaaattcctagctccatcaaccaatgtttgagtcttgagaggtttcaagttcagaacaacatgttttctggtgatttcccaactggggtttggtcattgcccaaacttaagcttattagagctgaaaacaatttattttctggagctattcctgaatccatagcattggctgctcaactggagcaagttcagattgataacaacagcttcagtggcaggattcctgagggtcttggacatgtcaagagcttgtatagattctctgcatctagtaatggtttttatggagaacttcctccaaacttctgtgactctcctgttatgagcataataaatctctcccaaaattctctttctggtgacattccagagctgaagaattgcaggaaacttgtgtcattgtctttggcagaaaacagtctaactgggaatatgcctccttctctttcagacttaccagtactaacttaccttgatctttctgataacaatctcactggtccaatccctcaaggccttcaaaatttgaagcttgccctcttcaatgtttccttcaaccagctatctggtaaggttccctactccttgatttcaggtcttccagcttcatttcttcaagggaatcctgaactctgcggtcctggattgcccaattcatgttctgatgatgagctaccaagacaccaggacattggtattacaacattgacttgtgccttgatctctttagcttttgctgttggaactatggttgttgttgctggttttattgtgtatcaaagatctatgaagaagagatctcaagttggctcgtggcgttcggttttcttttatcctctcagagtcactgagcatgatttggtgatgggaatgaatgataagagtgctgcaggaaatggtggagtttttggtagagtttacattttaagcttgccaagtggtgaacaagttgctgtgaagaagcttgttaagttcgaaactcagtcttcgaaagctttgaaagttgaaatcaagactctggccaagatcagacataagaacattgttaaacttttggggttttgccattctgaggattcaatctttttgatctatgagttccaacacagaggaagtttaggtgacttgattggtaaaacagaatttcagttggaatggtgtgtaaggatgaaaattgctattggtgttgctcaaggactagcctaccttcacaaggattatgttcctcatttactccacagaaatgtcaaatccagaaacatacttctggatgaagatttcgaaccaaagcttacagatttcgctcttgatcgaattgtgggagaagctgctttccaatcaacagtaacatctgaatctcctgtctcatgttacattgcaccaggtaacaagcttgtgtttttgatgttgtcaaattgtgttatcatttcttatctttaaagtgttggtttttgtatctaaattcctcattttgtttactgattacagaatatggatacagtaagaaaccaagtgaacaaatggatgtatacagctttggtgtagtgctccttgagctagtcacaggaagaccggccgagcaagctgaaacatcggatgatttgctggatgttgtaaagtgggtaaggagaaaagtaaacatcactaatggagcctctcaagttcttgatcaggagatatcgaattcatcatcgaaacaagagatgttaggagttcttgacattgctctacgctgcacatctgtgatgccagagaagagaccatccatgtttgaagttgctaaatcacttcagtctcttaactcaagaaccaatctcccttgtatagagttcacttcctctgaatctgatgatcactctcttccagtctaaaaacaaaacacaggacagcttcactttgtatgtaaattcaacttggttgacttttgatagatggggatgggaaaaatgatgtttgggcatgaattttctttacctgttttaatcagaaagtgtttcttggatttccaaatgtaatattttagtcactacctatggaatttcatctcatatataccaagagactcatatcttttctagtttggcaatttgttttttgcaaccttataatcaaacaaatgtcaaattttgaaacttgatcattgtgaagaatgatgggttaaatttatgtcttgaaacattagaggataacagtaaattcttgacttggaccagaaacttaggtggtgtttggttggannnnatgaaatggaatggaatggaaagga

SEQ ID NO: 162932 - DNA, 1129 bp, Cannabis sativa
ttaaataaaatataaaatttgtatcaaaatgctttaattggtctacatgtgagttttggccaaataattcccacaaatttggttagggaattacattattgttgtgtaacattacaattatttaaaaataaggtcacaaattattttcattaattggtgacctttggtatgaaacttttttagtttattcttttagataaaaaataaaaaataaaatagggagatgacattaagggggaccggtcatatagggttgtgatattttattttttaatcattttcttggtgttgatctaaatagagtgtagtgtaggtgaagtaaaggtgaagatatataaaactaaaaaagtgatatctcaacactcttttctatgcttcatttctaaaccaaaatcattctatctctcaattcttttctttttaattgttactatgaaaaattagatactatttccctccttgaccccattttgtgacctacattcctttcatgtcacaatagaaaactccatgaagttctttggtggtctaagctctaaagatgttgtgaggccttggtttaggacctatgagccttgttataaaatgatctttggttttggatggaaggttttgaaggattttagaagcaaataagggctcgaaaacctagtacacgctcaatctcaaaagcttgaacacgaaagaggtaaaaatcgtaatttttaacttactagtaagcatcgtagactactgctctatatgtaaagcaacactatttattacttaaacttattttattagttttttaagttttaaattacttcttaagtgtgattatgtgagtatatattaatattatatatttaaaatgaataaaataaattaaaaattataatataagaaaaggttaaagaagttgatagatagtataatgtaaaaatttgttgtaaaataaagaaattaggattttgataatgtaatttaagaaaaaaaattatataagggagtgctcttattaaaataatatgtaatatttttgaaaattactaaagaagaattatttgaaaaaacacaaaaataaaaaaaaaaaattacaaaaatgcagttataaataattttaaatatgtttatagtttttaagattcta

SEQ ID NO: 162933 - DNA, 2715 bp, Cannabis sativa
tatatatatatatataaatacactattgtccttcatcacaccagttcagattaagaaagattactagagagagagagacaatcattagagtgtacagataaaatgaaaattaggggcttggggctttgtattgagctgcactactgtgatgaaagtgttaagctaggaaaacacttgtgattgagagtttgtatgccaattctcaactgtgattactgtactcccctgattcaaatcaataaagataccaagattgatttctcatccactcttgacttgaaccaggataaatttctgtgcattgttcttcttttacttgttttgttttagagagttttattgtattgctttaatgcgtgtatatcattgtttgatttgattgtttatgagctttagtttaccaagcattattcaccacaccaagtttcttggatgtttgctcatatacaagtttcaattctttttttttttctaacctaagataataagtgtgagaagagaagtctaatatccaacaaaatataaatgaatggactatcacaaaagcacaaacatgaatagaaacgattagtgctagtataagtacattaccatgtaatgaacagtcctttagttgcattaaccatattgtatcagtaatctttgaagtttaaactgcaaaaccggtacaagaaaaaaacaattagtaaaatccaacaagatgtgaagaagtgaactaacacattttaaattcaaatgattacgattctcaacttaacatgctgattctaatttgaaactcatgaaccgaaaacttttcaaatgcataacagttatttactggaacaaaaataatgatctcagtggataagtgggattcaaagctcaagttttgcagagcaaaaatggccaatttcattctcttaacactccatggttgacaaaatttaaaacagaaaagaactactactgatgatcagtataatctcatacaaataagaacaaaaaccacacaaaaggaacaagtgcgcaactactaaatcaacaagaccaaacccaccaaaaataataataagaagaagaaagccaagtataagcaaactccatagtaatcggcgtagaggaaaaaaacaaataaaacatcaaataaaagaacaagtaaagaaactcaaaacccaaaaatattatcagaaccgaacatagatgtacttgacacgacaaaaccttatactaatgaggaagactcaaacctcaaaaattactcaaagtcactcaccatatcaatggaaaacatagctaaacttatttttagcaaataaataaataaataagcaaaacatagataaacttaacaagtttctccatctagtggaaactggagacccaaaccatttcacaaacagaacatcagagaactttattaatattcttatgaagcctgaagtctaattttcatgggcattttagtcacgctctgttgggagtgaatatacagtattattcagaattagatacttaggtagataggtagcatataataaaatcagcaattaaataactgtaatgtggcacaaattctcaagagataaaagaatcgtatcatttgcaatgaatgaaaatcatgattgtatttaatccacatggtgtgcccacgcgaatcgtctgacgaaacatctgtgctcgacttcggcggaacccatttggagaaggaagaggaagaagaaatcctaaaagattaaactgacaaaagtagaaaataatacaatcggactacataaagataaagataaaagaacctgaacaaaacattattctcaatcctttcatggaatctcatatcaaactttcgggaaaacctaaaaagattacttactatcagaaaacagagaaggatatttaagcaagaatagtaaatcagatgggatacagacatatattctatgctcttgttttagcttaatttcgttgaagaatagagagaagaagatcgcaatcaaaaaaatcagtttttcagtgactatggcacaaaagattaaacaaaaacaatatgcatagaaactttgtgaagacagcaacaaatcatactggtctgttgaaaaaaaaataaagaaatgcaaaattattcaataaagatttgaaattgttgcaaaatctgtatattgatatttggattgcgatggaaaatagttgcagatcgtgaactcaccaatggattggcctggcttaaaatgagaaagagaggaagaggagctcttccgcgttgggcctcttgccgccgtttttgtatgtgttgagtgataaaggagagagcgatgaagagcttgtagtcactcttacttaaattatcagcaaaattgatatttataacaaaaagtggcatttttcttgtgtacttttttagtggataattttatcaattttgaaagtagaatttacatcaaaatatggcacattttacttcgtctgttttttatgggctttggctcttttttacatcaaaatatggcaaaattaacatttataacaaaaagtggcatttttcttggtgtttttgatggctatggcctttggcaaatatggctgtggttggtcaggaggagtgggaagcgaatgaattcgcagcgacagaatttggggagaagtcattggaaggacgagttattattcgtaggaatatcaatggaattttttttttttttttgacttttcttcttttatttttttctgctgcctatt

SEQ ID NO: 162934 - DNA, 1183 bp, Cannabis sativa
attgtaaccatcttaagcaagagtggctccttgtggggagagctggaggtaggccctttggtttggccgaactaggataaactcttgactcttttattttactgttttgaaccataattgttcatcgatctttatatgtttgatcatttgatccttgatcttctgttgagtgagttttgtgttgcgagtttacagcagcactcaacacacccgtcactaaaattttgaaactcttccaattataacctcttgaatagttagaatcttctatctctatttcatgttcaatggttccaatcactccccattacttgtcctcacgagttcacaatttttcaaattgattaaaagagcaaatttccaaactatgggataaccaacaaaatgaaacaagatttagtttggccaagattgctattactgaattctagtgttgggattctaatagctaaaagaaatcaggagtagagctcaccacaactgatagttcttggagttgctcttggcaatagcatcagtgaaacccaattcagtttgtaaatcaacgttgagagcctcaagaattagacgcctgaattgccatatctgcaaacaaaaaagaaaaaaaccaacttgagtttccgtgagagagttgggaaaccaaacacagtggaaagaaacaataaaaaagaaggaacacgaacagtgtagttgccggggttaagtaagatggcttcagtggtgagacgtagggctcgaggggagcgctcatcggcatggaagagggctcgaaaatagtccatggtctcagtgaactggtccttgtaggttataggaacgattgggtttggaccgtcgtcttgagggatgggagtgacgtcggacaactctggtcgctgcctcagagggatccatggctgcttctcttcgtcggaatccatctctactcaaacaatctgcagatctaagcctacttacgtttattccttttccttttctaagcggacccccatattattatgtttactattttttttaggaaattttttgaaaaatacttttttttaaagaaaattttataatgcacctcttaaaatggaaactcttaaaatagaaacactgatacatctctatctattttagtatccgaaataattttttagtcaaattttttcttattaaagacatcctgcaaaattttaag

SEQ ID NO: 162935 - DNA, 2694 bp, Cannabis sativa
atcgagtctcaccggtagacctgaacaagcaagaagagatgtatcacctcggagacctgtcctgacctgaccaagattgaactggttatgtatattcagaaatgaaaaccagtggacatattgtaataattctctcttcaagtgaaaccatcccacagattataattttcaaagtggacatattttgttctttcccttaattgtttggtagcttgagatattcactttgtatagtgtaaaaaaaagaaaaaaaaaaaaacaaggctgtttcatataacacattgtaaattatccattggctttctccagattcattatgttaggaagatatgaaaaagaaaaagaaagtattaaactgctgtctctcttgcacaatttaactgattcattgctttgtagatgattggaaacataaatttattgtaaaagaaggatttttttttacatgatgcataaataagttctcagggatgaaaataaagaaaagaaacaagatctactaatctgctaagccactgaactttctgtacatttggcttctgcatataccttcattaccactcttccttcgagttcgactattagattagtttttattaagaacatctacaggccgaacgctaactacatatcctgcttaggcttccggctcaattcagaatactggccacccattagctgcaatatctcctcccataaattttctgatgaggaatctgagaaactcccgtatattagattagagctgcaagcagcaacataccagtaatccgactcgatctcctctctcaactgatcaagttgccacccagcataaccaacaaaaaatctgaaatcctgaggatttaagactcccttctttactagttcagcagcttcatcaagactgttcctagcaccaaaacataggccagggataacctcttcaaaaccaggcagctttgctcttccccctgttttcaacagaaacatacttgcctctagaggcccaccgaaatgcaaagaacaatcagaaaacgtggtggcaagatcaagattggtgggtttcatatgttttattttcttgtgaagtggtcggttgataacaactccgaaaggcccttcttgtggatgtctggtaccggatctaaggaggaggactacagttctttcaaatgttcgtaccccatcgagcttttctgtggcaacgaggacacagcctgtctctggtacagaaataggatgagcccactttgaaccaagaggttttgactcgtgggatgaagcacctttgttctgaggatcagattctaccttctcagcctgtagaagaaatattgcaaagtatattagatacattacaacaaaccaactaatagcacagatttctcaatgtacttggtgaactcatctatctataaatacataaatatatatagctttacatcacctgctcccgggcaaataggtttgctctgacttctctccaatctaagtttatacgaagggaaccagatgaattgctttcttttccaccatcttctggactaggccgatcaccatttcctatatgtaacatcacaaccacatacatacaatacgcttagtcacaatcaattaaaatgacttcataggttcacaaatataagaccaacaagtgaaaaacaattcataaacttagaacgttcagagcacacaagttagtgaaaaaataacctatcaaagttcaaaactgaaccaagtttgtgcttttaagttctcaaactatggaaatcgaagtgaatgtcgtcagcttgtaccaaaaactactctacattcttacccagttcaagtatttacttctttaaatgtaatttcatacactaaagaaactattagtaaaaatacacaattgaacaatcacattatccaaaattccttactctgaatcaaaattcacaacctacgaaatttcaatgcttatcctttggacaactttaaaaggaaaacaaaaaaaaaggcgccttttcccagttatctaagagtacaaaaagtcaaacttaagaaaaaaaaattcaacaaagagttgacaatccaagaaaaataaatcggcatggtgatcatcaaggcgtaccagacgaagatgaattgccatgattcttcttcccaacagctcgaacaacgaaagaacgaaacccagaagaagacctaatcttgatctcgaaaaccctgttctcgtcaatacccagcaaggaaattttcgactttgccggattccatgaaatgggtttctcgggaaacgagttcctgagcaagacagggcttttgatacagtgtttcacttgcactgaccacagatccatacccaaactccccaacagactttccgggtgactttttcttctttttactttcctcgaagaagaagaagaaaagagaaagagaaaacgacgaattgaaaaggagtgagaatatgctttatttaaaccgaattggaattggatatggaaatggaagaagaagtcagtgaggactgacgagtgagtgttgagtttatgccatgtcggcttggcttgcgttgcatatgggccgcacgttcctctcactctccgctagctaattgtaaaagtttaaggtaagtttttttttttttttgagagagtattgttagagcatctccaaggagctcatcaactttagtgtcacactattactaaatttgatgttaaaaactat

SEQ ID NO: 162936 - DNA, 1757 bp, Cannabis sativa
gatgagaattatatctagttttttcgtatatatatacaatggttataattagtgtcatgcaagatgttacatcttttgtttttctatatatggtggtttcaatcttgttttttttaaggtgtgttaaaaagaaagttagatgtttttctatatgaaaaaatgttgtttgatgagtggcattttgtagaggaatataatccaaaagaatatgacatgaaagaaagtttgtatctttataagaattattatttctatggtccctttgtttttgtgtttatataatttcaaattcaaatataaaggctgcatgtaaatacatcccaagattgtttttttagtacttattttcaatgagttttagaggtctaggaaacatgaatctcaagactacatcaatcacttgactttgattttttaggcttacaatagtttattttctttattttggtatcatgagaataaagaaattcgaaaggttggtcattgaagaaaatgtatataagtggaaatttggattttaatggatgattagtaggggaatcacaaagtcaaaataatatatatatatatatatattttgacgaggtgatccaaatcacacatcattaataaagcagcaatctacaatcggcgacggcacctcatcgaaccaggatagctcattgtctaaccgaagagcatattttgccaaactatgtgttgcagaattcgcatccagagcatattgagcggtttcgggtgtaaccggggggttcgggtttgagtaatttaacaattccaaaacctaagttatattcgaactctcccgaaattcgaacacattatttaaaaaaagtttttagactcagtccgatgctgacgacgagagggaagtactagcgacgtcacgagacccccgacctcctcaaccctcactctagtttgttttttttttcttctcgttcgctcttgctctctccttctctttctaattttttctattttttcctatctctctccggcggcagtccacttctgttaacactttcaaagtcacaaactctaaaataaatacatgaggaataaaattttaattaacctaaaataaataaaacaacaaaggagtacaaattttaatcaatcacatggttgaaggtagttgatttaacaattcaagtaagataaaataatatatatatatatatatttgttaccctaaaataatattaagacaaagccataataaatgtgtaattgtatgtcatgaatagtgtcgaatactaatatgaaacaaaaaaaatttcaatgattaatattaaatttaatattcaattatactaataataattttaactgaggaagatataaacatcaataattttttttttgagaaattctaattacatcctcctattacaacatcttagttaacttttacgtttgaaatcacatgtcgaaatatttttctcatagtggtattcgttatggttacaatatcattcctgtaaatttttaaaaaattccgaatagtttacagcatcgaaaatagaattcctgatattccagtttaccacgcgcgttcaaaaaacttaaaacgtatttcgacactgtaaactattcaaaaaatttcaaaaatttacaggaatgatattgtaagcataacgaatgctctcgtaaaaaaagtaatattccgacatgtattttcggacgtgaaggctgactaaaaaattataacaagaagttgacggtaacactcttcacttttttttttttttttt

SEQ ID NO: 162937 - DNA, 1661 bp, Cannabis sativa
  modified_base (1635)..(1635): a, c, t, g, unknown or other
ccccaaaattttggacaaaagtaattggaacatcagtacactgagctaggatttcatcaaggttaccttgtaattctgtgttatgtttctcctcttgtgcccttctcctacgagtcttgacaccaaaactctgttttttcgccatggatcttcgagcacggtcttttttaatttttcttgttgcgcattcatcatgaaggactgtccccggttcaaacttgcgtgcaactcctggattccagctactacaactgcctccatttgtctcctccaacagtcccgactctccattatgaactccaaagggtgagttttcgaatgtatcaggagaggggtgataccacgtatggacctttctcttctttgtcccaagcagatggttaatcaattcagatacagagggtggatttgatattagagaaggttgtgctttgtacaggtcaatggattcaagccccaacagttgtgagtaaattttttggagttctgggtcattactaggccctcttaaatggataggttcatgaaaatgatgatgctgttgggatttacatgtccaaatatggggaattttaaggctttgggtaagagtaggcccaatatcaggaattagactttcagaggttggaagcccaataggataagcgaaatctggtgagggtaattctttgcacatagagaggggaatattcaaattcacctttgtagtactggggtccacagcttttctaattgtgcaacgatcctttctgacatccgtacccaacttttcctttcgtgtgttgccactcttctgcatggtagtggcagtaccatgcatcgtaccctccatagccggagctctgtcaccatgggttatcttttccggcctctgttcttcctctgttaacagatttttttggtctcgagtctgcaaatgcctcttccaggtgcccttcttctttaaaccttgaaaggccaatccttcatcattcaccaatatgtcacgttgaatagaaccagcagtgaaacagtttcctcggggtccttcaacctttatctagggaccatacatccggaccgccggcccagaagtcggggtcacccatgccgttggcttgagacactccctgttgaaatgagcaagcattccacagttgaaacaaaggaaaggcatcttttcatatttgaactgaatccaactccccgggtttgcatcagctttgaaaaagaaaccagcttggaaaggatgttgaatccaaacatcaatcaaacatctcaggaatccccgtcgaacaacatcttcctttttttcttccatccattttcaccaactgaccaaccttcttagcaagaattgggacatttgcttcagaaagacaccttgtggggagtccatggaactcaacccagaatcttgcaacttcgaagtcggccattcgagcttcaccttccactggccagggcttgagattcagctaaactccattgattagccaaggtcttcggttcatgatcatagtgaaatcctcttcagaatcaaagaaaaaacccagaactccttcttcaaatttctttattttccaatggttctttagattccaaatgcccaccagagcctttcagactacagaagtgttaggttttatgccctanataaaactctttacaatctgattagt

SEQ ID NO: 162938 - DNA, 1296 bp, Cannabis sativa
gaaaccagaacccgccaaaagcccttttttggaagacccaccatatcttgctccatgtcatcagtgttaccagaataagcctttccttgtggtcccacgttaccctcctcactagagtctggccttctcctttttgagtcaataattgtagtaattgtggaataaaaaaaaatcccattattattcacatgcaaagtcatatcctcttcattgactcccctaatatcctccttgtatggacgcctatcatttagcaaatcaataggatttgtatcatatccatgattctggctagtcgatccccccaattgctccgggttcacagggatcaaattaactccttgttcaaagttgttcacgatggatccctgccttgtatcatcccgaaccaccgctcctgaccggagccactgcgccccaaatgtcgagtgtcgcctctgtagagaagccctcagttctagagtgtaaggtttctcctggagatgtaacggctttaggaaaagccttggacaaaatctctctgaatgcccgattataccgcaaatgaagcagaaggtagggagtttttcgtatttgaaattcgcccaataccaagaggcgttatccgtactgactttcatccttcgctttattggtttaatcacattgattcgaactcggactcgaagaaaatccctccaaacacccacaaagttattaggatccgattcaataaacgtaccaatgaaattcccgagcgctgtcactacactcagggtcatgttacccggttgtagattatgtagttgaacccacatatctagatgattgatctcaacaagccgtgggttatcaccttccttgagacgagtaaagataaaaggcttccaatcataagtccaagggctcccgtcaatgacaagttgtatatcgatctcgtgatagaattgaaataggaataaattcggattgagttctttcacgtacatacccatccccggctgccagagaaaagccatcatattctggaaaacgttaaagtctgatacacgccctgttaggagtttgcccactaagcaccatcgagtatctatcgccacttcttcagccctgcctgtcggaatccgcaaaacttctacctcttcttcatctaggctaatgagttcatctctgttctccacttcctttccagtgatactgcttgatgccattgaaacacacacgaacgagaatacagcaaactctcaaaaacaaagagacaaaaaaatgtatcaggggatacgactaacactgaaatacactaaaaaaattatacat

SEQ ID NO: 162939 - DNA, 1148 bp, Cannabis sativa
ctcttctcctttgtcttctctgtttgctgctttccattttccaactgtagtgtcttgataccaaagtgtattgaagaatccgtgaaatctataactccaattgcttagttagaaatgcttcaatacaacatttgatttctcatatggcacaataaatattcaagacaaagccttattcatctccctccaatttaatagttaaatgatgcaaaaaaatcatctcagtagtgtctccttgtcaacgtctaaaagtccaccacacatagctccaatttttcttgagtgttttcatattccataaattcaaggaaagtccttcaacaccaatccaagagcctctacaatcaatcttaatatctttttgataattttccaagtccattggaccaatgagacaatgatatttgcccctggaactttcatctgcattatcttcatcaggcattccttttcctcctccctgatattagtgttttgtcatcaaacatctggccgaactccaatttctttcccaattctcttgacaaattatgaagaaaaaaaagatagcactccaaggcattttgctatcgtccctcatcaagatcactgccattctccaatcttttaagttcgtttttgctcgcatatttcatagaagttcttttgtttcattcttctttcagtataaattctttggtctaaatgctaaattaatttcaggtaagcactcccatattccaaatttctccactctatttcttctcacttgattattcctttagagatttttcaacgatttttcaccatgttttcccaagcttgttacatcctctttcctttttcagcctgatcttctcgtcatactactttttctacttccattttcccaagtttctacaaacagttatcaaaaatcttccatcctttcgagtctctttctttaggtataataaccattgtaattttattattttacaaagtacgaacactctctttctactttggaaactctccacaaaaagctaataaaactattcctaaaagctttctttaagctcttcccaagctgctccatattctgctaaaatcctccaatgttccatataaccaatcctccaatggttatggtgatcttgaagccaatcaatcaagtctgtctgttcaca

SEQ ID NO: 162940 - DNA, 1895 bp, Cannabis sativa
atttcaacttaaggatcttggtccacttcgattcttccttggcttagaaatttctcgatccaacgcagacatcgttgcttctaaaaggcctatgcagtcaatcgccttagccaatttctcagtgagccaagacaaccccacttgaaagcttccaccaggatcctccaatacctcaaaggcacccctggccaaggtcttttctttagctcctctacttcaacaacaaatcacaccttccaatacaagctttttcggatgctgattggggaacctgtccaaacactaaaagatccattattggtttctgcattttccttgccccttctcttatctcatggaagtccaagaggcaaacaactgtttctaaatcctttgcagaaactgaatatagatcaatggcaaatacaacatgtgaactattgtggcttttcaacatgctcaatcactttggtatctcacactctacacttgtcactctctactgtgacaatcaagttgccctccacatatctgagaatgcagtctttcatgagcatacaaagcatgtcgacattgacaaccatattgtccgtgatcaagtcactaagaaacgcctcaagctcatacatgtcccttcgagacacaacatagcaaacatcatgactaaagctctcttttcaactcaatttaatttttgtttgtccaagatgagtgtcattaatctctacatctcatcttgagggtaagtattagaagtcccttcagttaagttggttagttagttataggttgttataaagagttgttcattttctattatacgaagttagttaggccctagttttgtaacaaattaactttctctaactctcactctgtatatataccttatttttgggttaatgaataaactaaatctttcatttctaataaaacgataaaaagtaactgaagcactcacccaacttaatgcgaagcaccacctgacagtcataaaggctacaacaaacacaagttgtccttgagacagtgaagacagacccacaagattgcacaaaattaagaaccaacagtaaaagtttatttgactgatgaactagatataagtaccaattctcgattattgcacaatgtaaaactagaagaaaaacactaatagtaccaaaaaaggaaagaaaaaaaacccctccttccaccatatagcgacactatcttgattaacaatttgaaaaatttaattgaaaaacaagaagcaatatatttatttattatcatttgtcctttatataaactggttgatttgtagaacaatacttatttaaaatatcttctaactgagaaaaatgtgattggttttttaaaataatactttgatgttagtatgggtaatgtttagggtaaatagcagggtagatgcaaattttgagtttgtaaatgacatatgtatccaatattaataaaattataataaccgtccagtttcatcagtatgaactccgatagttcttaaatctaaaagtaaatgatactacatgtttttgttaaaatctaataatttataatttgaaccttatatgtgttctatttaaaatactgacacaatctgtactgacgaaattacaattttaataatattagattcttatggcactgataaaaactcgttgggcttaggacggtttacaaatcaaaactttaggtatatgttaggggtgttcgcggtgcgggtggtgcgatttttgacaattttttccaatcaacctgcatatacagtttttttaatttcacaaactgcacccacaccgcaaaactaaaaaatcgcaaaaattgcgccgcaaaaaatagtgcggtgcagtgcagcttttgtgatttttgcggtttggactatcaccaaatgattaaactatcataaatac

SEQ ID NO: 162941 - DNA, 1531 bp, Cannabis sativa
ctctctctctctctctctttgatacacatgacccaatgtgtttgctttgctctatggaagtggaaacttcgtttcacctcttctgagattgctattttgctagagccatttggttcagttgcacatggcaaactagaaccacgaaggctaatattgagaattgggacatgtggatcgagtggttcaaaaaggatgatcatagaccaaaagataccaaggtccaaatatttttgggttgaaaggaaagaaataatagtgtccatgatggtaaagccactcccatcaaccttctactacactggataaacatcagactctcggagctgcttcaggatcaggaagtctccacaactactttatctaattggcttcctccatcggctggatggagtatgtgcaacacagacgtggctataaacaacctacagtcttctggtgctgcacttttccgaaatgaggatgggattatcacatgcatacacaccatgcatattacctattgtgacctgttggctggtgaaatttctaccttctgctgggatgcggaaattgcagtaaaacttgatctcaaacatgttattttttagtgtgactcagcaggcgtcgagtcggcaatttcaggtaaaagcattgatgtttcagaattgaatcacaacatccaagatttagtggttaaattccatgatataggcagcaaacttgacttctgggagattagctggatctcgagaaagttcaactgtgcatcccacggtgtggctcaatgggcaattcgatcatgccattatgggaaaatcgatttgtccaattttaacagctccttgcttgactacaagacagacggctgattcggctcttcttagtttattttggtttttgttttttttttgttttcttttgctttattggaactggttgttctgttagtgagtttgctctaggtagtctcttgcaatggtctcgtattttctattccctcgttgctcttttgatgcaacaactatcaaaaaaaaaaaagaaaaagagacaatcctctctctctctcttctttaataaataaatgagaaaataaatttcattaaatcaaacgagccagcaagatcatgggttcgaacccatgacctctctcttttttcccatccctccctcaccactaagctaggcttagtggcttaatttaaaggaatttttagtatgtaatataaatgattattattagagattatcctttatccttttaatatttgtaatttaattattattaaagattatttattaatataaatgattaagcaaatacaataaaaatttccactcaaaataacaattttattttagttttataaattataaatgattacagctaatctgagtagtcattattatgcctagagtatattttttttcagagaaatatgtatatatatatttgtataacctcaacatttggttataaaattaagtatatgtagtattttgcagggacggagggactttagcccatgtgtgggctaaagccctcactcaaata

SEQ ID NO: 162942 - DNA, 3224 bp, Cannabis sativa
atatatatatatatgataatattctatttatatatatataaatgatatatttaaaacattattttaaaaattaataattttgtttttaaaaaaaagtatttatcttttgctattctattacaattactattactacatatatatatatatacactcatccacacattatttctatctttctacatcatggggttgtttttgaccttttcactttcaatgaataataattttatatatggacatatatatataatgttgttatctgtgtgtaaagatgccgccgatttaaaataaataattaatcctaaatctgatctttaataatgtcttgtataagagagagaaagagaatttagataccttaaagtcttgagtgacaatattgttgaaactatatggagatgttaaattctcaaaacccaggatgggagaggaagatgccaaagctccaatcgcaacgtgcggatacttcaatctaaaccatgctgccagcactgtatatttatatatatatatattaatatatatatatattaacatattggttaaccatatatattgaaaaacaacaaaatctccaaagtcaaaacaataaacaacctctgcatttatttccaatactcatagttaaaccatatatagcttgtttgaaagaaaaattgtattgatttaaatatgattcaacaaaaaatttaataccaaacatgaaaaatgattgtttttttatcctcaacacattatttttacaattttttttttttttcaaaccaaaatccaccttttaaaaatagtgttaataaaagaagaagaagaaaacctacttccaccataggaacctccaaagacgacgaccggagagtccaccgcggatatattgttcttcaaatctatgatcaaagtggcataatccgccagagcctgcgtggagctaaggtaaccaagtgtgcttgtgttgctgtaagccacttccttgtcacccccaaatggtatggatttcccataaaaccgatgctaaaatataaacatattccatccaatttagtaagcaaacatttgagatttaacaaaacttgtagtgagctaatttttaactcacctcgagaaaaactagaagggctttgaaatggggagctgtttcgaacataaatccagtgttttgagcaaaccattctatttctccttcattacccgtgtagacaaagattggagctttggttttggctccaccccagaaggtgtcgtttattagatacctttgttgaaaagtctgataactttggggaaggaaattgaaatggtctagtgtttgagtgaagtaactggttttgtagagctttgttgtggttgagactgaaactttttctgggctaataagtgaagatggaaatctgggtgttattcttgagagtgagaatggaacagaggagactaaacagagaagaaaaagccattgaaatgaaatcccaatagccatttttggctttttctttggcctacgtctgcagttagctttctgtagctagtgaataccgatattcatccaagagaataataataatatttatgtataacatgtgaggattgcacgtgcaatacacgtgtctaccttttctccttctattttatttatatttttttaggttaatttttatttcataaaaaattgcataatttaatttttacatgtatttttttagatagaatgtctttatattaaaacaaaatcataatacaaagggtataatgggaggaggcatttctttcaaccatgaatatttagtatctattgaaagagctaacttagccaacaatgagtcgcattattagtaaatctatacacatgacggaccttaaatccaaaaaaattagaaactaaacgattaatgttatttaacaactaatggaaaccagaaactagctcttgtgaggaaaataatctttaactactaagagagaatcagtctcattaaatgcacaagtagttgaagatcaatgagccactgtagactatgcataagagccaaagcttccatgacaactggtgagaaacaacctcaaaaaggggtagacattgcagcaacaaattcccttgcactattacttaaaatagcactaaaaccagaaatttgattaactgcattaccagtcgcatctgtgttcaatttcaggcggcttgtagggggattcaaccaggtggcatcttgagcatactttgtccgaaattctctagcacggttcgaggaaacagcaagacgaaaattatgagcagcgtgaaactcttctaggtatgaggttgcataatagagaataactaaatgtaccattaaatcaaatttaattcaaacataccactttttatgagaagtgtattcaaaatacatttacactcccacataacacacgattttcttctcctgaacacacacaactcatgtcaccttctctatgggatgatcgtattttcgtcatcaccaccatctcagtctaattttctagtcaatgaattcacatcggcctctcaattccttgttggtttaacattcaatgctttacattcgtcttcttcttccttggttaatcaatcgatcgccaattttaattttttaatctcttagattttggtgaacggagagtcacggttgtcactgtactaattctttttcatcttcttcaggtttttgactcttatctctgtcattctcttttcttcaatactcattcttcgagtttctttgtattcatttttttaattatctagaaattttagaaactatcatatgtgagtgatttatatataaataatatataaaatattatataattttcttttttgatatatgggttgtgtctgctcttcaagagcccccagaggctttagtcggtgtgttcgaagacactaatctcaacaatttcaaactcaaagtgaattgatgcggatttaaaatttatgaaaaaaaataataaaattggaaaagcgattttgaaccttaaataattaaagtggtaaacaaaattgataaaaaatttagtataattttgagctaatctcaatgaggagataatctaaaattatgggtaaaaataatcaccttaatttgtgagtagtaatgtgagtttggttttttaatttggttgagaaaattaaaaatatcaaatggtattttttatggtaaatactattttggaccctatgttttgcgatgacaaaactatttatattttct

SEQ ID NO: 162943 - DNA, 1705 bp, Cannabis sativa
ttttttaatactacaacgctaactatttgattatataaaacaaaaaatcaattataacataagattacttatttatttatttttgtttttgataaaagaagataaattctcattaaatcaaacatcattacaacaaaactaagacaagctcagcaactcagaacactactaggccggttgtttacaacattagcaataaatttattttttgaggacattttccttctgcccaaacaaccaactctaatttaaatactttaatcaattcaccaatattttaacagtgttagaaaaaaattacttatttattttaggaaagcatgcatataatatatccataaaaaattcattgtcaaaaaaaaaaaatatatatatccataaaaaaaaataaaaaaaaatgaaaaatccatatatattaataattattactatagggttaactttttcataataactatggcactatcttcatttatttatattcgattaatgttcctataatttaaacattctcttaatcctccgtcaatttatgcttttacatcttttttattatttttttttagaaaaatggccttattaaaaccttttttgcttttacatcttaattcacatgaaactatgttcgatcaaattaaaccaattttattaatcatatttctaaacataaataagtaattatggtgacatgctatttttcaccaattgtgtttcaacagaaacatgactcctccctcctaataaaatttatattattgtatgtctaaaaagcatggaagctttaatttgaaatatatatgtacatatttaaatgaaattgaaggttggtgggttatttgtccattatgtttgtccaatataggcatatgaaatcgtatttgttgattgtctatttaaatactctttgcttagtcttttcttagattcaaatgttcaaggactttaattttaagagggaaagaaatttgaaaaatatatacatacatacagaagtaggtttagatgtgacttttttcaaaattaaatattaagtacttctgatcaatgagcttgtgggaaacttgaatttgacaatatataacaaactgtctcttttgaaaaatttaaatattaaatcaaatataatatgctgacacatatactgtgtgaagaatataatagtgtacattgcaaatatagtttggcaagtaataactatcaatcaacatcattcccaaaaaaaaaaaaaaagttatcaacaacaccactatcaaacaaaacaaaacaaaacctcacaaatagttaaaacttccaatctattacaaaactgaagattatctgttataatatagggataatatcattattattatgtttttttagggaaagctacttaagagaatccacagtaataaattggaatagaatattctaataatcagatactatcttcatccaaccaaattgtattttaacatgaaacactttagctcaaaaagaatagaacaaaaattaaaaatatcatcaattaaatcataaaaatactaattatatttaaatggtatatagttaagaataattagcaattttgctccttaaactttcgacagtattaattttgatccttaaaatatacagcttgttaagaatcccccttgaacttttacacatacagaaatttagtccttctgttaggttccgtctcattattccgtttaaatgctga

SEQ ID NO: 162944 - DNA, 2040 bp, Cannabis sativa
gaaattgtatatttatagatagattatgtagagaaaagaattagttatatataatgaatattattaattaaatgacattagctaatctaatagctaagatctacgattaatatgtataaaaatgaaaaatgatgtcctgtatatattaatgtattaaataatttaattacacattatttgagggaataaacttagtctttatttattacatattattgattaagccaatctagtcttctttcttatataattaataattaataacatatgggttgtgtgttcatacttgctatcaattttttaaattattgaattcatataaaattaataaaaataaacttagaacatgttaatttccttgtattatgctgcatgctttaattaatatttgaaaaaaaaaaagcaaagtgatcatgtgatacatatataatacagaaaataacacttctttatttatgagacttataattgatcaatttactttttaatctatttttctgtgttatattattaatgagaaactaaacaaagcaacttggtgttataaatatttttttatataaatatatatatatatattgtgaaaattgtagaaattaaatcaaattttaagagatgttggcggcaaaaattgttttaattatacgatttgtgatacttatttacataaattgatttttttatagtaaaactcttcaaacctcacttctgatagctattatatatgtgttcaaaatgctttgttaagtgttacagtggacatgttactatgtaccctaatgtactagtgataaatttttaatagtttaactatttaaatatgttaagtctttttttagcaatttagttgtcaaaatattatataatttattgtgaattaaatatgattttcgtgtgttattttcgtgtgtatggttgcccttttcattttaaaaaattttggttaatagatgtatattttcttttaggaaacttgtcatataagagaaaaaaatcatttgttaattttatgttactatattaggtacgcatcagaagtattattatcttattatcattatataccatgcctccaaggatcaccatatgtatagatattaaatctaaaatataaattacgtgaaagaaataaatacttcttgatgattatcagggtatcttcgaaacttcttataatttagatccaatcaatctcacatcgttgttttccaaatcgatccaccacacacaaagagtagtgtgtgctactaggataaagtgtataattttttcttgttgaattctcaacacatgagcaagaacaaatttggagagaaaaataatttgcctttttctctcttgtattttgaaaatagcagtgtaaacgcatcatctgatttttcaaatcaagcttctatttatagaagttaatttccaattaattaaattatatttgattattcaaataaatcactataactgaattcgaccactgatatttctgatgagaaaatctctcaaccacttgagagaatatctcaaccaattttgagatactatctcaactactttgagggaatatctcaattaactgaaaaaatctttaactacttttcaaattccaatatttatctaattgaattaattaacctaaaaagacaaaatcaatagggacttcctacaatagggtaggcgctactcttgtcttgattagagcaatgatggtgtcttttgtcctcacaaatgtcttaacaatttttatcttttttcctatttataattaatttgaaaaattaattatttattacaaaaataaatgattactattttgccaattaaaaatacattttttcgaacaacattatacaactctttattcctacccttgacagtgattcaaggtggtaatttgaggaccatggacatataagtctaagctccaataaactagattatttattgagtcatatcactaaataatcttgtttattaattctattattactctactataaatataaaattgaactcttagtcattatagaattatatttactgagt

SEQ ID NO: 162945 - DNA, 2734 bp, Cannabis sativa
agttgttgcccgagatgataaggggttgtttttggatggcttcacgaaaatttacaatgaaaagttggacacagcccttgctgaggctttaagtatgagggaggccttaagttggctcaagaataaaaattggcagcatgtctttcttgaaacagactgtcttacagttgtaaaagcgattcacagttgtgtagaaatgttatcttgttttggtattgtaattcgtgactgtagatgtttactgaaagagttgagaaatgtctcgttatgttatgtaaaacggtcagctaatatggtagctcatagtcttgctagagcttccatttgttaccctgatcgtatgttcagtttggggaatgtcccaactgttgtgctacctcatttggtagctgagtttgaaggttaataaagttgattgtcctttcaaaaaaaaatcatctgttgtaacatgtttttagtacaattttttaaaattttcaaagcttctctattttaaaaaaaaaaatgtgagtgctcttagtagatatatgtgtttgaaaaaaatttataacacagactctctgattgttttgatacatttgctaatttatttggtattatgagagagctttttaatttaacattgttttaatcgtgtactttttacttatttacttattttctctttcaaataataataaaaaaaaggtgagaacaagagtagcatcattttatttctattttttctccattctctctctagaaaaagtgtttcattttaatatttaattcaaaaaatagagaaacatcatatttctctaaaaaaatatatatacataagtttgttgtggtatttctctatttattagtagttagctacttggctctttattttgtgagtgtttcatgtaaatctcaatagttatttgtcatttaaaatttaatggtttgatgtgtctatcttgtgatcaattcttgttcaaattgcttatcctaaacaaatttatcctctctcatttgtgcattaataattacatttccaactctaaagagtgtcacccttccaatataaatactttcaatacctgtaaggaagttagagttgagacctttatacatttaagatttttcgatactatttgtgttaagacttgaaaaaaaaaaaagataaaactttggtgtgcacacacgactttggagttacagctagaataacattggtagcaagttttgactctatactaataatttgaaaattcttggatggttttgtttgatttgatttgtttattcaactcagttattctttttctgaacttgaattgctaggtactagcaataaactggttgggggttctgattaatgcacactaatgtcactttattgatcttaaagtgtaaaataaattaaatttaaattagtattttcataaaattaataagatatatatatatatatatttatgttgaaaatatttgatttagattttatttgttgtcttttcataggaattaaaaattattatggcactttgaaaaagaaaaaaaaaacaataaataaataaaagtggtggacaagactagatattgatattttttagaagaaaagcagcccaagagataccatgtgcctctattctcgtgcaaatcaaccattgttgtttctctcctctctccatgtgtgtgccacatgtcacgttgccattcaccagccgcttttcagctgtttgggttcccaaagcaccaagcatgcaacttgcataaaaaataatcaaagcaaaatattaaatgctccactttctcatagctctttatcataataaaatcatgcatgcttagtacattagttgcataaatgcaatttattgttcttttttctaatgactcttcccctccatgcatacaagacaagagcaaaatcattaatgatacttctgttttgttattatatttgctattatcttttgtaatccttaatttatttctattttgcagtttagtttttttttagattttataaataagaactcattttagttgtttaaaggtaacttggagagtaaactttagtatagaaaaactatagcaaaatttctctttacttttcttctcacttattgtaatattcatttgagtaataatacaagttctaattccatttttattttatgttcttcatccatctatactactatatatgctactatatactaaatatatataaatttagtcatgctctttctatatatttttatttagtgattgtagtaatagtggtatttctcttgttcgattttttatgattatttttatctactttttgtaaaagatatataggtttagtcatgctctctctatgtgtctaaaaattaataaaagaaataccaatgttcatttctttcactatcaccaccatctctatctctttgtcattatttttactaaaaatatataggatcaatcatgctctttctatgtaatacaatttagtaaaaataatattaatgtttagttttatgtttaatcttttattgcattattaattgatgtataatgttaattctaggttctacataagattaaatcatttcctctatttgtaagaacttgtatactaaaaataaaatgaattttaatgtcacatcatttgtatctgttgggattttttaccctaaataaaactaatttcaatttaatctgatttgttatcaaaagaagattagaagtcatttatgtatacatgtagttttcatgt

SEQ ID NO: 162946 - DNA, 1258 bp, Cannabis sativa
tacgttaacgaattatagaataaaagatattgtttttataacaattcttatttttatttttcattttttaattattaacgaaaaaaagttagaaggtatttaatttacatttatttatcaacaatatcatttattgtgtcacttatttcacaaaaaaaaaaatgaataaagggtgatggaatgaccattttaaatgttaatacaaaaattatatttcgagcggtattatttataaactatatatgttagggggcacaacttagtattgtgaaaaattgagagagtgaaaatactaaatcatttggcataataagcttggagacaattgaattcttgtatttctctcacaaatatactctttcaatcttaatttgtaaaaaaaatctttccacaaagaaattaaatcttcgccgaacatcattgttatttttagataatttattaaataacatcttggttttcaaccacaagaattgataattaagataaattttgtcaaagcactttcacccataaaagtatacctaaaataacatattattttgtcgaacttaccaattccattgtaatccttctttgttttaatgaaaaaaaaaaaccaaaaaaaaaatattttttttcatgcatacactatagtcacataatttctaccaggtgccacatatataaaggactatctctagctaaaaactttttgaagtatattttacacaatgtataatagcattcaaaagtattgcttatttgaatacgcttggcttttttagtaaaattgtacgtatttctacaaccaaatattttcaattgttaataaatagcataaattataagtgaatacacatttattaggtgcatggaagaagccatgtagaattactatatcaaaattataagagagactatcactaatagtagcacaattaaataactattacagacacaaaatacaaaattaaatagaaaattattgaatttgaactttagagaattatttaacatattacactttatccaacaatataaactttacactattcaacaattaaaatgtgtgggcttaaaaaaaaaatgtgggcttaattgttgcattcatgtctttacatacttagtgggcaagaatcaattctttgtgagctattgaaatgattttattactaactaatatgataaataatagtcttgagcaatatataacttgttaatgggtaataaataaatttaactacaaatattaattttaaaaaggaataattacata

SEQ ID NO: 162947 - DNA, 1830 bp, Cannabis sativa
acccaagtgctataaaatgatcatttttagtggcaataatcttagcaagcttcctagctattacttggaaaatgaactcatcttggaacagccagttaagaagtatcatagattggtctccattagaatgcttcatgttcttcgacctaaatgactgttataaacgacagttaaaagcaaaccaaacacaaagcaatcaggtccaatttgaacaaaattaaagtacattttcaagcatgggaatgagaaaatcatccaaagactcgtccttttcagcagcatctttaacatacttgtgtagaaaccaaagagactcatccaatgatcctgcaaacaatgtcaaagcaagaaacaaagaaaaatcaaaacttgggaataaattcagctgtcctcagattctgaaacttaaagaaaagcaaaccagaagaagggtttgcccggggattggaggaaaggcgggaaacggcgtcgttgagctttctgggtcgagctgtaaggagagtgttgatcactctcccaagggtcaccgaaaccattgttgaagcttcttctgcgttcgatttccataagaaaccttctccttcttccattgaaaccaatccttaattggggctatgaggaattgggtttccacagtcagtgaaattctgaaactgtttcgtactggaagaagctaagcaaagtagttttcacttttcggtctaataaatcatttcatttccttctctctttgaattttcttgaactttatacatatttgcgacaagtttactaaatctttaaaattacaataacaccctccaaaattaccatttgataattatatatgccaattaacttaaaaatcaattacttatcaaaaaaaaacttataaatcaatttgttgaaaaccggaaatttaactaattatgcatttatttgactaattatgtatttctgaactaattttttttttctaaaccaaactatttaatattagtagaatatgttattttttcttaaaatatcattctacccctctcatttaaccagccatctctccctctctctttcccccttctctctctccctctctgtaaacatgcatacagaggagcacacaatcaacctataatcttgttcctttctctccacgaccaccatgaccggccctatgttaatttgggccttagacaaaaataaaaattaggacccattaaaaaagtgaggctattggaatttgaactcttaacctcttaattattaaactaatcaaattaccgctaggctacaacacatatttagctttaaaagtattattatttattttattactaattatattttcatttttttttcgaaatggggccctgagcggtgggggcctaaggcggccgcctccttcgtcttagctcaaggtcagccctgaccacaaacccaatgactaccgcggacccaacgacttctccatcaaccacggcttcaccatcgacaatgttgtcaaaggaataaattatatgattagtgtttgttatttttgagtagatgttacatttagggtcgaaaatggccagatccgagttttgagcaaaaaactagtttttttgtcaagtccgatggtgatccaatggtggtctgatagttgtctgatgtcttcctgttgttaaatgagtaaaggttgaagacaaaagtctgatggtagcccgatgatatggttcgatggtggtccgatggtggcccgatgccttcttgatgagcttaatgaatggagcttaacatctttaaatataaatattgtccgatggtcacttaatgctacttttttttatatacaaaaacataaaaaaaaaa

SEQ ID NO: 162948 - DNA, 1770 bp, Cannabis sativa
  modified_base (865)..(878): a, c, t, g, unknown or other
  modified_base (1658)..(1669): a, c, t, g, unknown or other
tccaaacaggtaacccaatcccttttctccctcataagccatcacagaagtttcactacatacaaatcttcaaattacaactcatattcgctgagcaccactagcctgtgcaatgctgcattgtaccccatgtagcagacattttggacaatgtctgacaaccatggcctggcctgcttctacagaaatccatttttctcttccatgctttgggttctcataaacatacttggaccagatttaattgaagttgacagaatgccaatgcagagcttccgcaaatcatcgtgggtgaaagtaaattaaactgctgcctcatcaagtggtaaatcttcaaatcataacaaggattccctattttggagtagtgcatcttttggtgccaaatgacattcacccacgatgcactacaccaaaataggattcccaagtcaaatagtgtttgcacaactgctttaagatgagatcatatctcttatgtgaatattgttcttctctttaactagttttggtagcttcaccttttatataggggatatttaagtatagctaaatgtaagagcgtgacttctcgatctatcctaccttgaaatcttgtggatcttttatttttattattatgcagtgaagatttgatccaaagaagatagtttctctttctcttatcacttgggtggcgtttggttggaggtaaaccaatggaatagaatggaaaagaaacaattttcattccattcctttgtttagttgcatttaaaattattagaataccattccatggaatgactattctattttgaaatagaaagaaagaccatttcaatgcaagatttgaaaaaatttaataatttttttatcaattttnnnnnnnnnnnnnnattttatttcattcctattctaatttctaattccatttctatttttatattttcattcctcttagtcaaacaccactttaaatttgattcaaagaaagataatttcttattttctcttatcatatgcggttttttatgatagagaagcgcaatctcttattttcttatttttttatcaagtggttatatagagatatagagagtaggggttcatgagattgatgtaactcaaaaaaatataatttaaagaggcatttaatttaaaaaaaaaaaaaaagaaaagaaagaaactttgacactttcactgcagttttttctctttcattttttttttctgttacttagaatttagaaatatagtggaaattggcaatttgtgggtttattgaagatgctttcttttttctttgaagaaaacatatatattatttttttttttttgaaaatatatatattatttttaattactagtactatgcactttttttttaaatagaaagaaacacgttatttattttttattgaaaaaagacaagaatatatttaatataataaaataattaactgatttttttcatcattttttttaatgtttattaaagaatgagaatacaaaacaaaatgataaaagtatgtaatattcactagtattaaagtttgttactttaaaatagatgtgtcgcattgtaattagttagcgatttcttatattattaaatagattaaattgtatgagattcgatattaaaatacattaataatataggtggcgtttggtannnnnnnnnnnntcagttttctgtttttaaaagtagaaaagtaaaaatattttccaaaaacatgttctataaaactgtttttactttttaattttataattagaaatcaaaat

SEQ ID NO: 162949 - DNA, 2912 bp, Cannabis sativa
  modified_base (2858)..(2865): a, c, t, g, unknown or other
taatctcaaaataatatttatatacaaattaaagtagaggaattaaagatgcttacatggttcccaccaccctatgagtgtttgcttggtttaatgtgtcttcaaaaatccttgccaatccaaaatcagatattttagggttcatcttctcatccaatagaatgttacttgcctttaaatctctatgtataacccttaaacttgaatcacgatgaagatataaaagacctcttgcaatcccatcaataatcttgaacctatgctcccaatcaagttttgctcttctttctttatctaatcaataattcagaaatattatgatcattaatcttaattaatttgagataaaaaagaaaaaaaattgtgaagaaaagatcattaattaatattactaaccgaaaataaaagtatccaaactcttgttgaacatgaactcgtatattaatatcttctcttgattttcaatgcaacatccaattagcttaacaagatttctgtgttgaagttttgatatcaatatcatctcattcctaaattcttcatctccttgtgatgagttgctacaaagtcttttcactgcgacttccttcccatttagttgtccctgcaaatttccaaaaagcatattattatttaactaattaataagttcgctcacaagtactccacgcctacatctagaacattgttatttggtaccaatcgttgttgaatatacaaaagtggaagaaaagaactcattgaattgattgtgaagagcagagctctttatatacaagtacagtactcttgaagttagttaaagaaagacttaactaacataacagtaaaaagtaactataaaataactaacttcactaactacttaacacccccctcaaactaagcatggataatgaagccaggctgagtttatcacgcaacagtttgaatcgaggtgcagaaagagccttagttagtgatatctttcgaatggttagtgatattgcatagtgttattaaattatattacgtgagactcaatacttaattctgccaataatgatatgacagtgtagctagtatagttcctccaaatgaaaaggtctccataagtttgttcttgtaatgaaaagttagttgtctcctggaagtatgttcccgaaaagctaatttgtccatttggaaaaagtctcgtggaatgatagtttccatccgggagggagtttccggatgactatcatgtccactccgtgtatagtcttcaggaaaggtagtcttccccagaacaggtattctgaatggctaagggttcctcctagaagagagttccaaatagtcaactaaaactgtctcttttcctatccgtgagtcccttctgtatacgcttcagtactctgtcccagtagtgtatgtctcatccaaaagcacgtttcttttgctgacgtggagattcttaagtttgttcagtcggaattactaacttaacaactcaatagttgcagccaccgaccttaagatctttatcctcaccctatatataaatacaacccacacttatcatttcaatgaggtagagttcagatgagtttcgagaggtgatcttgagagagaaagattgagagatagagagagagagagagaggtatatagaaaagagagagatttgagtttgagttttgtatgaagaatcttctgtagatgaagaagattaatcttgggtaagagtgtgagagttaaaacacttttagagaatccatctgagaatcgatgtcgactgtattgtctgttgctcaatcaataaataaaatttagtggtgttccggaactagagtagagttatagatcacatcgatctataggacttgaaccaatatacatcttggtgttaatttgattttttagtgctttaattatttttgattttaatactctgctcatccctatttttctctaattcgtatttgtgaattgttaatcgtgtcatttcaaattatttgttgatcaaattttagttgatttgattctgcactatagtcctaattttcccacagaaaacttagagggcgctatgtactattgatacctttagcatttctccctatatctataaatcacaaaaaagctatatttttttagtgataacatttttgtcattatatagattttgacaactaaaatattatttttgttcacaataaaaagttgtttgtaactaaaatgtagtatttagatattaattatcactaattttaatttttagttgatcgcaacgtgtaataacatatttatttataataaattatgattttgtaactaataacttgtagtcgctgactttataagtgatatatagcatataacgtaaataattatttattttaatcacaattttgtttatttatagtcacaaattttagtacgactaaaaataaaatatttctacatattttctcttgaaaaataattgaattacatattaccttatacacagagccaaaccctccttggccaagtttgttggtaatgctgaagttgtttgtggctattaatacactatccaactcaaaaaaatgaagctcaggttgatcatctcctcttgtgaaatcattatctattgaaataatgttacctggtttttcaaaccaattaaatatacacatgattatgatattaattcatcaaaacatacattatccaattatcactattaaaaaaaaaaaactagtactatttaatgattatttctagtagaatttttgacttaattaatatgatcatttttatttactctcgtatatagatataaattctgattttggttagtacatatttatacttttagccatacattttttcactacaaatttttttacttnnnnnnnnaacaaaatttgtgactaaaagtataaaaattgtaactaattataaat

SEQ ID NO: 162950 - DNA, 3176 bp, Cannabis sativa
  modified_base (678)..(693): a, c, t, g, unknown or other
taggcgcccatgtgcgcatagggttgtggaatccaccgagtccacatgcaacgaaaaattggggcttgcaaggttacataggatttttttggaagaaaccaaaaattaaaactcaagaaaacaatataacaaaacaaaacaaagccaaacttggtcaaaaaagatcttttggttgggctgctgacgcccatgtttgcatagggtcgtggcatccaccgagtccacaagcaatgaaaaattgtggcttgcatggacacataagatttatttggatgaaaaccaaaaaaactcaaaaaaacaagaaaacaaaaccaaacaaagccaaacttggtcataaaagatcttttgcatggattgttggctctcaagtgcatagggtcgtggcatccatcgagtccacaagcaacggaaaaccatggcttgcatggccacataggatttgtatggatgaaaaccaaaagttaaactcaagaaaataataaaacaaaacaaaataaagccaaacatggtctaaaaagttattttgccttggttgttgacgcccatgtgtgcatagggtcgtggcatccaccgagtccacaagcaatgaaaaatcgtggcttgcatggacacatatgatttatttggatgaaaaccaaaaatactcaagaaaataagaaaacaaaacaaaacaaagcnnnnnnnnnnnnnnnnagatcttttgcatggattgttggcgctcatttgtgcatagggtcgtggcatccatcgagtccataagcaacggaaaaccgtggattgcatagccacataagatttttttggatggaaaccaaaagttaaactcaagaaaacaataaaaaaacaaaacatacccaaacatggtcgaacaaaaattttttgcatggtctgtaggcgcccatgtgcgcatagggtcatggaatccaccgagtccacaggcaacaaaaaattagggcttgcgaggctacataggatttttttggatgaaaaccaaaagtaaaaactcaaggaaacaaaacaaagccaaacttggtcaaaaaagatcttttgcctgggctgttgacgcccatgtgtgcatagggtcgtgacatccaccgagtccacaagcaatggaaaatcttggcttgcatagacacataggatttatttggatgaaaactaaaaaaactcaagaaaacaagaaaacaaaacaaagccaaacttggtcataaaagatcttttgcatggattgttggtgcccatttgtgcatagggtcgtggtgcatccaccgagtttacaagcaacagaaaactgtggcttgcatggactcatatgatttatttggattaaaaccaaaagttaaactcaagaaaacaagaaaacgaaacaagacaaagccaaacttggtcataaaagatcgtttgcatggatcgctggtgtccatgtgtgtatagggtcgtggcatccactgagtccacaagcaataaaaactcgtggcttgcatgggcacataggatttatatggatgaaaaccaacagttaaactcaagaaaacaagaaaacaaaacaaaacaaagtcaaacatggtcgaaaaaatttgtttgcatggtctgttagcgcccatgtgtgcatagggtcgtggcatccaccgagtccacaagcaacggaaaattgaggcttgcatggccacataggatttgtttggatgaaaaccaaaagttaaactcaaaaaaactagaaaacaaaacaaaacaaaaaaaagccaaacatggtcaaataagatcttctgcatggaccgttggcgctcatgtgtgcgtagggttgtggcatccaccgagtccacaggcaacgtaaaattggagcttgcatgactacataggatttgtttggatgaaaactaaaagttaaactcaagaaaacaagataataaaataaaataaagacaaacttggtcaaaaaagatcttttgcttggaccgctaacgtccatgtttgtataggatcgtggcatccaccgagtctacaagcaaccgagaaccgtgacttgcaatttcgtgactgaaatttcaacattttcttagtaaatcacaattaatattgaacaatttcttaagtagtgtgttggctcgaagccacaaaatctttactcttgctgatgtcaagttacttgggtacagaatccataaactttgcatctagaagagtttttaatctaatctttataagaaaaaacaatcacgtagaataaaatatttaaattttatctttacataataaagtattcatatggactaaaaaattgagactgctataatctaatattttgtatattgagtgagtgacctaataaagagagaaactaaaaaatgatgagaatgattgctgtattatactcatctgttagtagtgcacatgttgaaaattggtgttgttaaagaataggtatgttagtcaatatttgaacgacatagctattactagctaggcctaggaacacatcacattgattcacatgccaaattggccacaaaatttggagctgctacctcagaaaattaaattttcagaaaccttaaaatacacaattcaaagtacaaattaaaataaatacaacttaaaaacaccttcagcctatttctccaaccattttgcctccttttctaccaaattctgccaatgtaaaacctctctctactcccaaagctaataatatatctaagctaccatcatggcgacccgcttactccagggaagagttctgatattttgttaaaaacatccattacctaaaacataagggaaagaaacaaaatcacatcatttcaaatcaaactatatatttctaatcctaaatcaagactcaaagattctttaatgtgcagtcaaagaaatggacaaatggaaaatggcattacctccttgtcattttgatactttgcaatgcttaatgggttctgtgaacactgcaaaaaaagcaacatgacaattagttagtatcaagatcatctccaaaatgtttagtttgcactgatgaaaacactaacatccataatggcttgttgaactctagggttttgaaatgccatggcaacatcaggattcgccatgatctttgatataacttcctcgggtgaaagtccaatttgatctgcaaaacaaaacataaataggcgctataattaggaaaatggcataat

SEQ ID NO: 162951 - DNA, 3669 bp, Cannabis sativa
tatatatatatattttgagataagacaataatgtatatttaatatataaataaaacatgaagtatttattaaatattcattgtatagacattggctataaaataaaaatgtattattgtatttcttacaaatgtataaaacaaattaatttaatttattctaaatttacgagcaagaaaaactaataattattttaataataaataataaattatatatatattataataaatataagttattaataataggttggataacatttttaattaatgtgtccataaaaaaagaatatattatgccattatattagtgtataaaaataattatacaataatattgagatgacacgaaaatattgttgaaagtagtggactttcatcgacacccattgataacatttcagaaaatgtcattgaatgattgttatggcacaatttaaatgtcattgaaacacatttttgttgtagtatattatttttaacttttgtaatttggtttattaaaaaaatatttttaatttttatatggtattcctcattatttataattaatttaatccatatttttatttttatttttaaaaaataccacatttttttatatgagaatacaaacaaccaaaagattacaaaggaattggttggtccaagcttagggcttgactagcacaaaaagggctaactcttatccacatagcactaactttattaacaagagcgaaattggctaaacaatgagcagcttaattagtctgtcagtaagtgaaaaccaatccaccaacagtaggatgttgtagaagttctctaatctcctcccgcaggccatcaaactctcgacatccaccatcttgttgttgcacaagctgcactacctccttgcagactgattccactaaaaaagatatccatccacgctcgataccaacatgtagccctgctctaatggccatcaattcagctacaacaggagcatgaacaacaagtagaaacttcaccacatcaaaccttgctcttccattttcaccctaaatgactaaactaatacttgcactctgcagttgataattaacaccagcatccacattaatcttcaaagtattaggctcaggaggacaccatttcacatgcgctcgatccctatccacaccagactcttgtcgtgcctccttaaaatctattataaatttactacaccaatccaacatatccccagctgcaacacttccatgtttgacattgtttctaatatgccatagattccaaaaaaggattagaaacaactcaaacttctccatagtccagtcttcagaaagtctaaccagataagaaaggatatcttccctagaagttcttgtcatttcattccacaaaaccactattcttccaaactggcagcacttctctacattcccatagaacatgatatctatcttcatgtcatttcgaagaacatcttatacagaccgagtccacatttattccccttttagccaagacagaatttgtaagcaaccacatccacattcacatccaaaggaagtgcttgactttgggggtactctaagtttccaaacctttcgccaccaatggttcatagttcgagtagaggaaggtgcaatcttttctttcatattgaaggtcacccgataaccactcttaacataatattcaccattcttgttataatgccatcgtattctatctcgtatagtccagtcaccactaagaatctgtaaaatcagctcgacatcgtcattattaaacactgcacgaataaactcttcatcccaagtaccatttgcattttttttaaatcaataacatacatgtgctccagtaacttgggtttgtcaaatatacggaaacttacaggtcgaggtaaccatggatcctcaacaacccaaactgaattcccatccccaatcctccgtctatagccccgtaaaattattttctttccccaaactaaactccgccacacaaaggaagcatgagatccacatttcgcttctagcacccctttattgggaaaataacttacttttaacaccttgctacataatgcttctggggacctaagataccgccaaatttgcatagctaagagagcttgattaaatagtctcaggtcacaaaattccattccccttttatccttgggcttgcacagatgtgaccatgtacacccgtgagtttttttgttctttttttacgaccccaccaaaattgggccactattcgatatgtagactcttaattgtactatttgttagcttaaatctacacatagtgcaggtgggtattgcttgtaaaatgaccttgatgagtacctctttacccaccacagaaaacattgatcgtttccaacccccactttgctccacactctatttttgatgacatcaaataatgcttttttattcctccccaccaatgacgagtgccctaaatacttgccgtaatttttgacaacattcacattacttaagatagccaatctttatctcaactccattggaacttttttgccaaaacacatttttgactagtgaaaattgatcatttggctcgaggctttggtatacttattcaatagctcatagaaacacttacattcgtcttccctcgcctaaaaaaatatcaagctatcattcacaaataataggtgagaaatagacaaatctcttctcccaaaccgtaccccattcagcctccccgccctctcctcatgttgaatcaagcttgaaacaacatagaataaaaagagaaacgtggataagagatcaccttggcgaaggcctctttgtggtgtcacgtggccttgtacttcaccattaacaagaaaggagagttgtacaaaagtaaaacatcccatgagcttttggacccattcttcacagtatcccaattgaagcataacaacccttagaaaactccactcaacccgtccgtcaaccttggccatgtctaactttatcaatgccacttttgatccattcatgaaccgatttttccgcatatagtgaagtccctcatatgctataataattttgtcgtcgataagccattctttcacaaaagcactatatatgggactcggagatcacctccggaagagaagatctcattccgttaactaagcattttaatactattttgtaaatgacattacataaattaatagaccgaaactccttcactctctttggctcctccactttagcttatgattattttagtaaattaatataataataaaaagaataatattttattttattaaaaatattataataataaagattattttttaatgttgtggttggagtaaatataatttttaatattaaatttgatattaatgtgacatcaaatttagtgtcaaggttagagatactctaacaacacggtagtgtaggttggattaagaatgagtagtattaaaacaataaagttcaaaaataaatagtaggtagtttgaagaaaggcttgtatagatttatgtccaattaattaattgtatcgttgttaaaaaaaattaggagagttctatttacactccatagaataataaatacatcatattattaaaaaaatataaacttaaaaataatttttaaaaattactcttaatattatttaaaaatattttcctcacattatttta

SEQ ID NO: 162952 - DNA, 886 bp, Cannabis sativa
agtgctgacataaatatattttagcttcaaaaacagagaaaatgcatccacttgcggcatattattgcgtttttgaattcattatatgaaacgtacactaccaaaacaacctcaacacaagaaaagttcagacatcgtttgattggtaaaggcataataaaacgccccccaataacccaaagaaaaaagctattataaaccagaagacgatgatggccaataaattggtaaaagttacaaagggttcgtttgatcagatgcgatgtgagagctgacatatcaaatttctatctcgaaaggccgacatttacagcttttgcttcaacaacaattacctgtcctaaagtaaatttttgcattcttttctctacttgggtgctccagcagcaccaccaccaaatttgctcatcatcttggagataatgggtgccaccttgggattagattgatgctttgcaagattagcagggttcttcatcactgccaattaccagtgagattcaatcagtcacaatgaaaatttctgaagactcacaaatacacacaaaattgaataagagagtgtaccgtcttgaagagcagccatgacttctgggtcgctaaaggccgccatcagttccggatcctatccaagttttgacaacaaaaacaaatcaaacaataatgaaaaacaatcatgaaatgtatatttaaaagacgagaacacagcaatggcagatgcttgactttagcaaaaagaaaaataataataataacagctttactaatactcacattcaaaattttgctgaagtcaacatttccaggcacccctccagctccgggcataccttcagctccgggcatacctccggctccgggcactcctccggctccgggcatgcct

SEQ ID NO: 162953 - DNA, 2279 bp, Cannabis sativa
ggtaatggtagaacgattccgggtgtgagtgtgtatggtgggccgggtcttacaccgggtaaaatgtacccgttattgtatgccggaaacgtaggtggtgatgggtactcttcttctttatgcttggaaggttctttggaccccaaattggtaaagggaaagatagtactctgcgataggggaatcaattccagagctgccaaaggggaagtagttcaaaaatcaggcggaatcggaatgattcttgctaatgttgtatccgatggggaagggttagtcgcagattgccacgtgttgcctgccacttcagtcggtgcttcagccggtgacgagattcgcaagtacattacatcatcatcaaagtcacaatctccacccactgccacaattatattcaaaggaactaagctaggagtgaggcctgcgccggtggttgcgtcattctccgctcgtgggcccaatccagagtcgccggagattctaaaaccagatgtgatagcacctggggttaacattctcgcggcttggcccgatcgagttggtccatcgggtattacttctgataagcggagaacagagttcaacatactttcagggacttcaatggcgtgcccacatgtctctggcttggccgcattgcttaaagctgctcaccctgattggagcccagcggctataaggtcagctctaatgactactgcttatacagtggacaacaggggagagaccatgttggatgaatcaacagggaatagctcaacagttttagaattcgggtcgggccacgttcacccagaaaaggcaatggatcctggattggtttacgacataacatcttatgattacatagatttcttatgcaattccaattacaccactaagaacattcaagtaatcactaggaaaaatgcggattgtagaggggctaagaaggcaggccatgctgggaacctcaattacccttccttagctgttgtgtttcagcaatatgggaagcacaagatgtcaactcatttcattcggactgtgaccaacgtgggcgagcctaactcagtctaccgtgtcacggtcagaccgccgagtggcactctggttacagtgcagccagataagcttgtgtttaggagggttggtcagaagttgaacttccttgttagagttgaagccacggcagtgaagctttcagcaggaagctcagatgtgaagagtggctctatagtttggtctgatggaattcacaaagtcacaagtcccttagttgtgactatgcaacaacctttctaagtctttgtggtgttgttttaggattttggttggaggggttttaggaattttgagtctctactccttagtacttgctttgttgtagaattataagttaatttctttgctccttataatgtataatgagaggatgttcttttttatttttacaaggttcagttttcagctccagaaaactagtgggggtttgtttgtaatgcacagtcaagaaagaaaaggcaatattttctgatattatgtaagattttaaggaagaaataatatgtttgtagaaaagttctgtgttttggtgtaaaagatgctgatgatgaaaacgtaatctgtttctttcattttatattcagaaatctagaacttatcaagtactccttctccttggtcaatatttttctaatccaagtatctgaacttaagctaactgctttgtaaccaagacactgtgataatgacagtcataaggacaacaatcatgtggggttactagtttcttgttatgctgtggggttactacttgatccggtaacccaagaaatcacactgccccacaaccaaattaatacaaaagaactaaataaagaatttattaatttgtgtagcccatatgccttcctggttaattagtcattttgtcactactttgctaaatttgatcatatccttagtattttagggtatgataggttctgaaaaccagactatgcatgcttttctgatttcaatattcattatttagtaagcgcccctaaaatgatgccattttaataagattctgagaaaagttggtcttttctgcctgacacctgaaaatgaagcattatcaatgtcctttgtttcagaatgcaatgcaattcaatcggtggatactaaaagccacttgagagtggagatggaattgcttgacaatatgagttatgggatattttcattaaacaatacaactttgcaaatctttcaactgcctttaattcagttaccagctgaatcttctttagtac

SEQ ID NO: 162954 - DNA, 3178 bp, Cannabis sativa
  modified_base (3103)..(3149): a, c, t, g, unknown or other
ggggggggggggagagagagactaaaattttagggtttccaagattgaaaatttaagtgtaaaatgctctcttatagccttccttttatagccaagtgaagagttatttttctctaatgattaattaataagaaaataaaaagaaaatacaaaaggaaaattctatgccacagccatcccttacaatcaatattaggcttgagttttctcttttgtatgttttagcccgatggatctaaaatcttgttatcttttttatttctaccatatttaataaaaaaaattgtgtttaaatacttgttttaaataaataattatatcgagataattatttaagtaaaaacataatttaaatatttatttttttctttcttctaactttcacaaacttagtggaatattctcaaaattaaaaaaataataatgcgaatactaattgattaaataatcaattagtattaacataggtggcccttatggggtgcaagatgtgctattgcacagggccccaaaaaataaagggcccaatatatatatatatatatatatatatattttttaatgtccttccaaacttatcattgatcatttctatttcaattctcaaaatctattttcaattctattattgcttttaagcaaaaataaaaaataaaaattcattgttgctatttattattttttttcttattatttttttgtttacaaccaataataatttttataaatttattggagttttttggtattttgtaaaatatataccatatataataatatttaaaaatattatatataaattgtatttttttttttttgtatggacccaatttttaaaattagaatagggcctccaaaatatttaagacggtcctgagtattaaacattcctaggtttcgcggggatcatgggtccataaaattcaagctcctaataagatagatctaaaatttaaaaataaaatttttaacttattaattcttcatgactctactatggactcgaaattctactcttgatttcatggaatgttctatgtacctaatataactacgatataaattatctattatttatatcacattgatcaatgactctttatagacaatttataattaatagagactaaaattattattttgcccttttattatattttaactgtaaatatttagttgacataataatatttcagtaaactaatataaaataagggttttctctctctagctttctctcagctaattgagctgatgctatcgcaaagacgagggtgaagcagagtaagcccaaatctccggtgaagaagaagaagaagcgcggccctgattctaccgctgatgtgaagaagaccaactccatggatgaagtccttggaattgagcccttagctttctctgatgaggaagctgatacagtcgaactgatgaatgtggagaaggaaatcgttgattcccttgctttggatgcgagggacagcatcaagagagatgcaattcgtatggattttgctcacttcatggaagccaagcaattccgagaagcccagaccatgtctgcaaatgccgtttcacggggtaaggaagttctacctcctatactcagatttggtaatataatcaggaacttagattctaaatttgttggttctccatccaaacaaagagtcaaaatcacaaaggaggacatgcaagaagaagtagatttctggactccttcaattgtctgctatgtacttggggctaatcccccaatgtcaatcttggatggtttcgtgaggcgggtatggaaagacaagataaacaaggtggggatgatttctcatggtattttcttggttctattcaaaagcattgatgatcgtaatcaagttttatcaagagtttacatcttcttcaacaaacgcctggtgattatgcgagcttgggatcctaatgttaatttcaagaaagaaaacatccacactgtgccaatttgagtacaattgaagaacttacacttgaaatattggggagaacaagttctcttcaagattatcagtcaagttggtgaaccgattatggtggatggctttactaagtcaatggagaaattgacatatcctcgaattctcattgaagtgtcattgcagcaagaatttctagagcaaatctggtttgaagatgagaatgatgaggacattgttgtttgtgtcttatgaatggaaacccacgacttgtgcgcattgcaaaggcatagatcatgagaccaaggattgtagaaacaaggaggggaagcaaaaggctgaatgggtaattaaaaaacccaataaagttgctgtacaagaatcagaccaggccgtagatgaagacgggttcaaaccagcaaagaaaatatggatagagaaaccaaaagatcaaacaaaggttgctaccataacagtaaccaacacatatgcctcactacaagaagaagaattggttgaagcagagcttatgcagacacaccagcagcaaagaaatgaccaacaagaagcaataaacattggggatacaggagcagggggagtgcctcctcttcccaatgaatgaaatagtaagttggaatgttcgaggggtcaacaactagcacaaacaacaattagtgaaatagttcctagcaggccaaagtgttggtttggttggacttctcaaaactagagttaaggttgccaagcttggaaccttatactcaaatgtttttcaaggatgttgctttacttccaataatgtttggcattcgggagggcgaataatcgtaagttggaagccaacaagctataatatcaacattctaaagtgttctagccaacttattcaccttaaagtttcaacggttgataacaaagctcacttttatgttacattcatctatccttttaatgatgaagagagaaggaagaaactatgggttgatctacaagaattggagatgagcgaggcttggattgtcatgggtgtttcaatgacatcttggcaaaagatgaaaggattaggaagcgagtgaggtatgttccttccactgattttattgattatgtggctaattgtcgactggatgatgttaatgttggaaattattttnnnnnnnnnnnnnnnnnnnnnnnnnnnnnnnnnnnnnnnnnnnnnnnatgaattctaaaacaatgaaagtaaacac

SEQ ID NO: 162955 - DNA, 1427 bp, Cannabis sativa
caagtgtgcagcagggtacatcaaattccacatgtaagagaacaataaattataacaaaatgatttgctcaaggcaagaatcaagtaagccattacattagccatccacatagacaacccaatcttagcaaaaaaagaaaaacattaaaagctaaacttataggattcacagtcttcaaacaacaatttatttatttacagactctctggagtgtggagattgaaaaattacctagagtctctagaggcagaatcacaagcctgaacgatttccaagcacaatttaagatcattatgattcttggtaacttaataagctttgaagaccaagtacgccgtcccaagcgtcccagtatacactgtataatcatgtattcgttttccactcaaaccccaagtctctctcaccacctgaaagtgaaagtgacaccaaaccaaaatagttacagaataaaaataccgacccaccaaggccacaattgagaaaaggctatatgggtggttatgtttatggaagcaagtaccgtttgtttgaggtccaaggcataagttttgagagtgtctaaaagtgttttatatggaagagagagaaggtttgtgagtgaatcttgggctgtctgaaagggtgtagtctcctgtagaggtgcctctgctaggaaatacggcatggtgttatggaagaatcggtccgccatccctttctgtttctattatctcagactgaaccacttcccttttacttaaattaactctctcaaccttgctcctaagccactctattaaccagtaaccatccttcaaaaaataaataaataaataaaataaaactgtaaacgacaactacaaaacaaatatcttcttgtcgtttttttttacttttctttttccattccataattgccacaatcctgttaacaattactgaattttatgttcaaaatacttttatttttcttaaaaaaaatggtataaaataggatttaaatttagttaattaaaatttaataataatttaatttaaaagtattatgataatatttgttatattttttttttttacatctattcgttctaaaaaataacttctagttagttatatattaaaaattaaaaaaaaattgagttcaaaatttattttgttctattttaaaaaatacaaaagttaaattaccattttaaaagggatcaaattaataatttttgtaaaatacactattcaaaataatatttataatttaaattattctttaggataaaaaagaaaaaagatatcaattttaattagcatttgatttttttttcttttttatgacgcattggcatttgaacccaatcacaaatgtgaaacgtgttagactttttatttgggcttacattaagttttattggttttattaaaacttgggttgattggatagttctttgct

SEQ ID NO: 162956 - DNA, 5216 bp, Cannabis sativa
ttgagatttggttatctcatcctttcccgtctggcttctttctcaaggcggacggcaagccggactcttgggtccaatttaaatatgagaagttacctcatttatgcttcagctgcggaaggcttgcgcattgggaaaaggtttgttcggatcagcctactatggtctattctaagattggtccgactgttccaatgtatgaaacttggattaagagtaaaacaaggagaagtaattgttttaatatgaaaggaaagggaacttcacagctgattattgagagggaggaggtgcctgaatgggagttgacaagaaatagaggaagaaacacatggaagtgccatgccaaagtgctggaaaaaatgtcgagaagttccggcgactctgcggtggttattccagaaccgggggaggagaacggcatagataaggacaaggtggaagatagtacaatgacaggtggccacaaacaaaaaaatgtgcaggagggcacatccaccactgagcctattatgctgggtacgggggaagattgtacaaggacaggtggaatatccgttgctgatggaaatggcgttcaaaatgttgaaaacgtgggggatagacagatggagggttttgaatattgagaatgggcctggttatttagagcttcctaatcctaacttttcattaggcccagatggagaagagaggatcccggatattgggccgattatagcccaaagcctggaaattcctcattcatggctttgtagatctcagaagccccatgatttccctgagcctatccctcttaaatggcccaatgatgacccaaaagcccaagaactcttcttcaagttgtacgtcccggacttaactgatatgtataaggcccaagcctctttgatttgtaaccctcccgatctctctatgatgattgtgcaatttctgggaactaaaaaacaaaagccccatacttggtaccatccgtggcctgctgtcaccagctttgaactaccaagttgtccgtccacggtggaagctgaaggaaatggcaagtcgcaggaagaagctgcagtcaccccgaagttctgcctcggttctgctgaaggtggtgagaagaaaaggcgcaagagctctcgtcaaactggtctagggccgaggatgtttaacagaggttctggtgttaaaacacggcgtgcgaggaagagggctgaaacgcaacaatgtgagatcaacgagtttgaaggtaatttggaagttgttttggaaaattgtattgataattattctcaattggattttggaaatggcgaggaggcggcctcaagcatgcccccaccgtcattatgaggtgcctatcgtggaattgtcttgggattcgtaggcccacgacggagagaactcttcggagtttaatccaggaaaataatgtggatgtggtgtttctgtccgagaccaaggtaagagtaggggatatgactatggttttgaatcgtttgggatttcctaatgtggctggtatcccttcggtgggcattggtggaggattttgtttggcttggagacaacttggattaattgaaataaaggaagtttttgctactgggttccatgcttttgttcctgcaaaccaaggaagtgtgtgttggcatttgttttgcttatatgggactccttatgctgaggagaaagttgaattttggaaatgggcaactgagttgatgtcggactgtagggagccgtgggttgttctgggggatttaaacgtaatactagaaggatcggaaaaagttgggggaagggaattccatagccgggagggggcttttctaagggattttctggatgaaattggaggagtggatttgggtttccatggggttcgttgtacctggcgtaatgcaaggaagggaatgaaaaatgttcggaagcgtcttgatcggggcttggcggaggcagcttggtgtacccatttcccaaatgcttaagtatcgaatttgccaattctggcatctgatcactctccaattttgctatcgaccagtgaagaacatcgaaggcttaattatcctttttggtttatggaagtttggacctggagtcccggctgcgagaaggtgattgatttggcttggaaatatgaatttaatgggagaaaggatgaaatcctgatcaagaaattgggcaagacaaaaagagatttgaaaatgtggaatcaaaactcatttggcttttgtgatcagaagctgagaaagtttaaacaggagctggtggaaattcaaaataagttgccttcaaaggaaaatttggagagggaagctactgtgcagctgagtatcttggaaatggaggcaaatttggaaagaatatggaaacaaaagtcgcgggagcattggattcgcaaagatgacggcaatacaaaattttttcacgcctctacggtgatcaagagacgcagaaatacgaaagaaagtgtgaataatgatagcacttggctccatgatcgtgaagacattgggaattatatgaggaatcagttcattcaggtctatgaaattcagaatacggttatagatgatgactttgactctctcttctcggagttggtttcggaggaggaaaacaataacatctatagaacgccgactgctgacgaaatcaagcaggtggtttttgcactttatcctttgaaatcgctggggcccgatggattctcgggcatcttctacaggaaatactggaggatagtgggggtcaaggtctgcgagatggttcaaggattctttgaagagggatcggtatgtgcaaaactcaatcatactttcttgtgccttcttcccaaggttacatctgcgtccaggtttgatcaattccgttcgataagtatgcaatttttgttataaaattatatctcgtattttgacggatcggttgaaagaagttattgatagacttgtctcccctttccaatccgcctttattccgggtagatgtattgcggaatgttcaatcatggcgcaagaagttcttcatagtttgaaaagaaagaagggtaagcatggggtgatggctgtgaaaacagatatgagtaaagcgtacgaccgtttagaatggaacttccttcatcgagttttgaaagctaatggatttagtgaaaaggtgtgcaagattatcatgagctgtgtaacttcagtttcgtactcggtgctcctcaatggggctcctttggctcccttcaatcctaagtgtgccttgcgacaaggagatcctttgtcgccgttactgttcattttgtgcagcgaggtcctttcgaaattaattctaagagcggaggcaaatggggagttgagtggtgttaaggtctcgagggaagctgtgcctatttcacatcttttctatgcggatgatgcaattttcttttgtcaggcgaacgggaagaatgcggcaacccttatggagtgtatatctcggtatgaacgttggtcggggcaaaaggttaataagcagaagagtggagtaatgttctcgcctaacactcctttgaggtgtagggaagaagtcaagagtacaatggacattaacggccttagtcacgaagaaaaatacctcggcaatcctttcttcttctcggctaagaaaagaagggattttcacttcctcgaagacaaggtcctgggccgactggaggggtggaaggcaaagaatttgtctcaagtcgggagaactacattggtgggatcggtgttacaaagcatcccttgttatactatgtcaacagctatggttcctaaggctgtttgtgatgagttggataggattgtggcgcgattttggtggattggcaatgctgaaaaatagagatatcgttccttcaagacttggagtgaaatttgccaaccaaaaagatgtggtggtcttgggctaagaaggtttagagatataaatttggctcttttgtcaaaactgagttgggggatgctttctagagctgacaaagcatgggtgaaactgttggaatcaagatactgtcaggggcttgatgcttggagggtggagaagagattgggagattcctgggtttggcaaggaatcttggaggctagaaaagtttgtaagaatggggccggggtcctcattggagatggtagttcggacttgtgggagagaccttgggttcctggggtgtctatggaggaagttcgaaacagtttcacttactctagaagacatgcctttgtcaaaggttctgatctttttttggatgggacccgtgagtggaattcagagattatcagagattgttttgaggaggatgtggctcaagctatcatgagcattcggcctttagtatctagtaatgacctgttgttttggaaagcttcaaagtcgggaaacttttcggttgaaagcggttattggttgagtcaacaagagagattcaaggatccgaataaggtgtgggaaaagctttggcgctcatcgattcatcctagactaaaacttttactttggaaaatatggtctgatgtttttcccactaagatgcgaattgggatactggaggaggattgtgtgctatgtcataatgcaaatgaatcggtgctgcatttgtttggtgtctgtagtgcgtttaaggcagtgttgtttcatagtaaatggggcattcgaatagatgatctgcattggaacactattatggactttggtttgtggtggacaactgtgaaggatgagagtctccagttgtttgtggcctgtgcttgtgactcgatttggaaatggagaaacaatgtgttttttaagaatcggcctttcgcgattgaggaattgatatcagatgtccaagcctccgtgcaagagatgaacctgagagatattgcagaccctggggaggtttcattgttggcttctcaggatattgcagatcctttttgctcaaccgatttggttcctttcaatactgacgcttcaattctaaacgatgaagctggtttagcggctgttcagagggctgaggaagacagggagatggcttgggtagctaccgatttcaaaaaagtggctgggatactcgaaggggagctgttggcaatcatgttggctcttcaagtggctcgtcaatgtaacattctaaagatcaaagtcctttcggactctaaggttgcagtgatggctctcaatcttggttgtttgcctctcgcatggggcacttaccttgtgtttgaatc

SEQ ID NO: 162957 - DNA, 1424 bp, Cannabis sativa
aaaaaaaaaaaaaaaaccttattgggacttttaaataactatattagcaacccttagaagttagaaactcaatctcatacaacaaccatgtaacccttacaaaagccatgttagcaactcgcttttatacaacaacaatagtagcaactcttacagcaattatgttagcaactcaatctcatatatagcaattgcgttaacaactcttacaacaaccatgttaccaactcaatctcatacgaaaaccatgcatgtttgaaacacttacaacaacttaatctcataccatgtcatgttagcaatcatacaacaaccatattagtaacttttatagaaacacaatctcatacaataactatattaacaactcttacaacacaacctcatataacaaccatgttagcaacccttacaacaaccatgttagaaactcactcttataatgttacaaacccttaaatcacctcaatctcataacacaactatgtttaggaactttaacaacatgttagctacttttacagtaaccatattatcaatctttacaaaaatcatgtccgcaatacaacaactcaatattataaaataaccatgttagcgacttgtacaacaactgcctaataacaacatggatacttaaactcatcctcatattcataagtttattttgtcttctaatatgaatattataaataagcaaagcctagatctataatatttaacatcatgaactttactcctcttcaatgaaatactcaatatatgaaaatatggatacgatgccattcctacaactacaaaaataaatctcttaaaaactaaactgcatttactcaatgttaaaaatgaaattattttaaaaacaaaaaaaaaaaaatgaagcataattactttacaaatttactcacatattatatgcactttgaaataggggtgtatgtttgtcggtttggtcggtttacgttatattttatttaactgaatgtaaaagtcaggttacaaaaatctaagtgcaacccgcccaattaagaaaaaataagacttcaacccgtccaataaattggtcggtttggtcgggttaacccgtaccaaccaagcactaatgtttttttttaaatttaattgttatattttaattaattgtaataataagacaaatatataaattgaattcaaagttcaaattaatcaccataaagaaatatagtagtttgaattttttatttctttttataaatatgtatataaattatattatataaagattatacataataaatatatatataaaaacctaatctggttagtcgagttaattcagattgattggacgggttagtatttgttgcccctgatttcgcccaatatacatggaccaaccagataaggacacgtggatcaagcaatttacaatatttgctaag

SEQ ID NO: 162958 - DNA, 2137 bp, Cannabis sativa
gagtttgaatcaacaagcttcagaattcagaatcttgaacaagaactcatgtcattgaagagaagccttcagtggcaaaacatttcaaagggaacttcagaaccaagctccaccaagcaacagagtttgaaaccatttggcaaagataatagatcgttaagcaaaaagattaatccacttggacaagtgacaagctgcattgggtctgtgaattttgcttcacaaaggaagtatgctagtagactacttaagatcattcgccgcttaaccttgtttagcagcagaaaaacaaagcgaaagccaggcacctctagcctacggtccaaaccactgtgagtaagagaaagagatgtatgaaactagaaaatcgacaaattttcatcattacaagagtacttgtaaagtaacttgattcaataagttttgtgtacatgtataactctgtttctaaactttactcatactatgaataaaaattgcccataaacaaatatcttctgaaaccatattccattggttctatacatgaaaattacatcaaatcaagcagcattcatatataatggagtcatggaaagtccaatgagctccatgtaacataataaactaaaacgaaaaagacaaatacaaatagaacatattaagacacacagtaaggccagccaaaacaagcagtcattatattaagactgcaaaagtatgcattccaagttactaactaaacaactggtgggggctgcctcagtagaaatttcattcttgatcttatgagatgactcaataacacttctcgcagtatcaacaaccacttggccagtgacgtagtggaggcgacagaccggcatatagagattagcgccaccaatgagttcggtctgtgtgtcacctgtcttcctcagagtaaaaaaggccctcttgccacacatttcacagcgtgctgtcaacttggtgacagtatcagcaagcggaatcacatctagaaccgacccaaaactcctcctaccaaaagggtaagtgaaattcaacataagaatactaaactaaaccaactaaagacttgaattattttcatttttgtttatccaaatagtaccttaggtaatcaccatcaagaccagcaagaattatggtctttccatcatgatcagcaacctggctacagaaatcgtagagatcgtcgaagaattgagcctcgtcgataccaattacatccaactgtaaatataaatacacaatattaaaagagaaagagacaattaattattttcttctttcaaaaagtcaaatgaacaacccattaaagattaaggaagaaagagtcaaatttactttctggtaagcatcctccccaaagttttgtctgaaagatgagagatcaggaaggacccaacatgggaatttcactccgtcgtgggtcacaaccgaatcaacggcgtatcttgtatccttgcttgatttaatcattgcaacagtcctactcatgatctttcaagtgttagacaatgaaaatcttcaaagaaaacagataaagaaaaattgagcagaatgaaggtacctgccgttgttgctttcggacttaacacgacgaagaagagaagtggtctttccagcgaacatgggacccataatgacgtggacttcaccggagacgacatggtcgtttttcaaagtagaggaagggttgaaggaagaagccatagacaactgatctgagtggttaaaagagaggaagagatgagatggaataaataggaattgagttggtgttgtttctgtctttgaatttttaaagttcgaaagttttagagggaaaggaacaaataaaaagacaagagtctccaaaaattggagggaaatatttgaggaattaaatataaataatgttgtgtctgtgggtgacccacgtaaggaagacatttacttttactttttataaacttgttttgtacactattcaaaagcttctctgatacgcttgtttttaaaaatacaacaataaattatcaaattaaaacatggttctaggctgtctaatacaatcttgacttgttttacaacaataaattttacaatgcaccttgacttgtttcggcatctaaacaaaattttagtttaattttttttatatattcatata

SEQ ID NO: 162959 - DNA, 1716 bp, Cannabis sativa
acggcgtggaggccgaaggaggctgatgtctcgaagggggttgtttctcagttggatgatatttccctgtcttaggatctgagtagtagaaaggcacctgaccttttgccattttcagagagtgatttgaatttgaatggaaatattagtggggtttctagggtgaagtgttataaaaaccaagtgttggaaatagcaaggtggagcttaaggtgggtgggtcgaatgtgatatgggatgtgaacatttcaagtgggcccaggtttatgtcatgtgatatggctcttggacttggtagtgggcttggaaataacaatattgaaaatgaattaaatggtgatatcatgcttattcctgggtcgaatactaaaggaaaagggatggtggggccgaagcctagttcttgtgggctagtgcaaaaaaatcatttaaaagaggtagttgggaattttaatgaaaatgctattgatgaagttgatggatccaagctttctattgttggacaagacctctctgaacaccttgatgagaggaggtctcttgctaaattttttcaagctcaagaaggatatctacaagagttttctaatttttcattaaatggaaaaatgaaaaggaaagcgggtctccttgacattggtgtgcaatcgacttcggagacaaatgaaagaaccaccccggtgaaaaagaggaaacttgatgtggaatcccactccttgaagatcttgcctaaatggaatatgagaagagtgaaatgtgtggttcgagattttccgcgtggggttgggccggacgggaatagccaattggagagatcaagtgacccggaggagacgtccatgggtgatgggagctcttcaaaccccgctgaattctttatggaggtaacccatcacatggacaaaccaatttctgctggtcaatctcagagactcacggcttggaaggctagggctcggctagcagatatctacatcccgaaatagaatttagtccttattgaagatacaggctccgctgtgggtgaccctgtggactttactacccctgtggaggaggtgaacagccctcctccacaggcgccatgagaggcgttgcttggaactgtagaggattggggcagacctctatggttcttgaagtgaaagccctagttcgatcgtgttcgcttgatttcattttcatctccgaactcaaaagcgaccccgctcacttggtacgttctctgaaaaacttgcatttttattttaatattattgttcctgcggttggtggtgcaggtggcctcctttttgcctggaaggccgggttttcctttgagaccgtgagttactctaaaaatcatatctcgggtattgtgtattcggaccccgagcatcacccctggatgctctcttgtgtgtatggtccgccgtattttaatgaaaagaagaatttttggtcgaaattgatgggccttgggagcaaatttggtggaccttggttgattttcgggtatgtgaactttgtgctaaaaaactctgaaagggtgggctcgagagggagggatcaattcttgcctttcatctctgatttaatcggtcgatcaggtttaattgatcttccagttaaaggagattgcctcacttgggacaaccatcgtgatggtgaggctcatgtcaaatcggcccttgacaagactttatccaatgctcagtggctgagcctttttccgaa

SEQ ID NO: 162960 - DNA, 4037 bp, Cannabis sativa
ttttttttttttttttgtgggaaatggcttattttatgtattttgtggagtagactgtgttggatgtggggactgggagtggtattctcgcaatatggtcagctcaagccggagcaaggaaggtctatgctgtggaagcaactaagatggctgagcatgctcgtgtccttataaaagcaaataaccttgaagatgtggttgaagtgattgagagcaatatggaggacgtctctctccccgagaaaggtttgcattgtttgatttaagtacttacttattaacttctgtatgacattgttttctatcttaagaatctgtaaaaaaaaaaatttgagcagttgatgtgattatctccgagtggatggggtattttcttcttcgcgagtctatgtttgattcggtgatatatgcccgtgaccattggttgaagccaactggagtaatgtgagtttggttatgattgtgattctattttatttggttacttgtgttgcagaatggataatttgcattttttttttgttattgtcctccatggcaccattgagctgcgaattttattgtgattaattataaagaaatttcttcaactggctcataactattgtaaaaaagctgcctgtatgaagtggatattcatgtacgagtaaagcagcaaggctgtaatgtttttgaatttttgcagtagcttttctctttctatctcctagagaattcttatcttaaacagtttcacctctctgtatatgtatataggttgttgggatgaatgatagtagtataaaaatatgtttgtttgagccttatatcggtcttttgttttggtatctgaaaatagtgcctacttatcctttactttggtggaagaagtaggcatttcactgaagatgggggctaaatattagtggaaaatgagtattgaagattgctttctttcatattgtttattctgacctttctccttggtcagtttgttgtcacaatgttcacttgccattcaattcaggcagttttgtttccactgtttacagatgatttaaattgtttgatctcttgagctgaccaactttagtttcataggtatcctagtcatgctcgtatgtgggtggcacctatcaggtctggaattggagagcataaaaggggtgattatgatttggctatggaggactggcataattttgtcggttcgacaaaatcttcttatggtgttgatatgagtattttatcaaaacctttctcagaagagcagaaaaaatactatcttcaggtgactcctaacaaaattttaattgtgtctagctattatgctcttgataatgtgacttgtttaaaaatctgcatattttttcactgggacattttaaggactaagatacctgctaatggtataagaggataattttctggactaataatttcttactgggatatagattgtttttttctcttgagcataactgttattaaattccaagttctaatagaaatgtcctcaaaataataacttcttcaaagtgttctatggcttaatatacaatttataaatttctgtagacatcattgtggagcaatcttcatccaaatcaagttatagggtccccagccataataaaggagattgactgtttaacggtctctgtcaatgatattcttgaagttaaagcagatgttttttcgtcaataacaatggaacatgcaaggctctgtggttttgggggatggtttgatgttcattttcgagtaagttaatctgttaacattttgtttagtttcaacatactctcttgagcaattccatagcagtattgacatatatattgttgtgtctttgctgcaacagggaagaaaggaggacccagctcagcaagaagttgagttgagtactgcaccttgtccaaataacggcacacattgggggcaacaggtatggtgttcgaagtacattttttttcagttatctttagaaactctgggtctccttgtataagcccagttgaggtcattatattgccattttgctataatatagcatataactaatttggtaagtgaattagttgattttggacagatttatagttggcacgtctgtattatccactagatagatttgtatctatttagcaaaagcataagtgtataaactaaatcaactgcttattgattgttgtgatttttttttttgagggtgattgttgtggttcactgatagatagataccttcatgcaactgaaattataacaatccattttactgtgtgattaattatggttggctaatggataggtttttcttctgcaacctcccgtccatgttgaccaaggcgacaaattaaatgtttctttctcaatgattcgctcgaaggagaatcatagacttttggaggttgagtttggctgtgatgttacacaatcttctggcaagattccacacttcaagaacaagtttttcattgaatgagaaagaagctaacctcacagtttggctttgacttttgacaaaggtaaaaatttattagctcttatctgtcatgagaatgcatcacaggggtccatttggttttagaccatcagtttgataagtgtctatacattacttttttagaaattctttattatttatttatttttacattaatatctattgagaattttatccttaataattaatacatgaataaataggtctcccctctctaactaaattaatttgacaatttccagtatttatgtgctttgcaaacctgccaccagttttctgttctaaggcttcttcaaaaatgatgaaatctacaaatggacaactttttgtggagttttgcagctgtttttggtagttggttttttattttgtgttttctgtaattttatctttatattaagttaacagaaaattagaacatatactttagaggtttgtaatttgtacaatgcgaaagtatgcattgttgcagatgtcaaattaaaattttggaaggaaaaatgaatggtgaaaaattattatggtcgaatacttgctgcaagtcgtcattcaaaaacatatcaatatattttaaataattacaataaaatagcctttcataattgacttcgttcacatgcacatgcatgcctttaaatttaattagacttgaagctgcttcgattaggcatgccaacactatttgaccttttaaaagcttttaatactcttattacattgaattgccaacttgatacatcaataattatctacctttaacaacaaatttgggtgctattgaaagcaaagcaatacagtttcattttccttaaattgaagccttattataaattcttgcaagtttaacttacataagttaagtgctggcctgttcttgtgctcatatctgtaaacaaactatgcaaagatcatcaagtacttctcgagcttctgacgaattcttggtcaattttccaccgccttctttcgtcccgctccccatgaaatctgcagctgcagaagaactgcctctgtataaatccaactctgatgctaataaaaaagagcttggtgtgcacaagtcgtcaggggaaaatatcattcatgtgattcctttgattttgatcctttgtggttttattctttgggttttctctcatccaggtaaagtgtgatgttgcaatggcaaacaaaattaactgagtgtaatttcttgtttctaagacatgaaacttgtttcttctctatcttttgctccacaatttggcaatttttattaaagagttgtttagtattaacgtttcgtttaaaaacgactcgtttaaattgaaattcagcgtggctctagtttgatctttttagttacatttttcagaatatattggacaaaattaaagagccattagaaatgtacatatttgcaggaggtcatcaatcactttttatataatggcggcataaatatctaatgttttagtttttatacacttaaatacctaatgtttatttttggaggcaagaatatctaatgttacaattctcttacacctctcttacaccgttactactactt

SEQ ID NO: 162961 - DNA, 1206 bp, Cannabis sativa
taagtcctcaggaattgtcgggttggaggatttaaaaagatcagagaagaagtccataagaatgtgtcccttgtccctctcaagctcctttcttcttccatttttgtcatgcaaggcccatatatgatttcgttttcgacgaaccatagtggatgcgtggaaaaatttactattgcgatccccctgcatcaaccataattctcgagatcgttgtttccacatcagttcactccttttccattcctctgaaatcttttggcggaccaatctttcttcatttatccagggctcaacatccttttgagattggatccacatcagccgatcctcgaggatctttattttggcatccacatctccgaatcctttctttctccacccttggagggcatgtttcgtatttttgagaaggagagccaggttatcagcccctcccctattcagattcttttcccaactttcctttatcacctcggcacacgattgttccctgagccaagcttcgtagaagcgaaaaattctagaaccctttccttttttcatcagagtatccagtataataggcccatgatcagacgccacaattggcaggtttctcactcctccatgaggacaaacattaagccacccagtatccacaactactctgtcaattctttcccggatcagacccccgttaaaccttttgttttgccacgtgaacttgttgccacagaaccccaagtccacccccccggtatcatctagaaaggattgcagcaattcaccatctttggccctgaattttcttcccccagccttctcttctttacaccgaattacattaagatcccctatgatcgcccacggatcatcacacgcagtcatataactcgtgaattcctcccaaaaccaacctttttcttcatcgtagggagtcccatagacagcaagaagtctccagaaaccatggctttgtggttctaaaactcggcactcaaaagccgaattgtgaattcgttcgatactaacgttggcctcttccttccataacaaacataagcctcccgccaaaccatccgcaggaatatactccccattatcaaaacccaactcctttctaacagtatccatttgctctctaccaatcttagtttccatcaagaaaatgcaatctaccgtatacttacttgtccaagtccgtaaggcttgtgttgcctcggccct

SEQ ID NO: 162962 - DNA, 3036 bp, Cannabis sativa
ttttctcggacttcaattgttcaaactcctccactgagatcttgcaggaattagtatttgactgatagcttgacacgatatttccatcatcaggaatctcagggtgtgaaacagaattagatatgtgggcacagccattttggtatacttcatttgaatccttcagaacaaccttattttctggtagtgcaaccttgtcaatgcaatcaggactgttagtttctgattcatttcctttgaaacccagaacattaaacctgagttcactagcttttgctaaaacacgggaaaggtcaagaacaaaatcaagtaaacttaggttgctgtgcatgactttattataggtcacagagaaatcttcaattctcttgctgaatccatcactttcggtgaaagtgtcgtggactaccatagcttctttgcccaagaaggttacaaaatcatggatctgagaaatggcagcagctaaatctttgctaatctgctcactttccctggctggctgagaaagagagatttccttttcagcagttaagccagcatcttctggattgacctgcctatcagatctggcatcagaacaatgaacatcttcagaaacacaacttactgcgtgctggtggagagtatcatgtgtctcctggatggcacatttgatatcctccaaaatggtccctacatcagtttcctttgacacagactccaaaagtacagatattctggatcggagattcatcagtggcagctgcttttcatcagatgattccacattagagagaggctgttgattttccaaagaatttgaattacattgctgttctgaatggatgtctttgccagtgatgacttcagaagcatcatggttcactccttcagatatcttactgtttgttgaatctgaaccagatatggtgccattagaatcatttgacaaacaagccaatttctccatttccaaaaagtcatccataagatttaagtggttctgtttatcagcctggtctgacttttcggtgtccttatctttcttgaaatgagagagctcagaaatcaatgcagtagcccaagactccgcacagcttctgtcatcgtcatttccatcttcagacatggaggtcaagctgggtgggttgctagcgttctgactgaaagaaccttctgtggttattggaacaatagacttcggagaagttttgtgttgattgctgttttgaatttgtgcttccaaactttgaagcttgctagcagtcttagcacacatgcttctagaggcttgcaattcactattgcgttttgccaaagcctctttcagcatttttgtttcttcttccatacctaataggcgttcagtgagaaattcattttccttctgatatttctgtacattgtcgagagaaaactcagtcacatgggataggtgtggacttgcaggcttaacaggagaccttcttactcgtgagtcaccataatcacgtgactcgtggcctaaactctcaacctctagcttcatttgtgcaagtgcggcagcacctggaagcttctttcgcacaagaacacgtaatctctggcactctgcttcaagcttagctatctttttgacaccctccatgtgctgcttgttcgctacttctgcagaccttatactcatgttcttttcctcattgcgaatttctagctctttagaagcaacatgaagttcatatttcaatgagtttatttccctctcacaagattcaatgttacccttcaaatgctcaatatctgcctcagcttgtgatttctcttcacttatcttcatgagcatatttgaacgctcttgcaaagaccttgatatagcagcattctcagcaccagaccttcggagttcttgatctaagttttctaacttagcttccagctcaagcttaatcttctcacattgtttgtttttcgcaagaataacatcttgcaacttttgctcatgttcttccttcaagttacgtatctgccgcatgcactctttgagagcaccatccaaatgtgatgctcgatcttcaactgtgagctttgcgagtgtcacagattccagatgagtttttaatgcaactgcttctgattccgccttttcccaacctggaacacaacagaagttctaaaattgataaacttatatcaagttgaaaagctactaacatgtcttctagaccttgattactattttagtatgataataaggtgcacaacatacctgagacagcttcttcagcaactttagcatgctgtttcaccagattgtccttgttagtcatctctgtttgtgctgccgtgagcttctcattcaattcagttatctgatcatccaatgtcttgacttgctcctcatatgtcttcacttgatcttccaagcccgtcagatgagaatattgatccaccgatatttgaacataatttggttttttgtatggttcctgttctcattaaaggtaaaaataaacaaaagacaattattaaaatgtaccaagtacataaatcctcaagtagagtagcagactatgaagctgaaataacaatcagtgcttaaccaaagcaaaaaaaaaaaaatatgcactagtacttccttttagttggttcgaagagtttcaactgaaagaattacaacagctaatccccacaaaagatataaactgattttcaggtagcttaatcagaaacaacacacaccaaagggaacaagatgttgaatcatgggaatgttagagacgcctaaattatcagaacgagtaaatcatatcaatgtaagaacttgtccaacatattaatagtgtctgggttaaaaaatacagagaaaatgcaagaatagctgttgtaatacacataaaacaccacatgtttactatttacaagccgcgaaacaggaaaataggaagggaaaaaaaaaggaaaaaaggaaaaaaggaatttattttgcttttctacaaaaagaaacatacctcattctggcttccaactgtagccaaagaagcagccgctgcatctgctgctgcggctgctttttca

SEQ ID NO: 162963 - DNA, 1223 bp, Cannabis sativa
atcacaaagatacgagcattcgaatatcaccgttcgaatctgtctagaaacaaaggggcgggccgcggcactccccacatggggccgcggcacctaggttggaaacccaagccaccaacagaggctggccacggcgcccaaagagtggggccatggcccctgggtttcaaactcaggaaaccccaatttcagcataggaactcaagccaaaaacctcaaaaaactcacaccaaaaccaacacaaactcaactccaatattcacatattatagctcattaaaatagggagtaaacacactaaattcatgcattaatttacaactgaacatgcatccaaagtctagattaacaacattcaagctaggctccaaatattaagcataaatcaccacaatttcaattccaaaagcttgaacaaccaagaataacaaatctcataacctcatgctttaacacaactaaaatcaaagccaacaatcagatattagacacaaaataaccttaaaatctcacctaaaacatacaaagaacactacacaacaattcaacaactcaatcatgcttcaaacaccacacttaatccaaattccacctacatgcatatataaacataaatacaagtagaacatgattttcaatctttcatttctgcagcaaatttaaaattaaagatggtagaaaaactacctcaagctccttcaaccttaagcaccaagaatctacacactccaagcttaaatccaaggtaattttaagagataaatgaaatttttgagatgagataaagagagggagatagggtcggttcttggctgagaaacaactagaaaaacaccttcaatttttagtcgaaattccctttgttgcaaaataagtcaaatgtcaaaatgattaaaatgcccctaggaccatataacacacatatatacacttaagggcaataaagtcattaatcacgcacacattgttttaaataattttcaagatgttcatataacaataaaatgccaatataaaattccaaacccggttcgttcggttcggcccgacccgattgtgactatatcgcgccgacctgtcagaaaacacttgaaaaaggacacaacaagtatgctacataataatatagttcataagcacgcaattaaattaaatttacagttttacccttctcaggtcaaaattactaaaatgctcctggctcaacaacggggtcttaacat

SEQ ID NO: 162964 - DNA, 5071 bp, Cannabis sativa
ggcatgagacaggcgttaaacatgttctcgaataaagtggtagttaattttgacgtgttttgtttgagcatggagatccgaattggatgtgagatgaatagtactcatgttatcttaatgcatagttggggctgccagtagtgaaacatcaagttcagttaacatagtttcgatccaagagacttcaaaacaccattggcaagagctcaatattcaaaatcggtgcttgcctttttgttctgatgaggaccacgagatgagatgcaaatcgaaaaaatacagtaagcactagtgcttctgcagtcatctaggtaggaagccaatctgcaacagtgaagcaataaagattgagagtagagttgggttgaatcaaaaggcctaggtgggctgacccttttagatggcataagactctcttggcaggttgaagatgagttgtggtaggagagtgcatgaattgagaaagcttgtttacgagaaaggcaatgtcggaatgggtaaatatacaatattggaggacaccaatgagacttcgatattcagtggcatccgtgaggggagaaccatcatgaagggatagaggagagagaaagataagggtgtatggacgggtttggaatccaacaaacctgttttggttaataagtctcgtatgtatttggtttgagacatatggagacctgagggagagcgatggacctagatgccaagaaaaaatgtaatgagccaagatcctttaccttaaatttggtatgtaagtagtgcaacaaagattgaacaagggtaaaagaggagcccatgatgatgatatcatcgatataaactaagatgattaacatgttgccattagacttgtaaataaacatggaggtatcgacctttaaagcatgaaaactccattcttgaagagtcatactaagattgaaaaaccatgcctgtatagattattttgaaccatagagggagtttgaaaacttacacacatgtttaggagattcaggatcaatgaagccttttggttgagtcatgtaaacagtctcgatcaagtttctgtgaaaaaaaaggtattttgaatatcaatatgttggatgggccagtggaaagatacatctaaagataaaatcaaccacttagtggttcgtttgatgacaagactgaaagtctcatggaaatccaaacccatagtctaatgaaagccttttgcaacaaggtaagtcttgtaatgatctattgcaccatcaaaatttagtttaatatggtatacctatttacaaccaatgactttggaaccaggaggaagagggaccaagatccaagcacgttaggaatacaaagcaacaaactcattgtccataactcaaagccaagttggattggtggatgcttcattaaaagaggagggttcaactggtggacttccagccacactataaaataacttgggcttatgaatgtccactttagcatgagtaaccatgtgatgtaaattaatagttgtagtggaatgctctagaagaccatgcaactctactgctaatggaatagtaggggggctagaaggagtcaaagtgtttcaataagagggagatagagaagggaagactgtgtgtggagtggaaggagtagttaatagtggagagtgagtggaagtattaggtataggagtaggggacagggagagagattggacagtgggagtaatagttgaagaaggaaaatgcaagaaattgataagagtatgagaggaaataacacgcgaggaaatgaaagaggagaaagtaaaggggaacgtatgttcattaaatataacatggcgagtaatgtaaaggtgacttgtggaggggtaaaaacataagtagcccttatgctgactactatatccaacaaagacacatgcaaaagagcggaattcaagttcatgggtgttgtaagggcacaagaaaggaaaacactcgcaaccgaaaacacaaaaacaagcataagagggaagtttgtcataaaaaacatgaaatggactgcatgatttaaggacacgagtgaggagacgattgatgagatagactgttatggagaaagcataaggttggaagttaatgggcatggaagcatgagctagaagagtgagactcgtgtcaataatatgacaatttttgcgttcaatgcccattttgctgtagagtatgaggaaattaaagttcatgaagaatgccacgagagcagaaaaaagttgaaagagaacaaaaatcccctccccaatctgaacagattattttagtttgatccttaaattgagtggaaatccttattttgaaagtaagaaaggcttggaatacttcatcttagttttgagtaaaaaaaaaccatgtaaagcgagaataattatcaataaaaaatgcaaaataataaataccaaaacttacggtaacaagggaaggaccccaaatatcattgtgtattaattcaaaaggcgattgagctcaagatacataattagaaaaagaaatacggcgcgacttgccaagttgacaagtcgaacaaactgtactactaacatgtttttttgaaaaaagaaaaattacatatggaagcaacattagacatggtttcactagcgggatggcctaagtgagaatgccagaggtgagaatctgattcaaaagataggagaagctggacaaaagatgatgaagaggctggttgcaaacaagatggagaagcacgataaatcccttgatcaagaagacccatgagaaggagtttgtggctgacctggtgtttgacataaaaacaatgagggtaaaattgaacataagcatcattattttgacaaagtttagagacactaagtaaatttttggatatggaaggagaatgataaacttgggaaagaaaagaatcattagcaggtaaatttacataacccacattagagattggagaaaacatactattttcatgtccaactttacctgctaatgattctttcctcaaattgtgtcaagtttacctcccagcacctctgtgatatggctgagaagcttccaaaaggttgaggtcaggggtgaagttgtgggaggcacccaaatccatgtaccagttggggtcatgaatggtgggggaaggagaaggtcgtgggggtggagcagatgtgaatggttcagttgggtatggagagaaaacagtagagaaagcttgtgaattagtatgatgagttagataagcattgaattgtttagaaggtagtggtgaaggggtgaattgaagatttgtgtagggatagcaatagggtgatgtatggcctagtttgaagcaaatctaacatttggggcgataaggggtcagttgtgaggtgatggggaaaaaaggttggtgactcctgttcagagtagtaggtcgagaaggagctagagcatgatggtaaggaattctgtttggcaaggggtttaatggtggataaagaagcctaagtgtgtttttggtagtggatttagggtgttgaagattggaaaaattggcttgaagggagctgagagtagctgtagtgttttgcctgtccaaacatgcatcatagctaagaaataacgagtgaatctcttctatagtaggttttttcaaaactagttaagattggggaaacaaatgcattgtattctgggcctaacccattgaatagataggttatatagtcaaggtaagaaatgggttctccaacagaggctaatatattgcatagagattttaattttgaagataagcaaaggaaaacaaaccttcctttctgagattttgtagagacatccacacttttgacattcgagcaaaagacgttgcagtgcacatttgctccaaagagacccaaatttgcacaacagtggtgaaacccacaatttgtcataacatatttcttgaaagagatgcatataaccaactcataatcagtcaattgtagcggtgccaatttgtgaactttggattcaccatcgatgacgtcgactttgtgtattgcagtggttgtgaaatggttccgtcaatgtagcccttgaattcattagctacgatgatgtttcgcatctgcattctcaataccaggtaatttgtatcatcaagtttaatggagattgcttagttaatagaaggaaatttaatgaaatagagctggttgtagaggatgaaccaatcctaatttgtattgaggatgataatggttcattttggtttgtaagggtaaagtctcctagctgttgtggtgttgaacctatactgatatctgatgccattagagtcgttgtggctctgatactaagacagagaaaataagagtgcgtatcatatttttttttaaaagagcaagcacggtacaagagggtcttatatagagtacaaaaagaggatacaaaaagaaagattcgtctgtaaagtcataataaagtaaacttaacaaacttaaataacaaaattaattactgtttaaaagatgaacacccctacaacatttatgcagtataagctatagtgcaatgtatatatacaatggctacaaccactgtattcttttttaatgttatatatttatattgttttttttatgtatgtgtataaaagatttaggaattggtttattttatgggttaaataatattttaataataaatattatttttgttataatttttagtattataattgaaatattaacaaaatataccattatatttgatgttggtgcaatataatttttagtgatatagttggagatggtttgaaagtggacctccaatatattttttattaaaaaccaaatattttacagtatcaaaacaaaattaaaaaaatttgttgcgcctataaaaaaacaaaacacaaaaaagagcatatttgtaccaagttttaagaacactatttttggtaatggtaaaatatttaaaaattttcaaaaatgtatattattactacaataaacacaacatcataaaagaaaaatgatcaacagctaaaacattttgggctcgtttggaatgccgtattaagtcgtattgtattgtattgtattttatgcaatatttttatgtaa

SEQ ID NO: 162965 - DNA, 2810 bp, Cannabis sativa
caattaggttagatgtgcgtacctgtggaaactccacaactaagtaaagtcattttcttgagatgaggagagaatttggagtcaattttgactaaacaagcagagttaagaacagagtactcagcaaaagttgatgtgtttaaaaaatggtaaatttgtttagtaccatctttactccaaaacctactccttccatctccaaccattactttcatatttggatcgactccaaatttactgcacttgttactactcaaatggttactacaacattcgcaatcaccgcattccccgttgaatatcggcaccacgtgatcccctttctcgaaatcactaaccccttctccaacacactcaacaactctgcaatatttaattattaattaattaactctaaatctaactatttagattaattaattaataatattatgcgagttaattaattacccggaagcttcatggcctagaattcgtgggaacgcgcgttgagattcattctaattataatgataatgataataattaattagttagagatctaattattaataaattgataattaattaacttaattaattattatgtgtacctctcctttccaagcactgagatcagtatgacatattgaagtgaagaggatcttgattctgacctccattttttgaggtggttcaactaaaatctcttccaatacaaaaggctccccaggtccatgaacaaccgcagcttaattataatataattatataaatcagtaaatatatacataattaattgtataattatatggttactggttactagttactagttacctttacaagtgatgagctctcctttggttttgattaggtgcttattgacacaataaccattgccattgccattgataggttgatgatgatgattaccattctccattggttttagctccctttgatctaacttaaccaagttgtgttgtgttttatgtggcctctctatgtgattatatatatatatataacacaccaaatgtattcttctctctaaagtgggtatcatataaattgtgtttgtgtctatgtatatagtgatcatcaagaccctatgtgtggtggtggtggttaataaagaaccactccaatttttttcttattaatttgcatatgttatatctatttaggagcatttgtataatgataaaaataaagtttaaacagttacttatcactcgtataaaaaaataataaataggtgtgcaataaaatattcaaatcttattttcagtaatgtaaactacttgaatttttttgaaaatttacaggtaattttaataactataacgtacaagattttaaaaaaaaatattgaactaaaaaagttttttagatgttgaaacagataagaagtctactaatatgacgaactgatatattaaattacactaataacagtatgccaatttttttggttgacgccttagtatttatcttttatttaaagtgttatatttataattgatacaatttaatataaagttagtcatatatattttaatttaataattaattattatataaaaaaatattaagcatttataatgaagtgccaactcataataactaataacaatggagaacaagatatagtaggtttaacattaataaaatggcccaaaagtagaagaaaaaatattttttttatttatttgtttattttaaagaaaaagatatataatattataaatttaacatgtttagtagccgtcatcatatattaattataatttattttaaaaataaactagaataattttgtgaagaaaaaaaacaatcaaacgtataaaattagatgtgtattaaacattaatttttttttggtgaagtgagatatatattaaatgttaatttgtaataatattatttagaataatatgcagttgtgttgcctcttgtatctgtaactgtaacactacatctcaacttgtctgaatgcatttaattagcacatgaatataaattataatattataatagaaataatgaataaatatacaaataaataaagagataagaagatgacatcaaggatttctatttcattcatcacttttttttttttttttaataaatcatcgcaatcagttaaaataataatatgtaatataattagaacatctttcctatagaaaacacgatcagaattataattaaaaaaataaatcaaataatcagccgcttaattttcagatcggttgacaaaaaaactaaaaataaaataagctaaatatcacaactaatcttaaaagcatatatattcagttttatctactgcttaaaaggcttaacagtaaaaactgttgcaacaggttcattcaacctcgtagcttgagcactcaataacacctctagtcacaataaacgtgttatatttctaaccactaacatcaatatgatggcgagtcattgaagaaccaacaataaaacaaaataaaatcatgtcacacagacacgattaaaatactcaaaatcatattacagagataagactaatcgtagtaataaaaaatgaattgcaatagcaaactacaaccccaaccaaactgcacttatgcccaaaaaaaattgacaggtctgactaaagataaaaaaaaacctcagctataaatttaagaataaaaatcctaattttttaaactagttcacaactcttttccgtttttttttggctaattagtaatttttttccctgaatttttttagccattaaaaatttcctcgaactattgagattgttaattgagattgttaagtttaaggacttt

SEQ ID NO: 162966 - DNA, 1412 bp, Cannabis sativa
tctctcttcaaatccttctggaagccattcttccctaaccccttctttcttttctctcctcacaacccaaatgaattgttgcccagaagcctcgagcccagtagcaatctccataagctgttcatcgttgaaatttgctacacttccaaaacttacataaactacagaattcggtttcttgcaatggagccacttcaagcagtcatgttcttccaaatttagccctttatcgtataagaaaagaggacctatttgccaagtctttattccctgaataacctttgggtaatgatcagcataagctggttcaagttcatagaagctgttcaccaaaatgccatagcttctcaactcaacttctttcattaccttatacatttttgtgaagtgatcagtttcagtttcagaatcttctttaatgaaatcagctactctgctggcagtgaactcgatcttgtctggtaaatttggaataataaagggttcatattcagaggacacatgtttataaggcttagatcgaaacactgatagattacaacacatagcaaaattagaactaccatggaaaataagcctgggaattccatatttggcagctacatctgttgcccaagggaagaatatatcagcaactaggcaatcgggtcggtatagttctaaaagctcatcgatttgtggctcaaataagccactagcttcaaaaaacttgccttgtacttgaggcgtaggagccatgtctaaactctcgatccctttgggaaatccagcctcagaactgggaatcttaatcgtgagaatgtcaactggggtatgtaaatttctgttcttttcaagtgatttggtgagaaaaggtgtgaagtaaggagttgtgatgatggtggatctctggccacgcaaagcaaaaagcttggccatctctatagctgggattagatgtccttgagccatgaaagggaagaagaatacatgaagctggttttgtgttttggttgccatgtctgatttttgggtgagatcagaggttttgcaaatataacttggagtgttaccactatttagtgagcaatttgattcttgaaaatgtctacatgtgttgtgacaaatgtctttctattcaaaaaaggtaggcaaacatagtctactctatgatgtattgtacaatggtttctcttgtcttaccaggaataagtaataaaattagtaaactaatgtaacaaaactagtcaatttttctatttgtttaaatttaatccacagtcaaatttcaaatgccaatacgtcattatagcaggtagcattttgagactaaaggtaaaaatatcatttataagggctcgtttggaacgccgtattaagtcgtattgtattgtattatattgaattgtattttatgcaatatttttatgtaa

SEQ ID NO: 162967 - DNA, 1638 bp, Cannabis sativa
taataataataataataatgtagggttagcattaataatgcatacgtgtgatacttatttgatgactttttaactttattttataagatctctcgtgccacgttcagcaaaacttgtcacgtcttttttttttaaataaaataaaaacaaaatttattaattgaatttattagcttttaacgtatcctctgacttttcatgtctagcattcttagacatgataatttttttatgtccatcaatgttggacatgaaaactccccaagacttttccatgtccaacacattttttactagagcattgctatgaggcacccatgttgcctatacaccacgataaagtgtctttttataattggttaacgattttctatcgtatgtattgaagtaaaacaagtgggattacaccaatatcaatattacatatcacaaggatgctaggcaccatgggtgcccttcagcatttctcttttttcttgacatgaagaaaggacatgaaatatgtttttttagaagtgaatagttattttgacatcttatttttgctaattttcatatataatcatacaccatctctaatagagtgttataaatataatgtatatgtaactttttttagcctataattataataaaatagaattccaataatagtgtataatattgtggactaaatttagtatatgttaaaatattaagccaaataatacataatatattatgggttactaaatttatagttcaataattatcaccttttttatttactctttggccagttactcatgagttattaatataattgattttcttttacattttgtttattatttaataagattttgacatactttgatcacaaatttaaattttttgttaactttttaagttacttttacactaatgtattagaataattgtaaattttgggttaaatatagaattaactaattttttgaactaaatctaacacaaaatttacaccatattggagatgatcttatcctcttagactatcttcaatgcaagatctaaattttgtggtaattttgacataaaaaatgagtttgtgctatatttgacccattacttatcattgcacttcgatgggcataatatttaaaataattaaaaaaataataataattattattgatagtcattcaatattttatggagaatataccattttttattgtttaaataatgataatatagtaaataaagataaagttttataaaagtcaataaatcataataatttttttttttgacgtggtgaacaaagtcacacatgattaacaatgcaacacaccacaatcggttgtggagcccctcgaaccagaatagctcatcgtctaaccgaagggcatgttttgccaaaccatgagctgcgaaaaacaaaatgcaagccacataggacaaagctgtccccggaaatatagacaataaaactataacgtatttgaacaataccccatcaccttgaaaaacaccttccctttattaatagatgtcgccagggttagcgcgactgaaaaaaaaatatcacaacaccaaaccaaaaaacacagttatattagaatgacaaacttcaaaataaatctaaaatacaaacttaaaatttaacacacaacc

SEQ ID NO: 162968 - DNA, 989 bp, Cannabis sativa
tagaccctgctcaatttgttgacaattctcccatggagaggatctccgattagattctgatctctcctagtaattctttcattgaaccaccttatcaagtcactagcttctcagttgtgacagtctagctctgcctaatgcgatcagagaatgtaatcttggttatccctccatctaaaaattttccgtctttgttgtgtgaatgcatcgcaaccaatagtgcgtggttcatcaatttctatgacttggaaagtaacctctctaagttaggctaattaaaaatcttctcccaaattgacatgaggctcaccatcagctagctcgccaattcttggacccttttccctagaatatactaaggtctatagtcagttgttgtgcgcaagggttgctccacattggccaaaccctctgtacgaggttccaatggttgatctacccttggcagtagaggttggccattgagatcagtagggttatagtgtcgagcttaccagttgtattaataagtttgttctgcttaccaggtttgcagggttggccacacccatcaaattcgtggagattccagtggtggctgaaacacaattattgggactagctgtcgtggggttttcagggagacctaatgaggtaggagttccagctggagttctcattattatagccatggtgatagattagatcaatcaacaatgctatcattaaaagcaccaaattgttgacttaagatttggccaatcaaaagtggagtaatatttatgactgatatcaccacgtgtacataataataatatgtaaataaagagacacaatatttttataggggctcgacccccttagttagtcagtaatgacctactccccttatggttgtatggatattacagataataccactcagatcacaagtgttgtagatcccaaagtggctcccttaagattacaatggtaagaatcaagaagcaaatctcaagtaggagagatga

SEQ ID NO: 162969 - DNA, 592 bp, Cannabis sativa
agagagagagagcatggggatcttcaattaatcctgtattggcatggctttccttgagttgtggttttggtaatttagaccatatattctagcttagggtatggggtttgttatattctgtcccagtttaaaattatagattctttctttgcctttattaaagttttgtctctcgtttatgtttcatgcagaagaaacttctttctttttttcccttctataattagagaggctggccattggtacgtacaccactgtgtgtgatcaatttggtgtttttgactaaagattttgtcgcgttaattttcatgcgaagatttatataagctgtttttgtctctcttatttattcggtcgcttgtttatcaagtattgaagttatcctcatgatccgccgtagtttatttattcataatgtcatatgttgacctacaagttacacttaacatgtgtaatttaatttttttatcttttgttcaattgggttcaatttactaacatgtatctctatatcaaattgtgcttttacatgaggaaattacactctaaatttttttatattgtcctcttttatttttaccctattttttaa

SEQ ID NO: 162970 - DNA, 1519 bp, Cannabis sativa
gtatttgacatctcacttaaaaaaacatacatctcagcgacaaaagacagctcagctaccgtaatcctaattaactttgcctatgcagtaggctaatttgagacctaacattggcaagactaaacagaaaaggagtcttctttcctctttaccttccaaaagggaaatactgatatacatgttacagcagaaaaatcacatacagagactagaaactgtgatagttataggaacttattaggttaggagaaaataaagaatttagctttaaagaaaaatccatacctttaggaagaaaagtccacgttgaaatcttgtcctctataccagcaacaatagggtcctacggataggtttaaattcagatataaatgagctacaaatttgagtaatgttaaacaaattcctcatacaaatacaaaaacgcacattcccacccatatcactaaacaatgaacattgaagactatgttagagcacaaatattactaaaattcccaaatcgttacatataaatccaataccttgtagcccaattaagaagttaaatgcgaaaagtagaatttgagtaacaacaaaacatgttcaattcaataatgcagaattttaagaccagtatcataacatattccatacaaatcgaaggaagaaaaaaaaaaggcaaaccttggccttagatatgaacatgccggagctagtacgaacttcgctaagctggctctccccggactcgctatcggcgacagctgatctcttaagttccgatttggcctgtgaacaatgaaatcgaaaattcagcactcaaatactttgatatcttcaaaaagatcataatcaatgaactgctccgtccacggtactcacaagcgagatcaaatggtcgcattccaagtccgtaagaaatccttcgtagatgaaagctctgaaaatcaatcgacgatcgaaaaccgattcattacacgaaataagaaaacaaattcaaaatccaataggagagataccttggtttccatgaaatctgtttgactttagcggggttgatgatggaactggctgaaccagcatatgaactgaacgattcatggaagaagaagaagaagatcgtgaacagaaagaacagtggctgaaccataatcttagtcatcctaagcttggcgagaaaattagatatttttccgggaaaatatcccaattttccttagaagtttgttttttttggatacagaacaccagcgacgacccgatttgttgtcgtttacgtaactaataaaatatttgtgcgatgtacgagcaaggcatgtgtttttttcaaaatgaaatatcaatttcattgaattaaaagcattctgaatgtaagagagcatgtaaattaagccagacattatactcaaaaatactacaactaaagaaaaattgagcatgcctagcaacagcatgagcaacccgatttgctgatcgtttaataaaacgtaaattaacatcagttagagacaacaataaagcatgacaatctttggtg

SEQ ID NO: 162971 - DNA, 1638 bp, Cannabis sativa
  modified_base (1142)..(1151): a, c, t, g, unknown or other
atatatatatatatttattataagttgcagtctttttttctaagtgtggtttttttattggagaattatacatatgaattaatggatatgaatcataaaacatatatatatatatatatatattggcatgtattttttctttctctctgcctgcaaatgttgttcactgataatcaatcatgaattattggtcgtggaacaaagttgagagtagagattcgtactgagatgagccaaatacaaatcaatctcattctttcaagttgatgaaataaattgtaatatagtagtggggtgtgaagacaaattgcttatctgttaaattttgtatttttgccacttttttttcgccttattatcatatagataagcatccagtcgcgctcatttgacaatgttaaatgttattgtcaaattctgaatcataccattcatcaacatcttacaattcttacatgtggtgccagtaataaaaataagtttttcaagatattattatacttaactagccaattaaagattattgtacataaggaattattaaaaggaacaatcaagaccctcttgaataaaaactcatgatgaatagaatatagcagtttgaaataatatgtgtgtgtgtgtgtcaaagtttaatgtagtataaaatgaatgtctcaacaaaagtacatgtgtgaaaaaatatatatatttgatatatatatatatatataaagtacccatgaaagagactttatgtaatttcaaactccgatcgttttggaggtctgcctttttcgaggatcaatgtaatttggagtttccggaaccaggctgtaataaagggtgcatgctttacatacctacttttgctttatagactggacagcagccttgcttaaacttagtactacaaaaacaaggtttattaattagtacttgtatatgcataattaatcatcatcataataatggtttctctacagtcttatatatatatgtatatatattatattcagatatagctgcagcctgcatgtacaaattaatacagaaaaagtattattatgttatgtaaaaatatatatgtatactcaataatagtggaaccacttgtggctagctgccatagaagggggtgtgttagaggtcctggattcgannnnnnnnnntgtaatatataaaagcttaaataaaaaaaaaaaacactcaataatagtggatatattttgacatatactcataattttgagacctgcctcctaattattaatttgaaaaagcgtactgtacgtattgggattcatacatggtacgacaagggatatttatagcactagcaatacttatgccaccgagaagtgttgtgtgttatagttatatatatataattctaaccattttgttatttttttagcagtttttaacctttttttattctgttaactatttcagttaattttcaatgtttaaaaaccacgaagctaatgttatatatatagaggtttactcctagtaagttgtgatggattaaaaattgtatatagattaatttgggaatcattaatatgttttgagctttaaaaaaaaaaactaatattagaaaattagaaatcataaagtatattttctttaatttattcttcttcttcttcttct

SEQ ID NO: 162972 - DNA, 718 bp, Cannabis sativa
ttgtccttccgtcttgattgactgaatcactagagtggtcccttcgctcttttggcttaggtaccttggtactttgtcctcgaggtgtggattttcctctagggttagaagggcatccacgctcgaaagcaccgatggccttctgtgtcctttagggcaggccgattagattcgcatcttttcgaagaggtttaggagcagatttttgtggggctctcccaccttgcctttacctttatccttgtgaggattcaaggtttggacttctgtttgtttgtgagaacattcttcggccattatatccaccaaaggttgatcgtcagactctgccaagtcattgaacttgttttgaaggagttccatcgttcttttcatttttgcggtaagcttcctctcttctactaaaggagcttccaactttttgctcactcgcagcaagtttaggtcatggtcattgttaacgcagattttcgttaaccaaaattttagcctcacagtgataatttcatacagaaaaaatgaaagcagtaaagtaagagatacgaacagaagggatttttttacgtgattttgcagttaaaattcttcatactccatgagtcaatcttaatagatttttgatagttttctcagggcttttcttgtatgattttttttcgtccgtctttctatcttacttgccactatttataatcacatagttggcagttaattacaa

SEQ ID NO: 162973 - DNA, 3363 bp, Cannabis sativa
gaccaaaattggggtttaaagatagttttatattgatttgtaaatataaaacaatataattatttcaattaattcatactataattttaaagaaaaatttatattgctttacaaaaatagaatagaatgttttaatttaacttaaaaaaacaaaagtatacatatatgttataaccaaaaaaaaaaaaaaaaaggaatgggagcaatgaaggaattttggttaaaagcacttaaaaatggatatgttcaataaacatggtttaatacatgatttgcactcataatatcttattggtttatgttaattatctttttggatttgattattggaatctaagtgactccctcactatcattagtggagtctttttgtcttttgctatagggttatgataactttaacaagcttttatttagtgggtggttggtaatattacatttacacatatatagatatttttatactaaactttcttattaatcaattttttattaacctaggatagagaaaaattctttttatttacaataaaattaccatgtgaaatttagaagaaaaaaatctaaacaaaatttgtgtcttttgcttggacctttaatattttttttctttaaaagaaaaagttgaactattgtacttaaagtagtgaaaaaaataacaataaagagaattggataacaatatgtctttctcaacctatcacataattggatacccttatttttcttctacctatatgaagatagttagtgaataaattttgaaaaggacaagacaatatttccttctcattttttagagttaaaaaaaattgaacctttatagtgcaaatgcatagatttgaatttagatccaataagagaaaattttgtaagtctcttgccaaaaaattattcaagtggcctcacattgtggtggaccattttctattgtggaatccaattcttgctagattttatctactatgattctcttatttggaaacaaaacaagaaagaaaacaagtatagtcttgttatacaaaaaagacattgatatatgagaaaattctctcaattattattatttttctctttatttctatttcatctatgatatctagtttttttagaagaatagcctaagattaaccaactaaagagccatatgctctaaaagagccaagaactagaagtgtcattaataatggcatcccctacccctagtatagagtttctctaactataatgtacactacattgtatacacttattacatacaataatatgtattaaatattattccttttatatttttgagtaggaactataccattttaattatatagttgagattaattataatgtattattgtgtatagaaaatatgtgtaatattgaggagtactattgttgttggatactagtagtgtctatcactatctacagatgacgtcttacgattgattaatgatatcccttaaaaattattatctgaagctatatgagatttgatacttaattatactactagcgatatgacaccgatgaggaagttaggcaccaatgtcttttaacatttatatgatttgagtgtctctcaatcattatgcactaaagtttaagagaaacgctcagtacttttgtgaggtgtaatatcgttaccaaattgaatatcgagtgctacttattttattttatattttaataaaaattatagttatagagaatagagaactgagaactgctaactaattatatgacgccacctcatagtaatgtttgacactttaatgtcctgatatgctcaaaatttaatttaaaattattctatataaaatgagaataataatacatgcacatataaaatcacataaacttggactcatcttgaaaaattataattagttaaaattccttattttatttttttcaattaaatagaacttaaattggcagagtaatatgagtatatgaccaacaataagctcctgatttaaattattacttcatccctatactttttttaggactttatccctatactattattaaggaagatatgtaaattttatagggatgggggaccaaaatcccctacaatttttttttttttatttattttgataacttttttaatatttatattagaaaaaaaagacctcaaaattgagaaaattagcatctaaattcccctaaaaaatattatgtacttttttttgaaaaaaaaaaaaaaacaaagaggaaagtaggtaaatctcattaataaagtcaaatcacatgtgtatcatttttcttaataaggtttgactcttgtctttggtctctataatatctcaatttgtatatatggaaagagacatgcacctcaaatttaccctttttcttcttagaaaaacaattaataatttgggaatttattacattggtcacaaaacatatcattgagaagagaaatctaggagacacatatttggtagataattaattgaaaaaaaaaatgtcattaatttatgtaaaattattatttcatccctagactataggatattgataattttctcctctccctttcttgtcaaagcataaagtctataataattcttaacaagtgggaaaatagcaagggaattttctcaacaagttggaaaatatcaaaagaatttatttggtaacaaaatatcatataagaatggtctttgattatatatataaaatgtaattatttatcagatttttttagtttaataaaatattttaagaatataagaatatgataggaatttcctatcattttgggtataatcagtagcaagataaaagaaaatagagccaaacagtagaaacaataagaaatagcaagtacattgatattagagtgacaaagagaacaagtttgctgggtattcgagagacccagctctctcccaagagctagctctctcccaagagctataagctcacttaactaaatcattcccccttttccttttctattcactcatatatataatactaatgcctcattacaattaccattatgccccttttatttaatatcctaaggcctattagaatattcttttaaatttaaagtattagtaggttatttgttttaggttaattgaagttatactaattttagattaatttaaatatataaatattaatatattatttgtaacagtattattttttttattattatttttaatatttgaagtatgctcaattttaatatttttaaattttatattactttcctcaaatttttaaattttaaatactaatttttttaaaaaaaataaaaaattaataagtagttttctttaatttattaaattttaaaactatacataagaaaaataaaaatttaaaatataa

SEQ ID NO: 162974 - DNA, 1053 bp, Cannabis sativa
cactatctcttttgggccaacaacacgcgttgtcctaccctagctagtctaccttaaaacaacacacacccacatatatattttcttttctttcaatatggtcataatattaaataaatatcacatatgaatctcatgtaaagtttccttaaaaataaaataaaataaaatcattataataattatcatgtccgtcaagtcaataaggcaagcctatatttatatcttttttttatgtatttagaaccattacaatactcacatttctttaaataatggtcggtatattatattatatataattatggtcggtagagatatttatttaagcatgcatgcaccttcttcacgttcaaatgaaattaataacaattattagtattttataataataaaagataagttaaagttattagttatgttacgttacatggaataatggattatacatctaagttggtctttcaatcaatattcaatagtcagtttctgaccatattataaaattcacactacactggaccaagctgcctcctttgggtgttgaggaattagcttggtcgaattctttttaaactaaatcagtataacgatttttaaaatattagaaactcaattagactaataaattttttaaaccaaactattaaaaacgatttgatttagtttgaaactacaatttaagtaaaatttataattatttttttttaagtaattgtaatttttaccaagtttttacatttactttctaaagtatatatttaacatgataagtaataagtctatataataacaatataaaagtcaaaacacataatataaaaattcaaaatttatgcgataaaaaacttcacataaaaaaatttaatttttagtcctttaaacccatttaattaaattagataattaatggaaaaattaggtaattaattgtaaaatttattttattagatagtcatatatatgggattatttcataaatacacaaaaacaataacaaaaatacaaaaatacagttgtacaaaattttaaatagggccaagatgcaaaatg

SEQ ID NO: 162975 - DNA, 2115 bp, Cannabis sativa
gagagagagagagagattggttttggattttctatgaaaaattttctgtagatgaagaatattcttaggtaagagtgttagagataaacacttcaagagaatctaacagagaatcgatctcgactgtattgtactctgttcttgctcaatcaataaaaagatttcggtggtgttagagccatagatcacatcactcaattggacttgaaccagtatatatctattctaggtgacagccccttctggtaaggtggtagcaactaatttagaaaaaaagacatgctcttgcaaattatttgacctcagaggtatcccatgtggtcatggcatgcatatggtattcaaaggttcagatgtatgattttgttgctacatgttacaagaaggaagccttcataggcacttatgcacgggaaattgcacctatgctaggtcctaaacgctagctcaaaaatccaatccttccaccaccagaaactgttttacctggtaggcccaataaatctagaaaaagagaagtggacgaacctccccctagtgcaactaaaatgaggagatttggacagtccaacaactgttctaattgcaaaatagtatggacatacaaggaaagtttgtaagaaaccagtacaagaacatgtatatttatttcttataattgatatttatgatacattatccatgtttaagaaccttctgacactaatacttgtttatgaattaggaacctctccagaagaaaaagataggtcgtcctcccaaaaagactttagaccctaaaactataaagaaaaacattaaaagaagaaagcaaaaggcaagagatgcaagttcaagccaatcaccctctagaccaaattagttgttgttctaaatctattttgtaatctacaacatgtttttttgttgaattgtcaagggttcttgtacccaaattaggtgttgatctaaatctattttgttagtagtggttgtttttttgttcaaatgtaaaggacagttcttgtacttaaactttaagctattataatttcatttgtaactattttggttgcacattttatcttatgttatgcattatatttatttgtatacttgttattaatgtataattatacgatcgtttgagtcagatttgtattctttgctgatataatattgaaattttgctgataaatcaaggaaaattctaaaatgtggttttactaacacattgtcactaatatcatttcaccaaaatagaattgttccacacttcaattacatcaacaataactttgattcaatgaaaacaatgctattacaaataatttaattcaaagaaggtaatatcattacaaagtatttgatacaaaaaaggtaatgccattacaaacaattagattcaaaaaaggcaatgtcattacaaactatttgatacaaaataaaaaaagacaatgctattacaaactcaatgattaacactactacttaaatataaaaaatactaaggcaaaaacacaaatagtaatcaaaatgtttttcaagtttttcaacaaccatatatggccacattcacactcatgaatattgctaccgtaagaatcctccccgtccattctaaccttccacgaatgaatctttaaagctctctctcgatttacagaaccctcctttcaattttccgttcgacctattcctctcgattaatttttttttgaactcacttctccattataaactagggattagtttatgattttttataaatagattttagttttgggttttatttatttttaatttagtaatttaatttacatttcatttttattattcaaaagaaagaaataaaacaaaataaaaaggagattaaatcataagcgtacacatgtactgttagtcactctaacggacagggtatgaatgaacaaacaagaaagtccagcttatgaactattgtcgctatttttagagattaaggactaatctatattgtaaaattttagagatgttgtcgtaaattttcctacttaatactacatactaagggtgttcgcggtgcgggtggtgcgggttttgactattttttcaaaccaaaccacacatgcggtttttttaatttctcaaattgca

SEQ ID NO: 162976 - DNA, 4484 bp, Cannabis sativa
tcaagtaagttttatccgaatgaggtttaattaggagaggaagaacaagtcttggaatttgacttcttcttaataaatgtttcactatttttgagatttaattaaaaatatagacaattcaaaattgaagacaaaagagcaacaagagcataattggttggggcagcagcgaaaaggagtccatcagcagagtgaatagtataattcaataattgatttaaagacaggtaaccggtaactaattgctaattaagagagagtactgagacaaagcagtgaataactgaggttctactgttctacctacctacctcttaatttcagctatttcatgaaaattgatgtcataggcatatttttaagtaattgatgccaaattaataaggaaaatatatgggatagactggtctgcataatgcatttaatttgaaagtcatccccatttttataccaaaatatataaatatacatagccacaatcatcacttgattcttttaagtttctgttaataaaaaatcaggctaagtggcactttaaagtgctagtagcatttcaataatggctcaaaattattaattaattatagagagttatagtgttaaacactaagtaccatataggaatgttcttaatttttacaatcacccacatacatgttaatttcaagtttctaatatatttttatgaaagaaaaaaaaaacgtttccaatataagtttttggagggctctattcttataaaataatatatcccacacattcaaaataaaattgaatatttagttctttattatctcagtcatggatagatgattattaaaaattctcaccaaaccgtttaagatgtggggcattgtacaatattgtgtgcatatattatagtgtaccaaattaccaatagctttctagacttgaagctcaacttcattacatgtatatattaatgttgggacccataacatatatataactatgttaatttatgatattagcatagcatatatatatgtttgaagacataatatatattgtattagtttattataatactttggaggtgggaaaaggggtgaagagtgatctatagacagaagacaaaatggacattaaattcaggtccaaagtacaaaaccaaacccaaacgtattgagtactttttttggttttacaactgacaaataattaatattatatcttggaatgtatgagtatgatgcccactttcatcaaaagcatttatcccaaccccaaccccctcatcatgactcttttaaagctctttttttttgttatagaaatctttgctttgctgctaaacaataaagttataattgtcctctggcaaaaagggtcctcattttcagaccaaccaattcaacccaccacatctatatagtacatcatgaccagttagtttaattaatataacatctaatataattaaggaaatttatgtaatatacaccatattttactagacttctttatctatttcagaatcttaaaaaaaatattaattaaatcagatactttacagctatttaaaattacatgtaaaattttaaaaaaattcaaataattaacggtattaaaaaataaatttaaataattatttactacttgtataagaaaaataattatgtacgtatacaacaaaatatctaaatattataaagtgtttgaaattttataaacaaatatcgaaagagcttattaattttaatgacaagtatttaatcacaacaaaaaattacttgtgactaaaacatattatttaaatataaattgtcactactttaattttagtcaaaatgtttattgtaactaaaaatacaattaagtactcacaacaaattatactttttataactaaatattgtttaactataatataaaaatgacaatctataattaattacaatttttatacttttaatcacaaattttattagactaaaattaaataaaaaaatttgtagtgaattttagggtgtaactttaaaaaaaaactttgcctataattaaatttatataatatacaagaagaaattaccgtagctatagtacaactaggtatagctgttatacacttacaggtaggatttggtgaattatttttatatgcaattagtaaaatttgttcaagtatatatattattgtaccttaagtttttcctatttgtgatatggacgacgtgggtttatatatttctacaaatttatacaaacaacattttcacatttcttatacatgtatggagaatacacctcaatatatatatatatatatggtccttatatatatttaaactacgtatgcttacataagctaattccaaatttgaaccagcatatgtatattgtgttaccactaccagaatatatacaaagctagctagtctcgactctaaccctttctggattaaacatttcatttttgatgtgtacagtacaatttgtacaaacattaatatattggttttgtaaagacatgtaggacactatacattcatactaagagatcagagatagagagagtgaattgaatggtggctaattaagtcgctaagatgatatatataagaggatatatatatatatatataatattatgatctatatatatatataaccgaagctacttgaagtggctatagaagagtgcgtgtgtgttggagttatacattgtaatatataaacgcttaaatcaaaaaatatatatatatgtatatatgtgtacgagattaattttgatcaagcatttacaaataaatatttattatggtgaagaagatgaatatatatagagagagatcataaatatatatacaaaaataattatgttgcaaagcaaagagagattactactactactattagtttgcatttgcatgcaaattataaatttccattacttagttctctgaattcgaaaacgacatataatcagcaagatctcatcatgatgatgattatcttttattatgtaagattacatactctattattatatataagtggaaaattatacatatgtatagttacctagcttcgaaacataaatttgtacatataattatatgataatggtatggaattatatatatacttgtgtgtgttgtttctcttgttattaagttatacattgattcaggttgggtaataattatatagatgcatatatgatatatatatatactatatatatatgatgctagttcatagactttgtgactatagctttaattaattgttgtatatactatggattactagctagtgcagtaaattaacatatataatattgctgtgaaaaatgggtctggtgaagtttgacaaaattaagttgattaaagtactagaaaccctaattatattaatgatataaatatatatatacttgaacaaagagaaagtgctccatcaaattagtctataattacttaaaatcaaggatatataatatatgagattcagaaactacatatacagatcaaataactaattaaagcaacagcccttgatttatatataacaaggtcttaacatattaatacaacttttatagttattttacataataataaaacacaaaaatcccagaattattataatcccataacagaccaagtacccccatatattgataaataaatcaacaaagggatctaggtaaaattaacgaaaatacaacatcatcctaataatcaaattaatattctaattaagaagaagaagaagaagaagaagagaaagagtattacttgatattaatactatatgagaagtagttgatttgatttggtggtagcaaatcatcggaccaagatgcttgattccccaaacaaaagtcgacctttggaatataattactatatattcaaacaaaagagcctgagcttctgtagtggtacctaataataattcataatataaagtacaagctagcatatatatatatataccaaaaatatatatatacacacaactagtactatatacactcctcaaggaaatatataagatcgaataacaagagaagaaagactattattcctttgtgctgcctcgttgagccattattaccatcttcatcatcattggtatttgtaataataataataataatgtttactttcttttgataagtaataatggttgttggtgtaatgatgaagatgataagaaggagaaggagatgggtttgaagaagaagatgatattgaacaagtagaagtggaagcaatgatggtgctcgactaatactactcatcatcatcatcatcatttcttttttttttttcttctttttttggtttctggcgttgaatctaaggctaaggctgctgctgctggtggccaaggctgataattatatatcatcatcattattatcattatatatatatatatgatcatcactactaagataattatatatatatatataactatctatatatagcaaaacctaattaccctag

SEQ ID NO: 162977 - DNA, 2113 bp, Cannabis sativa
  modified_base (931)..(931): a, c, t, g, unknown or other
tatgttagttagggtgttacacgttcgtatttttggtaacacatgaactcgtgggttcaatcgagctaccacatatattggatctttggatcgtgtcatgaacacataaaccttttagggtttgtataaatgcatgaacctgtcgaggttccatgttatagaatgcttgtgattatacccatcgcttattgggcattcctatattgacaacataggctcatgggtctatcacgagttgtcgtgcctaatagccattctgactaatcatcgtaaatttgcagtctttacatagggcgcgggggaaaaataccagatcactgcatatgttcgatatatgtcgcgattgtgataatcttctctctatgtcttatttttattctcttttactaagcggcgcatagtgtgcaactagatcttgtctcggtcacctcctcacatgtttctatcatgcaaggagaaaccctatcaggatttttacccttgacacgtcatcctttttctaccgagaactggctccacgtgttagataaatatgagactatactcataattttatataaaaaattcatcttataacacatgcccctagttttacgatgataattatcagtcaaatggtgaaactaccttgagggacaatcgagttgtcacatcacgggtgacttttgacttaacttatcaaggttcgtgaatggcggttggtaattatggcatgtgggttttcaaggtgttacatcatcaaaatccttcagagttcgtgcctatcaaaaggacgtttaatcgcgctctcatagagttgttcgatgagtcattccttggcttcctttttccacatgtcatcatctcaatgcatgtgacatctataaaaaaacacaagtacaaaatcgagacgctcattttttctctcattttcttaagttttttttttttntttttttaaaaaaaaagaaaaactctctcaacctgcaaagcaattttcaaaaacccttctctatttcaaggattgtttaagctccagaatcaaattctaattcattttgagacatcaaaatcgtgcttttgaatcaaaaggtaggttttatctttatggttttctctcttttttctgtaaatatgttcgagcaatcacatgcattatggaaacttttcttgtttagagacacaaaacaatagtctttattctagacagtaaatgaatgaacttgaatagcctgaaataggtacttttttggaaaatgttgccttattgttgaatagacgcatctttatcataatcttatgaatattcgcaagtttttcgttagaacaccttgagtattcgcggtatagagaagaacactttgaatgttcgcacatacatgtagaatttcacttggaacattaagaacaattggactagtcgtgtgtttcttatttttcatatcttttaactgaaattagtaggattccttagagcacacatgctaacttgctaacatcgcaccaataaggacaaacttttcttaaactacatgcacaccacactgaaaagatcttctatctttcagataagttttgttaggttcatttttatgcattcagaaaaaagagtgagcttttagatttaacgagatgaaaagaatttactgatcacagtctattcttaactcatgagacactgtgattgagattgaaaaaatacacaatacattagcgtgtgtctatgtgtgtcgtgtagagagagagagagagagagagagaaagtgagattgaaaataactttcaaattctgttctctttctgttaatctattgtattatttcatgatatataatatatattatgaaaaaaaaaactatttatttaatcctataaaataaaagataattttttttttaatccaaattcaaaaataaatatcatataattgaataatcgaaattagctatattcttttagtttatattatcttttaattttgaatacattatcttataatatatttaatataataatcaaaagataattatccatttaaattattctattttataaataaaataatcaaataaaattcacgtggtgtgacagtcagtagtcccgtgatccataaggagaaacaccaggtaagctg

SEQ ID NO: 162978 - DNA, 1479 bp, Cannabis sativa
aaaaaaaaaactcaaaactttagagagaaagaaaacgaagagcaaaaaaaaaaagtatcagatgaaagattaaaaatacgaaaagaaaatgaaaaaagaaaaaattgattctccgatgagtttggaagatcgaatggtggcccaatgatgttgggttcgggtatggagaagatggtcgtcacgtcatgattgaccaagtctttacctttttttcctttttttttttttcggaggaacgccctgcttcttccttcactctcctcgagagagtgcctaacctcagggcaggagaggatagttttcaaaggcaggcaaggcaaccttttgtttgtttgtttttaattatttacccaaaaatatggttttactctttacaccttaaatttgtgtttcctttcatttatgccctcgaaatttaaagatttttctcatcaaggacacatagttgttagttcttcatgatggtgtgaccccaccacaccacccccatcaaaatgaacaagagtatatactctcttaggcttttaggcttaggatttagcatttatctttgttaacacacagtaaaatagcatgagagagcataacaattattagcatatatttggtataatggcattccgtgatagtcataataagtagaaaaagtgtgtaactgagttgagtatggatggagttggattgatatccaatagggttagtgagattttgatttgggactgagtgagataggagagaaggatggataagtgaaagtgaatgtgcattgttattgtcaactagctgaaataataattatttttaggaaagagagcaaattcaaacttaaataagctttgtatggaatatgtatttattttatcaagaagaaaaagaattgtgagaaaaatgatttgaggaaatgttacagaaaaacatgtggtgcaaagtacccagattttaggtggtgtttggttgtgacttgtgagtgtgaggaatctattagaatgcaaaataatcaaatgaaaggtcattattattgtgtttgatttcactctttatcatggaatgactttctcgtatgaactttcttctcgccaaagtaagagaaattgacattcatgttattagtattatttatgaagatatttttttttgggatattcttataaatactcaaaaaattcaaaaaacgaaattacaaaaaaaaaattggttgtaaataacttttacaattttaaagtttttatttataaagaatatgatgtttttatattatttttgtgttgttttcttatttttttcaatcttattatttatttatttttaattttttgcaaagtgttttcttgctatttgtatgttgtttttgttgcgcagagtaaaattatcatataaaacaccataaaattgaatatatatatatataatgtaaaaaataattaggaaaattactccatatactatttttttaactctttttttcaaatttacggtttg

SEQ ID NO: 162979 - DNA, 1884 bp, Cannabis sativa
  modified_base (1815)..(1823): a, c, t, g, unknown or other
taacattgaagaagaggaggatgaaaatgatggatatgtcaaagacaggtattataaagatggctattactatgaacaagaccttgatttggttcgagtatccaatgagctacacaaaacccaggaaaaagttagttcgtcaagagaagctttctgaagatggaaaggatgatggcccgcctccaagaaaagtttggagacctagaagaggattatgaagaagattccttgttggaacttgtcaacagaaacaatagagaaaaccctagtaacgctaaaacctcatctcctgcaaaggacaaagggaaggcgaaggtaagtgatcctcaaagcttggcagctcccttacctcctagaaaaactgtgaatccatccaaccatcccttacagatgtagaaggccatcgatgcctccggcctcggacgcccttctaatccaaaaggctaagtcatgcaaaaagggcctggtgcaaaagtacccaggctcaagggaaggaaaaactacccaagtgattttattaatcatgacgatgggacagtgggacaatactctgatgacagttggcccaccatggacttccgaaggcatcttgactctaagtacgaaaaagtcgaggccacgtggcaatgatcttaggaaccatctaagtcataaagctcgtggatgcgacattgcagacagtgacaaaaaggctggaggagcaaattgttgcgctaaccaaacttgtcggaagcagagtggggctcgcttagactcaaaagatgaggacccaaaattgtgtatcaaatagatcgcagaagcctcacttctagagaactgaagatgccacaaattgaggtttacgatggccgcacggacccgtgaacccacctgttaaagtacaacaaaatgatgcaggtggaaagagtgagcgatgatgctaagtgcttgtgttttttattaacacttaccaagtccgcggaggcttggtggaaaagactggctcctagatcagttcatagttggaaagaactacaatctgctttcttgaagcagtttgtagcggcctgagactatgacatggaagttgggtcaatcaccaatgtcaaaaaacaagcaagtgaaagcctcaagaacttcattcaacaaatgatggaggcaaccgcaaagacaaaggtgagcggcgacatgaaacttgtagcccttcaatccatactcatagttggctccttgttattgggagagatgcaaagaaagagggttgagactttgtttgagtttatgtccaaagcacaaggtatcataaatctagaagatgcttattaacatgctttaagagttcctccagctctagctccttctgcatcctcacaaagcttcatcccgcaagtcccaattcctagaacctagtattctctgactgtctatggaccttctacatccagacaagcacctaccaaactcatttttctgtgtatggagcaacacaaaccggatgtagtattgctcctagacaattgaagcaacaagcagaagttccagaatagaacataagccattctaggagtaaatggggtggaaagaaccagaatcaaagtgagactttgaaaaaaccaaggaaggagtatgaatctgaattctttgagtacaccaacttaattaatattcgagagaatgtatacaaagcaacctgcaacatgtccattactggaaactcctaagaatgcctctgggaggcaagcacgaaagggaccaaaaaaaggtgttagtaccccggagaggtagagcaaactactaatgagtgtggctacttaatgttggaatatcttttaccannnnnnnnntttactaacaagtatgttttttaatatcataatatgaatttctaaaacgatgaaaataaac

SEQ ID NO: 162980 - DNA, 6041 bp, Cannabis sativa
  modified_base (3983)..(4000): a, c, t, g, unknown or other
gagataatcatattaggccataaataatggaaattatttaaatctaagccctagtttttattaaccgttaatttctttatcagtttaattgcttattctttcactgtttttttttctagttttaatactttcttaatttttattcaaccaagttgaagtgaaagtttaattttaacgtacttaactacaatcctcgtggatcaacctcactcttggtgagtttactacttgtcacgacacgtacacttgcgtgttgaaattatcacaacaaaagctgtgaataggcctatgagcccataatgccaacatgactcggcatggggtaggagggttccaagaataccatcttgggttgtgaatccgagaatttaacctaatgaatagatcctagaacctgttcatcggtgctcgaagtagctgggactggggagattatttggggatgatcaggcttaataactctttgagtaatggcacattttttgtttgttgtggtcatttttgctctcttcaacggtttaggtttcgttctcgaagaagtttccgaggcagcaatttgctttttaccttccttggaaccttgagagcttgagaggaggatttcaaaatctatatctgcgaggcaaaaagaaatatgtcaacacttgttcaaaataagtaaaaaggagattgagcaaaatctctcactaaaaaaattaccataatcatctgatgataaggaagaactataataattactaaactccctagaaccagtgatcgtaaagagatcaaatatgtttaaaggagacaagtcccagtctggattgcttgccctatcaaaattagtgccatactgttcaaaaattctgaagtagggactattacagcttaattatacatggtgctcggataccaactatcaaacaaatgggctatgcagtctacacaattttagatataaaaattgtattggctatccttaaatttaactaaggaagtgcacttggtcctaagtactatgagacaccatccacaattattacctcgagatgcttcttcttcagcttcttgaggtgttgtattccttaagaaatggatacgagccacataatctttgtcttcctcgtcagcagagacatgaacctactgccacttagaatattttgggaatttgaagtcgcaggtagcttgtttgctgccgaggagattgcaggtcttcaatttgatctcgttcaataaaaaattagctaatcgtaatccaaatggaagaactaagaggattctatgtcgtttttccatctgtggagtcggaataggcatcttcgaacctgctatcaatacaataagcaaaataagtaagtgcctacaatcaataaattgaaaactcaaaaccaagtttttgagatgaggtagtacttacgtatgataccaaatgtagttgtattgattggggcgaggctaggcgtccagaagaagtcatctttaatttcagtcttgttgggtagccctttgatcattcgtgttggtcccaaggtaataaaaccacttgctcctcgcttccttgcggaacatgcttttatagagtaaaaatataaaaacttctagtggggttgggcattcccacccaaaaatttggtataaaactttcaggcaggccaaaattctgtatgaagttggaatcagctgaaaaagggtaatttcgaggtaattacagaactctttataatagtccttgagagggagtactgcttcagctcttatttgttcgaggctccaagcgccaatcccagatgactagctagtacgacttaacccaaatatttataaactaaataacctatgattctccttagccctagaactatccaaacaacaaaaacaaaattaccgaagaataaccaaacaatatagaaagagaaatatcaatcaagaagaagagacaacaaatacataaaagaaaagcattaaaaatatgggagtgaatcacttactgtcttgctaagaatttctgagcaatagagaactttgcaagtgaaaatttgaagattgagaagctgggtccttgcaatttctagaaatataagatcagtcagatgttatacgcaagaaaaatataagagacaacgagggcatgcaaggttgagaaagagcaatcgaaaagaatttatccagaaaggtttaaagatttgaaacgcaaaaattgcaaaatgaacttttacttccaattttatacccaattactgaaaactatttgatcaaaagaaatctaatctaacggatgggaacattgtaaatgggaatagtcatagcattaaatgctaatgatgtgcctcgaagttctgaaccacaaaaaactcaacgcatgtaatttttcaaaaacaggttaatacgaatatactcctgtaatcatcttaaaaagtacttttatggggtatttgttagattgaaattcggctatgtgccagaagctgacaagacagaacgaatgtgaatcaactctagtaatataataatgatgtatcattaaatgtaatttataataactcatccctattaaatataagtttgatagataatgttcaaacttgtgggctgctcagtcttatgcgagataagaataataactattaaactggtattgacgagacataaatctgcttcggaataaactcatttacatgcacaagaagaggatactctcctacacgagcagactaaatgtagcaacacacaactgcctcgcgttacacgtagcgagaagatcacctcgcaatcctaatgtcaatgaaaggttacagcgagatgaattatcttccaacacttagcattttttcctatcaagatggacaagaaggataactcttgtctatcaagacacaaccttccaagtcagcataattggctaataaataaaaataaagagcagttgggtggttattagatattatcccatgtgtggttaaatgaaacgtgtggattatccacgtttcatgaacaattatatatgaatcaatcccaaaaagaataacgaccaacctacattcctattaatatatacaaaaaaataaaagggggtataaaccgttgggtataggggtgaattttcttttttaaattcctgtttttagtaaaaatcgtcgcctattttttaagctactgttaaaaaacatcgggaatactcattttttccgatggtttgaaacagttgcttaatttttttagcgacagtcttcgaaaaaaatcattctcaagaccgtcgcaaatttggttatttgtagtagtgtcattactacaaaaatgacttttagtgatacacaatgagtgactctaaatactttctgtgtcacttcaatgcatgtcactattgtaggtgtcaagaaaaatactatttacactctcaaaaaaagcgtcactatataattttcttttttattttatatgtatagtgttactagaaaagtgacgctatatggcctatgtttttttattaattccaaatatattaataatgttatattattattattattattattattagttataaatattaaatttagttaaaataatatttatttctgatgatggcaaaaacaataatataacaaataatttattcaattacaggatacaacgaatgttaattttatacattcatttctttttctaaagacttaatttacaatgaaaaatttcacagagaagagcatttacaaaatcgagaaaatacattaagaaaaattgaactaaaacattcaatttaattacataataaactactggacaattaatacaattcccaaaccagaatagttcaaacttatcaaaaaatttagataaatgtttcaaatttcttaggcccgtcgaacaacaagccccatcccacttaaatcacgaacccagcatcccgtcagccaccaagccttcgaacatagacgggcgagatctgctcgagcttcaatgtcgtccacctgcataagagagacagagagagagagagnnnnnnnnnnnnnnnnnnagagagagagagagagagacctagaaacacaaataaaaaaaagggaaaaatagaaagccatatacaacagcgactttattagcacccacgactgggggaggcaaagagaagacaaggtgcagagaagtcaaggcagaggttgagacatgagtcgttatctcagatttggaggttgaaccgctgtcgtggtaggcggagaagttgaggtaaagagaaaatggggtttaggttgcaggttcattagaggttggctgaggtcgatgatgaagacccaaagacgcgaggaagagagagggattgcagaataaggacttagagttttttttttcttttaatctgaaatgatttagggcttttaagctttgataccattaagagaaagaggggttgttcttttttatttattttattttatatttttacttatttaagtacagccaaaaaatccagctgtatttataagttattttacatatatttattattattatttagaagaggaataaataatttattttttaaaaaataaaataaataattacattttagtgatgtgcttggcacgttgagatatgtttacccaatcacacttggcgtgtcactatagatcaacattatattttttcaaaaaattatagaaattatgagacttaccatttagtgacacgatatctatatagtgacgcgctaggtgcgtcgataaatatttatacccaatcacacgtttggtgtgttacgatagagtaatattttttaaagtaataaaaattaaataattttggattttactcaattgacacacattacaagagactaaccccaaatatttagagtctaattatgcatgtcactaaaaattactcttaactctttaatgacccacacttttgtgtgtgtcactaaatagtgtaactaaaaggctatattgtagtagtggtgattcaaccccagtacacgtatttgcagaatctacttcactacaaatgaaaatttaagatattcaaactcatctaacatgcatattctacccatccaataacagtacaattaatcgcagaacctactttattacacatgaatatttaagatattcgaagttcaccaaatatagaattttaaagttttagtgattatacatttctcaaataaagctagctacttttacgctcttcaatcaacaccaagaacctaaacctaaaaaataaatttgaaatatgcatcaattattaattgagattaatcaatttacacaaattctatattatattacataaagtacttatccaattaaataattatatgccgagaataagatcacttggaaaaacactgataaaagaggaggacttcgttggaccaacgaaaaattcaattaactcctaaaaaaaataaacattaataatttaaaataagtaataataatagaacttttcaaacacattacatacatataataaatatatgtatatatataaaactatagattacaccacatatactaaactttctttacatataacattaatacattaacttaaacaaaatcacataacataaattttttacctaaacctaaaaaaaaatagacttacaaactaattattctttccacaaacaaattaaacaaattatttaattacctaattctaaaaaataaaatatacatatttatatattcgcttaaatttctacaaatatacaataaaaccaaaaaaaaattatttataaattaatttatctattaatttataaatatatatatttttaaattctaaatatttagataaacaaatccattcaaaaaatataaaaataattatataatttgaaataatatataaataaataaatacataaatatatatggaaataaatatatatactgtgtgagaaggagagagcactgaggcggaggggagtggtggcggtcgggtcactggtggtgggtggtggatggtagtgatttttgtcaaacgggagaagcagagagcaagagatagagatagagagagagagagagagggggggggggggggggggg

SEQ ID NO: 162981 - DNA, 1843 bp, Cannabis sativa
gagagagagagagagagaggctgacgatttgaaaatgtatagatttcaacaatttcagaactaaaaacacgttatattggagcgagggaaaacatattatttgaaaattttcagattttaactaattatccacggttaaaaactgtggcctataacactacacgcaatgattttaaatcgtggcatatactagctatatgctacagtttaaaatcatcgcctattatatagggtatggtttaaattcaatactgtattttgaaaaatggatgtcacgtttaaatttagtgaggtccaattatctaggaatacgtcggacttcgttgaaaaaagtgaaaaatgggttgaatcgatcccaaaatcattgtttgactgagctaactcagttgctggcagcaacactctggtagctactagagatgtgtcgaacctccgattgatgcgattcttgcggcattggattcatatcgtcaagagcttcgatttaatatataatagttctatatttggataaaatttaatttgttgtacgtggaagtaataaatagcaatatatgatatatcataaaattaaatacacagaattacatggttcaaaaatttgcctacttcacgggaggcagctaatattattaatctgagtagaaaatatacataatacaaatacaaatttctcactaataatatctctcaagtgtttcccaaagtgtttgtcccaaactcactaaaatactcacacttactgagtatttcctctctccaaagttttgctatataattgttctctctctctctcagattttccactaaaccagattgcaaaaccaattgcagccaattacgctaattgctaatgagcttcatatttatagaagaaaaaactcatcttccaactatatgtaattaataagaggtagctcatctcccaactatatgtaattcataagagataacttatcttcctaccatatataattaatgaaagagcataagtcaatagctatttcatagcttcattcacaaatgtgacaaacaatataagtttcaaatcttttaattattgaaccatatgttagcaacttcaaaactatttgactttaccaaatacaacacaaacaaggttgctcaatattgcctaacaagtgactcttgtttttcctcatattgtgtttatacatgttttaatgctttgactaatgtgctgaatctttgtattttggacatttcaagttaatgaaagtctaatcattatttttttaataaaaaaaaaactatataatgagatatcatagatatttcattttcgttttagctaattctacattcaattttttttttttttttaatttttggctaatgtttttgtttgcttcctttcactcattcaagcattgtatgtagaattaatattgtaaatgttgggattaaaatcacttaacctctcaagtcagtatgtccatctatttgctcatcagatgaatctgaagaaacctgctgcaatttataacagttggctttaataccaacttaaaggggactcaccagcaactatatataggggttatttcagaggtctgaggggagagatctctattctccaatgctcatactttagattcagtctagagagagagtccaagatcatagtgagtgtgtgtagagggatgtaaaaagagagtatcactcttgaagtgattttcctcaatgtgaggcatttcttttaattacttactgtgctgagttgtaatcttgggctcattctattgtgtactactcgctattcctattcaatgaagatccattattgagttaagttttctttttcttatttcaattaagttta

SEQ ID NO: 162982 - DNA, 4354 bp, Cannabis sativa
  modified_base (3106)..(3108): a, c, t, g, unknown or other
  modified_base (4290)..(4318): a, c, t, g, unknown or other
ttagccataatcacagaagagcgaattgatcccgacataccaaagggtgaggggtggactttgtatgttgattgggcatctaacagtgaaagatcagggggtggcataatcctcataagtcctaacaagtttaaggtacacgctgcccttatattcaagtttcctgcatctaacaacgaagtcgaatatgaggctctaatcggaggattgaaactcgctcttaagatgaaagttgagtatatggaagcatttagtgactcacaaatcgtggtttgtcaggtcaacagagagtacctggctagaggaggtcgcttggccaaatatctttcttatatttgtgagctattataaaagttttaaaagatagttgtttgtacaatagctcgtgcttacaattctcatgcagatgctctggcccgattggccttgacaagagaagctgaattactcgatgtaattcctgtagatgcattaactcacccaacaatcaatcgagatgaaatgattgaagttgatacagtcaaaagggtcacctagatgaccccgataatagactacttaaaaataggaatgcttcctgaagataaaactgaagccaaaaagcagcgatatcgagccactcgatatgtcatttatgacgacaaactctatcgcagaagctttagttagccgttactcaagtctatcaatggaatagagtgcgattatatactctgagagtgcatggtggaatctacgacaaccatggtggtggtaattcccttgctttaaagataatgaggtaggggtattactagccaacattgcgagcagatgcatctagcttcgttaaaagatgcgacaagtgtcaaagaatagctacttatgtaaacagaccaccaagccaatttaattctatcacaagtccctggccctttccggtctagggcatagactaaattggagaattgctaaaaggaaaaggacgggtaaaatacgtcgtagtcgctattgattacttcacgaaatgggctgaagccaagcctctagcgactatcacagccaccaaattacgcgagtttgtctacagcgctatcatttgtaggtttggtatcccttataagttaatttctgacaatggtaaacaatttgactgtaaggagatgcgccaactatgcgatgaattggggatttaaaaagcattttcaacagtcgcatatccacagagtaatggacaaatgagggcagttaataagatcattaagcataccatccaagggtcgaagaacatgagggcacatggccagaagaacatccctaagttatgtggttgtataatacaactcctcgatccacgactggagaaactcccttctcactctcttacgggtgcaaagccatggtgccagtcaaagttggagcaggatctctaaggagagatgtttttaaacttagtagtaatacagaaaatcagttgttagagctcgatcttctggaggaaaagtgcgatcaggctcatttgaaaaatacggcctatcaatagcgaacagctcgttatttcaacttaaaggtgaaagaacgaagtctgcaagtacgtgatttggttctatgaaaggtcatgccaaacacacgaaacttagcacatggagtttttggtgaaaacttggagggaccataccaaattgctgaaaaaaattggtagtatgacctaccgattatcagacctcgatggaaccgcgatcaaaagagcttggaatggcaagagtttaaagtattattatcaataatactcgcattgtaattatacttagtcaatttattttgataaatgtcctaagtatagggggtatagcctacctttgtactattgattattataatgagattttcgaagtttttactttttctcctcttatgcaagttttacattctaagttattacaccaagctgtaatagtaaaaaaaattgcgaatagaaacaataaggtaaaatattaaaagagcagtttagattatgcaagtacacctgtaccgcttaacataaatatgcaaaagtaatatcctcgaaaggataaatattgttcaaaaatgatgaagtcaaaacttgtttgaagtacaaagcgcgagtacccatgtaccgctaacaaaaggaataaaaattcgacaatcatgaaagggacttagataaattaaggagctggagtgacagagtcatttgcgaccttacttgcagcaccatcaatgacttcctcagtatccatgttctctgcctcctcagggaaaaggtttccaccgcatcctttagtttgagtaggcaacatagcacgaaaagcctcagctattgtagctgcttccaccccaagaactgagaaatcgaagttaggctatttggataaagtcgtgtagatgcagtcagagacagcctgatggaactgtctcttcccatactccttgcgatcacgattcaattcctcaactcacgactctgagagcttggctttatccttcgcctacttagccttctcctctgcctgctctttggcctttccaaggtcctcgatgtctttctccctcgaagttgcttccaacttcagtttctgcacattgtcctgaagaagggtgttctgcttcctcaaaagatcgacttccttgttacctgcaacgaaagccttcgagaaaatggcaatgaactgtgaggccagttctgcaaagcgtgaaatcaattcctcgaaaggagtcccatcaaccttggacataaactcctcaccaactaacttatcttagagagttatgatattgcgagctctaacagcggggtcaatcatgaccatcttccccttgtcttcggtaggtctgtcctgcttcttagaggaatcagctgtgggagtcacgacgacctcactcttcctcttctgcgggataataggagatgttgtcgcagttccaaccttaggctttctgttgaggattggagcttgctttaggaatgtcattactgcaaaaaggcaataagataagtataattttttatgttataaaataacatgtacatactcgatatactaactgatgttggtcttgatgtttgtttggatagacgtttgtctattctttccttttgtttctnnnaaggctccttgtatactggctcccgctgaaggctggagttctcaggaattagcttgtgttctcgtagtttggtagtcgtacacagcaattgccaatcgcgatcttgaacaggcaagctaccgagaacctcgacaatttctctgcgagcatggtttagaacaggttgagccggcctatctgcgatcaacaaaagataaacattaacgactttacaaggtaataaaaatacactaagtgttgagatacgcgacgtactaggtcgacgattgaagtcagtcctaactcctggtactttgaacgcgtaaaaccacttagatttctaatctcccatattcgaaaccatgccttctaccccattaatttcaaaattttcccatttactaaagtagtgaaagccattgatatgacctacgttttttatatcataaaagtaactaaagtcctccatagtttgctccctttggacatactccatatacatcacctaaaatcctaaaactatgcgataactgtttggggttagttggaagtgagagacatcgtagtgtcagacgacggctttaacaaagggatgaaagggtaaagataccccacagcgaagaataggattgaaacaaccacgtcttgtgtggggatgatcgcagggttggtaaaggggagatgaggtctttgagatgctgaaggatgcatggtcccaagcagcaacaaattcaaccgtgcaaatgtatgcaggtcagatttggtaactcacgagactaggtcctcgcatgaaaagggtttattcagttgagcatcgtcaactgaattagtttcactactctcagcattctcctccatctccgactcgcaatcaggaatctcaaagtcctttcccatttctttgactttagtatcaggggcatgccccgagtgagtaaggtactctttgtcagacatcgtagattcactatcgcgaatctcaatcgtccctggttcaccgatttcttaaaccatcctatctatctcatcagtagatagtgaacctagacgcacagcgctgtcgacaggaacctcctcctcagaaatcgaggtgggtatgaagttgttgcttttatctagttcattagcaaaagccccacctccaaagtcgagcatttggatatccgagaattcgctcatatgaaagatagaagatcttttcannnnnnnnnnnnnnnnnnnnnnnnnnnnntgacctcacccgcataaaagaaattcagaaaatatg

SEQ ID NO: 162983 - DNA, 1626 bp, Cannabis sativa
agagtgatgaagtagattgagtgaagcaaataattgaaaggaatgaaattggagggtttgatgatctaataagtgggttttgtggagagatcataataatagattcttggcgtgaggaattaaggactatgggtggtgaggggcacgtaaggaagggccaaacgccagcatcaccagtagttagtgacccaaagtaaagcatcaaataattatatacttgattattattcattttcttatttattaatttgggttctaataataacaataatacatgaatatggattttgtgggatttggttggtaaaattaacgtgggctgtgccttcctattctcaccttcttgcttaatttctggcttagctaatatctatccacatatatatatttccactcctctttgtgtgatcttaactcttctcctactactacaactacttctccacctctcctttattattgaaattccctatatatttttaaaaaataagtcaaattatgttttgtgaatttggtcatgaaggacaaaatacatatatacatataaatttatatgtatataccagctttgaatcaaactatatacatatgtatatgttcattattagtttacaagtactttatgcatgtgggttttgcactttacacttttatattaacataatattattttgcatacgatcaaattctatccccctttcacaatttcataagaatatattgtaattaatgatattacgatcacatcatgttttaaaactatataaagtgtaattcatgaacttttttttaaaaaaaaaataataataaaataaagaaagtagttcatgaatatattttgaaacaaaggtatagttgttaactaatttaaatttacttaaccataaagtaattcaatgaaacttatgccaatattaaaagtgaaattaattttttcacagcattgaatgaagggaatgaaatgggatcatgtctcacatataagggagcataagactattctattatccattggaatttggataatttgtactgattattatataataatgacaaaaaaagaaaggaatttcttgcggagtgatgagtgagcattgattaatgatattaattaattaattaattatctaatgtatgatatataataatataatttgattcctgcccatatggccatatgtttactggtcagctccctccggtactaccacactcttacattttggtaatgacataaagaatgatcatcatataaaagattatgacacacttctaattgattgttttagttaattatttatttaataattttgattattaaataattacttcagctctttcaaaaaaaataataaataaataaaataattacttcaggaaagtaataaaccagtgtactatagttttcctcgttaatttgactttccaattaataatatatttttttttaatgaaaattataatttattagatagataattccgctaaaataataggttgaattgcagaaggaataacattactctcagacggtcagaccaataacaagcaccacgtgccatacagtgcgcgactttgttagcaaaccgtttaacatgataaatgttgagtttggtcactaataga

SEQ ID NO: 162984 - DNA, 1152 bp, Cannabis sativa
tataactacagagtttcattattgatttgaatcttggaaaggccattccaattcgatttcaaaccatggaattagggcgcattcattatttaacctataatttatgtgtaattattttagttctttggcaggtaatcaaagattttgcaagtggcgaaataaagcaagcgtcgagcttgtttgattgtgatgtcgaacttgaggagtacttgatcaagagctactacaaaacagcgtccttaattgctgctagtaccaaaggcgctgcaatttttagtggggtcgaaagctatatagctgggaaaatgtacgaatatggtaggaatctcggtctgtccttccaagttgttgatgatatcttggactttacacaatcagcagagcagctggggaagccagcaggcagtgatcttgcgaaagggaacctaacagcgcctgtaatttttgcacttgagaaagagccaaaacttagagagatcatagagtcggaattcagtgagactggttctcttgatgaagccattgagttagtcaagagttgtggtggtattgagaaggcacaggagttggcaaaggaaaaggctgatgttgcaatccaaaatctgcaatgtcttcctcagagctcttttcgaagagctttggaggacatggtgatgtttaatcttgaaaggattgactgacttagccaaatttcaaacctacaaaagctctgatgggaaaaccattattatagaagaagaagaaggtcctctggctttgaggaacaagtatcagtgagtcttcttctgctgatggcaagctgcttgtgactgtttgtacatttatagaaaggggtagctcattatattgtttactgaaaatacatttttgttgcagaattgaaaaaaaaagtgaaaaaaagaagaataatttctaaaattcttgtagaataaatctccaaggtaataattaatcaataatagtgttcagccattttatcaatccagtaacttgttatatcttccccatttttctccagcattggatgcattaatcatatagtgaggaaaacaattttataacacttggggctagctcaagtggccataggtgggtgtgtgagtgttggaggtcctgggttcgagtcccaggtaaaacatgttgtaatatata

SEQ ID NO: 162985 - DNA, 3783 bp, Cannabis sativa
ggttgcccatgccgctgcgagcccagccgtggccgcggcgaggggtcttggaacccccaaaataccatttttacattccttcaaaaatcaaccataacttcataccaaacttacccaaaccatacataacctcaaattcaatactacactaattttatccattatttacagcaattctaagctaaaacaaagcacaaaatcactttcacaacataccaaaagtatgccatacaaataccacaatttacatacacttgcacaagttaatgttcaaagcttcaaagcttccaagaaaacccaaaacttaaagcctttttccagaaatttatcaacataaaacaaccctagaatctcttaaaatagtctaaatgcatcctacatgatcctaacaacacaaacacactaaaacatcacaatccatacaattcttaacaacatgcattcaattacatatgaacatcatgaacagctttggagagcttcaaataccagaaatttaaaaataagggtcgggtaagggttaagaagaactaggaaatgattttccaattttataaaaattgattttttttttgaaaatgcattgtgtggtcaaatgaccaaaatgcccctaaggccaaatataaccatactcatacaatcaagggcaatattgtcaactcaatcacacgtacataacacattaattcaaattttctcatttatcataatgccataaataaatcccgaaaatatattttgggccctgaacccagttcagtctaaaatacctgattgtgactataccgctctaacttgtcagaaaacacatgcagatagacagaataaacataatatataataatatagtccataagcacgatatatcataaaattacgattttacccttctcgggttaaaattacgaaaaatgcccctaacacaccaacgaggtcttaaaatgcaataaaccaaaatattttcaaatattaaattatataataatataattcctcattaatagataattaatctagttagggttgctaatccgattattaaaccttagggtattacaatcaccttcaataaaacagtcataactcactcaatattgatccgattgacgcaattcaacttaatttttgaagctatttcaatattttatcaagtcatggctcacactttaattgtaattttgaaactatcagcaccaaatttcactccaaaggagttacaaaaatatgctttgagttacccacaataggtctcgtcagacttcaaaaaatgactatcaccaccagaagctaattttcaccattgatcatcatctacaattaaaaacatctactttttattttttttcctattttttgggcctccttcacctataaaggagagtttcctagctcatttttcactttcagaaaaactagccacaagatcaaagcttctctctctagaaattaaaatttttgacacatagcctatttctgtaatactatctcatgagaaataaaaactcgaagtagatgtagctctattactgtcgcgatacaagaagtgaactactacaaatttattgtgtctctcttataattacttaaaaactattttattctcgccaatctagcaagtaggtgtggcttaaaagtctagtctagatttttgagttaacagattccacaccctatattttgacaatattttaataatttaacattataacatacacaaaacaatagtaaaaccactataaacaagtcattcacgattgttctttttgttgtggtagtccaacttttatttgggtgcccagttattatatatccctataatttctaataaactgcagttacataatcaagaacaacactaaaattatgttgaatctcgtaaaatttaaagaaaattattaatagagtacttttttcagtaatgatgtatatgaatatataatttattctagtggtgtttacggtgtggatggttggggttgtggcttttttctttcaaatcaaactacatatgcgatttttgtaatttctcaaaccgtaatcgcaccgcgagatcttaaaattacaaaaactacaccgtaaaaatacagtgtggtgcgatgcaatttgaacagtttatactattatagttatcaaacattataatgaaaatttaaaaatcaatctaataaagtttaacaatacaaaaaaaaaaaaaatcttattaaaattttagtatcataacatatactaatcatcaaatcattatattggattgtctctaaaaaataatataatatacacatatattacatatatttgcccttatatgaaaaaaataatatatagtgcggtgcagtttgaacagcaattattaaattcaaaaccgcaaatcgcaccgcaccgcgcggtttagtaaaaatacaaaccgcaaccgcaccgcaaagaattttaaattacatttttctgcagtgcgagtggtttgtgcggtgtgagcggtttgatgaacacccctaatttattctatcatgaatatatataaatgaaatttcaaaaattgcaaattgtttttataattaaatttgagatcaatatatgagtagggatgaacattttctccatgcgaatggggccctgcggggactagctccttatggggtggggattccccgtctgaatgggggatggggcggggacgggagttactttttgttcccgaatgttaaacggggcggggacgagaatcacgcttcccgcccctacggggacccatttagtattttatcttatatttctaataatattttataatttgtaatttatgtttgtattttttagtatattagtatcttttttatgaattataaattgtgttttggataataattagtttattgaataataattaatgtgtaatattttaattttttatgtagtttaatatttttttatattaaaaattttattataaactttatttttttattatgggattcctcgcctccattaggggattccccttctaatccccgatgaagaataagcagtgatgagaattaaaatttttaacggggatggggacgggggagtattctccactaattccccgccccgtgtgcatccctatatatgagcatcatttatattcttagatttatggggacggggggagtattccccactaattctctgccccgtgtgcatccctatatatgagcatcatttatattcttagattttaaaagaatttgtgtgggtttgagctctttatacctttttgatcagttgatttctagtattgatgaagcttttgagttttgttttgacgtcaattttaatgtttctgattcatctagccaaaattaatagttgtttttcgactgttatggtattactctggtggtttcgatgatagatcttgagaacgaagcctttctgttcattttgacctttatacaatataaaaggaagaatatacatttaggacagtatatttataaacttttagtgtggcaatataaaaatgaacttcctctttattttcagtatatttgtatctcctattttatttggaattattacatagaaaatataaagtgacattttatttacaaaattacctccataaggtaaagttaacatttatatcttttatgtaattttaattaccaaaatatcacttatactatcatcacttacattatcagacgatggttgcagagtggttgctgcgtggttgcatggtggttgcatcagacgaaggtttcaatcagacgatggttgcaggatggttgctaggtggttggc

SEQ ID NO: 162986 - DNA, 2989 bp, Cannabis sativa
ctctctctctctctccaactttttgaggagtcttctactggaaatttcccatctacttgcacttctcataaaagctttgttatcttctgttctgtctttctaagtcaattaactgttaaactaggccattgatctgaaagacttccaactttttgaagccatcttatgctaaaaatatcataatttgtctgctatttggtttttccccctcattaatatgagatgttgttcttaaatccttgtttgatttttccaggttgatttcaccatttgaggataagtaaatctagatttgcagtggtcaaacttgagttgggtggactggtcagctcaagtttaagcttttggtttgtacttgaacaagttgtgatgcttcaatctcagcttggggactctcatggaggtttttgatacttctcctttaacattattaatcttttctccgttgggttggtgcagattttggagttttaaaagtttgtgtttctgttctcaagttttgatcttttgcataggcgaatctttgattccggtgaggttatagattatttagctgtagtgagagaacaataaaaaggatttttttttcttttctgtgtggtagattttttatttttataatatggccaataataagaaaccccgtctgaaagacgtagcacttcgccgtttcctttcagtagtttcagtcactttattaggagtgtttttgttgatttttctcttgggaacaaattcaagatcgaaggattttgtttcgggtgaaccagacgagtatttgacctatagttataaccattcaaacattaacaagaaaatcaatctcccaaagcaaagtgaattgtcaattcagttggagaagctaaaccagaaaccccctagaaacagagatctatatccaagattacccaagaatcatataacaatagttttgtatgtacacaataggcctcaatatctcaaagtagttgttgagagcttatcacacgttgtgggaataagtgaaactttactaatagtcagtcatgatgggtactttgaagagatgaacaagattgttaagagcattagattttgccaagtgaaacagatatttgctccttactctccgcatgtctttcccgatagctttcctgggatctcaccaactgattgcaaagataagggtgattcttctgagaaacaatgtcaagggacttctgatcagtatggaaattatagatcaccaaagattgtgtcattgaagcatcattggtggtggatgatgaacacggtgtgggatggattggatgaaactcgagggcagtcgggtcatattcttttcatagaggaggatcactatatctatcccaatgcataccggaacttgcaaaggctcattgaattgaagcctgaaaaatgccctgattgctatgctgtgaatttagcaccctgtgatgtgaattcaagaggagaaggttgggattgtttgattgcagagagaatgggaaacgtgggctattctttcaatcggactgtatggaggaaagtccataagaaagcaagggaattttgctcctttgatgattacaattgggatataaccatgtggacgaaagtctatccatcatttggtgatcctgtttacactctgcgagggcctagaacaagtgcggtgcactttggcaagtgcggtttgcatcagggccagggggagaagaatgcttgcattgacaatggcgtagtacattttgatgtggataatgtggataaggttgcaaacatcaaaccggaatgggaagtgcgattcacagaaaatcaatctgggtataaagctggattcaaaggttggggaggctggggagacgaaagagacaggcagttatgtttgaatttcgctcggatgtacctgctcgaagacactaacacttcatccagcaaactgtaagagttgattgtcagcaatttaaacagctgttgtaagtttataagatgtagattagttttgttgcttaatttatacataacatatcaagcttgttgcttgtaaaatttacagcagattcttatattgtttctccaaaatattatttgaaaagaaatttgaaagtctatctttgagatgaaaccccaacattgattttctccaatatatttaaatgctttgttccatgtgttactgtatgccttattcatatgatgttatgacagctaaaatagtaatgttaactaggatatatcctctcataaaaagttttgtgtatattgctttggactataatcgatgaatatatatatacgtgtgtacaagcttaatctggcattgaacatagtaaggatttgaagatgtagaactcattaggaaactttgaggggacaatattttgatatggattctagcttctagtttctaaataagatgtgttgtgaacgttattgagtggttgtaatgttgctgtaaaggccaaacattttgttataaggacatgctcttaagttagaaatggaaccaaagaagccagttttggatacatcaaaaccaaaaggaatatgccaaacgtggactttaagaagctattaagagacaacacttgaatggtgcgttgggtatttgcgaatgtttgagatatcatgaccgttctcaaagaatagtacaatttttgaaataactaagtcacatcccggcttacctaagaatgtttttaggcatatagacaaagctaggaaacgaaacccgcggtacagatttaaaaaatgaaatttatattcaatatattgaaagaaaaatataaaaaaaaattattaataaaaataataatttttaatcaatatctatatactggcttttttgttacatattttgtacatatacttagttgtactagcaaaacgtgcgagacacgtatactaaatcttatgctagattttttctacgttatttaaaagtaatacaattaaaaattaaaaaaaaaaattataattataaattatttttatgtgtatctaaata

SEQ ID NO: 162987 - DNA, 1649 bp, Cannabis sativa
tgcccatttggtaatattatgggcaacatcattaagaaaagatacatgagatttaccaatttacaactattaatcctggacaagtatgtttaccaatttacaactatcaaacaatattcgctagtctcagtgacaattgatattggtaggctgctggtgcaaaatagtttgagaatattctgcaaaacaactagaaaccagattaattaattaatgagattgattaggaagattacaggatgaatgacatccactacaatggaagcatacaaaaccacttcattagtatctccactctatgcttccccaaacttcacaaaaatttagtccaatcccaaaaatataaaatatattagatttttgacaaaaatttacaattttactgccacacagaaatttttacaaaaatactgtctttttataaaataatcgtaaaataacaaaacataaaaattagaaacaatatatagtggaacaactaaaaataatagtggaacaacagtaaaacttaacacattacaagaatcagaattggctcgggtatttccactaatgttttgcacactccttggctcccaactgagtctcagccgtgtattacttcttcccatccgagcctagctaattgtaaggttaaccagctcatgaaaatcaaccaaagagagtgggatcatgacataatctcagatatctttagtccaagagatgctcaaataattcttcaaatccctcttagcactcaatctattgatgatgtttggtactggtgtaaagaggcagcaggtttctattctgtcaagagcgcttacagacatattcaagaatcaaaaggtaattgggcaagtgatgaaggttctaacttttggaaaaagttttggaaaatcaaagtttcaccaaaagttcttcattttgcttggagagctttaactgattgtttagctactcgggtttaacttcggattaaacatgtacctgttgaagctagctgtgtattctgcaatgatgtccctgaaaccacctatcatctgtttattgattgtcctttttcgatatcctgctagaatagatcagccgtgtctctctccccttcgagttgcaccagttttttcgactggtttgctgcaatttggtcacggcatggtggagattttatagcagaaattctgatggtcagttggtccatttggaaagcacgtaacaatctcatttggaataatcgcacatgttctgctgctgatgtagtttctacaactcactaaactctcggccaatggcagtctgcacagagtttgcgttttgaacctttgcatctgaactccaattacagcaacaactgcgacttctggtccaaaccagctgaaggaataatcaaaattaatgtcaatggagctacatttgacgctaccaactcttttggaacatgtttcattgctcgtgattctaatggggctgtcattttcgcctcttctactttctcgaatggcgtctcaaatgcaccttttgctaaaataattagcataaaagaagccttgagttggataaaagattctaacttgacaaatgttgtgatcgagacggattgccttactgctgttcaagctttgcaaagtcaaattgatatgccttcgatgtttggaatcgttgtaaaa

SEQ ID NO: 162988 - DNA, 6277 bp, Cannabis sativa
aaattcacttatagtcctacattcttggctttccatttttgtctctccttgaactcctaatcttattcataacacaaacataaaccaggtatttgtatacgtattcaaacaataaagataaggtggcatacctgatgacgaaaaaccatgtatgaaaacgcaaagaagaccacaataaaaggaagcagtacaggtgtaataacagaatacacaagtccaatcaagaaatataactgtatcctaggttctgatgtagcaaagtccaagcaaccaggatccattgcttgctccctgtcttcctctgtcttaaccaaaaatgtgttcttaaggtggaacataactaatggaaccaatctaaggatctctgcagcaaccccagcccaaccatcaaccattacataagtcatgaagaaagtggctttcattgggatggacacaccaatagttttagtaaatctgtaggagcagaagaacttttccgttagattattacctaatgatcattcaaaaaaatctttgaaatctaacacactagaattcgatgaacatgtcatttttcctaaagctattggtattatctaccttcacctcaagaaaatataaaggacagaaacacttggatccaaagcagataagagattgtaagtttggctttaatactacagccagtggcacatcatctaagctgaaccaaggacattctctagatcccaatagacaaacaaaagaaattatagtaaactaattgaaaacataatgataatatttctcttttaaagttatagatgatgggtctagtcatccatcgtgattcgtgaggataactcttgatcaatcatctataagaaacattcagtagctagtaacccatttggtaaattaccccagctggggtttggacagttgaaccagacctcatacacacaacccacatacctaaccacttaagctagacagtcgttccaacacattttcctttcaataacgaaatctttaactgaatcaattggaatacaaaaattatgcaaacttactctgttgaaggctcattaatgaatttctcaagctgctgaaatgctgtgccagtaacaatgcttccaagaaacacattgacaagtatgaacaaatgatacttctcagctgatctcctctccagagaagacaacgatgtaaatccttctattcttgacatagtcatgagaattgtcggaagcagaataaggaatatctttaatactattccgggaagaaatccttggataacagacttcacaaccttcctgcaacaacaaatttaagcatctgatacttcaaccattaaaacaaaaccaacgaactcataactttttatatttatgttttgccatttggaatcatcataaatctttagctaatttcagccacaaagaagcacaattaaaagtaattaactaaattttgaacataatgagaaattaaaattccaacataatgcagaatgaacgcacttctctattagtggcttcaagaaaggaagaaccttcattatcccctcaatgttggctagagactgaacaaatgctataggaatcataaaaaagaaagttagaagaaaaaggcaaatagccatgagcaatcttcggacactaagttcaacatatggaattgcaagattgtcccaaaagacatcacgaggctgaggagcccactctgtcagccagattgtaggattactcgattgctgagtttgagcacaaacagctgctccccatcgtgttttgaaagaaacaaatgctgcaggcactgtagccgttggatcactggcaaccctttctctttctgcattttcctgtataccagtcatttatacatctataacattgaaaatgaatccttacaaaaaaaaaaataacattgaaaatgaatagtatcttctaatagatttatttctaacattaagtctgaataaaatgccaatattgacattaaacagtgatagactaattgcaaatatactgctacaaatatccagatcaaacatattactacagtgttaaagcaaagaagcctaaaagactacacaatcttttcatataacaaatttacaaagaaaaagaaataaaagatagcaacaaatatggcacttacctcttggtttaacttactaatctcggcagtataatagccaactgcatccactctacttccccagaggccccacaaacctgtctatagaacatcatgaaatattagatgacaaaacttcattaaaaaggatacggctgcaattcatatacagttcagagatcaggctggaaacctttgtggtgggcttctttgtaggatgtctctcatgcttattttggtaatatacaagccaattctgcaggctctttttctttgcaaccaactttgcaagattatttgcattatatacaacctgcaaacattgggaaatgaaaatggtatactgtatacatcaaaattcttcaaccagtcacatgatttacatgtcaaattggaaactatgtgttatcacaaaacctttccttcaagcagttaaactacaccgtgtaattacaaacatgaaagaatttacatacatgatgcataagataatgatcgggatgatttacacagaagaaatgctcaacatgctcactgactgactcatcaggatcaggaggaacattcttcacaagaacctgggaacaacaagaagcaaaattgtgaagaagttactttctgagagtaatggtgtacttggcaattactaccagtaataaagcaaaaaacccagttatatgcgtctacctttttattattattattaattgggcagacataagaatagaaaagagtgaagctagtaacgtgaaattggaaaaataaaagatagtaccaaaatagttaaagttaagtaaatggagaggttagtttctttggtgtactttaacttaaaaatcacatctccaccacacaagattttaatatgtttattttatttctagttttgggtttattcttaaaataaagagataagaatctctgacttaaaatccctttgctgatttgatgtaattagtcttttatttaaatctccaattttgagggattaatttattttgtactacaggaggattagtggttgatttgtcatttgctgtcaaacttctcctataatttatgtacaatagcctagcaaaatagaagaagaaagagtgttcctctctcttcaaaatatagtaaaaggactgaacacagaggggaaagaaagtgttggtagaacaacaacaagaagatgccatcatttaaaaaaaaaaaaaagaaagaaagaaagaacataacttacagtaaattgatctggacgtcgattttcagatgctaaatatcgaagcctcaatgaagctatcgtcttgtattcataatataagacatagcatgtccaatatgagaagacatacgacatcaacaaatgagcccaaaacctggattaattagttttgcacaaacctgagcaaattgagttcagatctaatgaagcataagaatgtatatctctctataaaacaactgacaaagagagttgtcaaggaaaagttaaggttcttcactaatatattgaatgataatcaggattttcctaccatgaatacagttaactacagtgatagagtttgaattggtgaaatactttcctctatatgacagatacattagggagtagggaccagtttaagtgagctttttaaaatgatataaacaaaatgagatttctacagaagtcaaaagttgaagcttccttgggccaacttcagaatttaattgcacaacttcagaatttaattgcaggattggcacaaattattcaatgcttttagttagttataaagcttaaccaaactaccctcaaaagtattatattttataatgtcaatctgtattgaagagaatcgtagtacattattattcatgaacagtcattacgcagatctgcttttagaaaaataaatccagattattgcatatgatgttacatagatacatgtacctgtttgatccgggtggaacattggatattgaaagtttgtcaatgttgctgaaagttaaatcttttattctttccaatgtattacccgtccaattgacaggcaccagaacgacaaaagcaagcaaggttatggggatgaaaattttcaggctgcagtacgaaaattttcaagtaaagatgtttggtgaataggtaatgtgcaatagcaaatatattggcattgatcatataaaggctgagtaaaaaaatcatatcttagttctgcttttggtgaatcagcactaaaaagcaacgcaatgcagtacggataaatcagacctccgcagctcaaacaacaacaacaaccaaaaaagaaaataacaaaagagtaatgatgtgtaaacccaaatattacacacaatggcatggtagtttttcaactaatcacaggtaagactatgaataatgtttgggtgaaccgtgaacatatcattacccaaaacaaagacacttttacatagttcctacatacgagcttacccaagtaggtaaatccgcatgaacgcagtagaatcaagtccagcgtgctctgtaagctcgggttcgggcatgttcaatgctgcaggcatccaatttaagaactttatgtatgtctttaaatccaaattgacaacgttcttgacaagtcctccagattttgttgggcttcctctaattcccttgagataccacttggggaagtatactctatcgtttattggttgaagcctcaggagtgcgaaagcaacaaggaacgacaatgctgataagatattgatagctgctgacataccaatatcttgaagagaagccatctcctgatgtaaaattagaaaccaagtagcatatcaatcttgtccctgaattggtatatgctatctcactaagattttcttcaaaaactctatgcaaatattataaacatatgattctgctgcctagtaaagactaacggttttcctagtgtgaaaaattgagtattattccaattcacattagtaaaagggatggcttatgacaaccctacatcttataaaagctgaaaattcaatcaaactacgaatcaagaaagtgttcgccataattttatcctctataattggcaaaaatacaattcaccaattctagaacttgtggaatgtaaattaattgggatttccgaacgagaagcgagttagatcaaaattactctcgattcaaataagggaaacacatcaaaattaaagttctaatatataaacaacttgaataaatcaaaaatttctccataaccaaaattaaatacaatggcaatctcgaaaaaaatcaaattgagccaatttcattaaaaaataataataatagataaataaaatgagcgggaaatggaagatatgcatcgaaaacggacctatgacctgcgtaacgcggttctggaatctgagaatgtgaatataggtaagatggaggttagggaaaataagagctgaaagagtgaacgccattaaagtttctacggtcaaatttttcggacagagagacacgtcaacggctgctacaagctcggaggagtgtttggtctggctgcactcccgcttataaacgttacgggaatatttgaatattttcgtgactaaattacccttaactcatttatttaaaagaggtaaaacgcaaacaaaataagcaacacgacaagaagcacgagaaacgacaaaaattacaataacagtccgatattcaataaaaaaccaaaacatgtaatttgatatcatactatagtaatcattaacgaactgaaacgacacagtttgacactgaaactgaaatatatatttgtacagatacagagatcaaaactaaaaagagcaaaaactatatactagctcacgtaaagaaatcgttcaaaatttctgacatcagcacaaaaatcgttatgtttccaaacaccgtggtcaacgagtcaacgggaggacagaagctcggggaagacaaccaatatcaatttgtgaagcccactcatcccgaagaccttcatcccggcctcgcgtggaaaccactttcccatatcccaccgtccgatcatcatcatcgcaatgattaagtgatccctgcgtcgcctcatcttgtccttgaactccacaatcgccatcgtcgtcgtttttgtctaattcgttgtcgttatcatcctcttcgtcctcgtcagataacggtaccagccagcaagctccatggaggtgaccgttaatg

SEQ ID NO: 162989 - DNA, 1279 bp, Cannabis sativa
aaaaaaaagaaaaaaacaaagacagaatgcacagtacatgtgaattattacatatatatgcacaaataaaactgtttgaacgggaatttagacaatttcttcaatatatgcggcggagcaaaaaaaacacaaaagtacacaaaggggcaaaataaagaaaaactaatttgattttctttttttttttttttctaaaaataaaattgaaaggaaaatggaaatatcaattaataagtagattggaaaaatttcatgataatatcgctcaatgagaggattcaacaataatagactaaccaagtcactataataaatttgagtattagggaccacataaataactactaaaaaatctgccagcttgtcctccctaaatgtcgcttctaaagttttgggatttttaaaatcgtgaaatctttctttccaacgtattctcttcttcttcctcttatttcctttctctgcaacccaaaaaaaaaaaaaacaataaaatggttagacggatagtttcgaccacgtcttcagcctcatcggctagggacggaggcacattaagagtagaggaggccttggcccctaaatattatatgagctaaaataaacctacttaattgttttttttttttttgtcataaattacttttcaattatactctacgaatacatatttaaaaataaaatatatttagaatattaaaaaaataattatataaaaaatttactagaacaaagataaatttatatgtattaaaataataatttgaattaacaaaaataaagtaaataataattcaaaaaactattaaaagtaaattttaatattgcagtgtacataaaattttataggtgtaaataaaactttttcccataaaatggccctctctattatttgatcttgcctctgcccctgtcatcgaccctggtccccgaacagccccgaccccttcctccccctccctcttttttgcttttctctttttcttccttttttcttccttttccttttctctgattttctatagtcgtttacaatttaaaataataaggaatgaaatcctaacaacatcttcaacgaaaagactactaagcaaccaactttgaagcatcaaaatagtgtaaagaatactaagtttctaacctaaatgaaccagtaacaaatcaaacttatcactgtctatcagccaaagatctcttaaaaaataagctaattaggatttttttcccccgaactttgacatataccaaatcatgccccctaaattttttggccgttaaaaat

SEQ ID NO: 162990 - DNA, 1967 bp, Cannabis sativa
  modified_base (1795)..(1819): a, c, t, g, unknown or other
actaaaagtagcagtttttttgtaatgatagacaatcctcacgttagtaaaattgaatgaaatttgacaaaatttcttaaattcagcaatcacaataatataagagaacaatttactacatatcgaaattcggaaagtaaaaatctaatttaattaagtattatatagtgtaacacaccaaataactatgaatgcacccatatgtagaatacatcttaaaattttccaaaatagtatacactttttaacttatttatcgcatgcctaaccaatctcaattatattatactccccaagtgcacatgtgtaatgtgttactatttttttaatgaattatttgtgttttataaatgagaacataatacacatttataattatagtgtatatgtaggtatatgttaatataattggaagaaatattatatattattttatttatgaatacaatatgatctagtgcagttttttttaacaatatttagtgaagaattactaaaatatatgtgtgatagtttgttcgttatttaatatttttattttgattcatatatataattaatattcatgatgctacttttcatgaagagtaatttttatagtatttgacccttcaattcatttcttttttgtcaattattaaataatgaaaagaagtaagattgctttttatatagcctatcatttatatatattttttatctcatggttaaaatctttaataatgaaaaaataattattaaattatatttaataagtagttttataactagatacctataatatttttatttatatgtgtgcagacatccaagtatagagataaaaataataatttaatataataatataaaacggacacttataaagttttctacattttaaatttatcataacatcttatttttatatgcattgacaataaattttatttttatttatatgattctaatctttcataatcatgatcagtgtccatcttgaaacacagtattaaaataataataatgttctttttttaattattatttctatgaataaaaaaaccttttcttcacaaaaataataataaaaaaaaaattagttttttttcttaggattcggtatatttaatgcttcctaatttctttatttaatacttttcacttgtatatattgtaataacaattacatcaaaataaattatacttaattttgtagtaaataaaagaaaataattgcgatagatcactaataaattgttaactagaaaatgtaactagaataatataataatatattatattacacattaatttatatataattttatcagggcgttattaagattttttattattatttaaaatgttattaaaaaaaatctatatttgtaaaaaataataattaccctagaatttacaggtgactagttaatcattcaattgaaatttcatttctcatgcttaaaatatcataccaatatcaaatatataaagatagatggtgttcgacgatccttgacaacatgctttttaaaattgtatttctcgacaaaattttatgtactctaagagcgtctccaaaagtctattccaatggtgtgccaaattgtgatgcaaatatatcacataacaaaaaataatctaaatttagatcacaacatttcatgatgtaaaatttacatcacaataaatgttatgcttttatatttgtaccagtataatattttattattaaattttagttaacattaaataattttcattattattattactaacttttttatttatctttgtattattattattattnnnnnnnnnnnnnnnnnnnnnnnnnttattattattttatatttttaaaaggctagttaagatttttgccccttgtaccaaatcatgccccctgaatttttaagatcgttaaaaatacccctgaactattgagattgttagatttaaggatttttgtcttatttcattcaatt

SEQ ID NO: 162991 - DNA, 848 bp, Cannabis sativa
aaaaaaaaaactccataaacaaattattgtgttaatattcagtactagtatcaacgatcgctatccacagcaacttgtatattttgtcatgaaagaaaagtacgaaattttccagggaatcagatcctaaattttagagaggaatcgcatggaatcagatcttgaattcatagttttacaaataaaacgaaaatgaaaacgatcacaatcataaccattctaaacaactcagtaacttaatcttctacaacaaaataataattacataacataagtgtatatcaacgtacgcaatacataaaggcgaaaaagaatagaatagaatagaataccccgagaataggatcttcaggagcttgaacaatgtgagcgaagactgaatcgaggccattggaagcagaagtaggagaagcagagacaggagccatggcagaagaaggatcggagttctcagcaatcaagtgtcgagctaaagcgtttagtctccgatcagtgggtgaagaagaagaagaagaactgtgggcgacaaatgatgaaaaccttgggcgcattttattccgtttctttctcccttccttttcccaacgtttattttttccttaatttttaattttttttttattttgaagaaaataaaaaaaaatggtaaataagtataaaggaggtgagatattccacttttggaacatgaatgaaccatgcctgttatgtttataacataggacggtttgtttggtctccaaggtggagatgccatggcgtgccgcttttttttttgatcaactcaatacgtccttatccttttcttttcttttctttctttctaatttcttaagtttttttttttt

SEQ ID NO: 162992 - DNA, 5706 bp, Cannabis sativa
tgttaatgatttgaagcaacaacttacaaagatataattcttggtgaatcaaaattagtgaagctgcaattcagaccctcccacatgtaatttcttggttcacatggatctccttgccaatttttcttcagattataatttgatttaacattcataatggcatcaactaaagttttcaatagtaggaataagtaaaagaatgttagtgaagaaaacaagagaatacaaaatgagaattcttgttagaagttagtgcatttaccatcattttggagtgtttctgtattttcaagtattttttgtgtgtaaatctcaatggcattaagtaagggtggaagagttgagttttctgttctgtttactataatctgtaaacttgacccccttgtgggatttacactgtatattgtacttaaactcaagtaatttggaaccaatggcccataaaacaatgtaccatttaagtatatgttgagttctctagtttcattcttgctatacttttggagctcagcaaaatgtagataaatataaaaatcttcagggttttggtcaacagtactccaagagatgccaattacatcagtttcattctttggtgcgactgcagttcccataacaacagctggtggctcataaaaattttgtttaaattcaggtgatgatgatgtattggttataatattccagtcttgaaagttcaaaggcttccatattcgatccataacatcatctctaaacctaaatgaaacaaaagtacattaaccctttacatttttcttttttaacaagggaaaatgactataatgatgagagagagagaaggagatcatacctgacttgattaatatcagacgatgcaccacaatctacccttgcaaaaagatccaaggtcccagtttgactaacataagtattttcgttcataagtctcagctctaatgctgatatgaaaggtgtcccttctcctgttttaaccaaacaaacagatatataatctgactgtgaaacatgtatgatttcatattctatagttttggttggattttccactttcacggttctccacttgttgactccgaggtacaggtcaaactccgggttttgactcaatccatcgtagtttccgtacataaactttgctcggatcagatatgttcggtttttgccccctcgaggtttaagggtgtaacaatttctttgtcctcgtggaaaacatctgagattattcaattgttgttcgaggttttcggtattgaaaggaggagaaatgtttattatttctccagtgtctatgtaattaacatctgtagagtacttaattcctgttatttgatcaatatagtcttctgtagcaccacaatctatgcttatgaaatctacagaatagaagggatcatagaacatgttaactgattgtaacactagtaataaaattgaataaaacagtattaaaaaaaacctgattggtcagctgtaacaattgtgagaactatagcagctttcaatattgtcaagaaaaagaagagattagccatttttgagtgctcgatcccaaaacagattattcttcttttttttctcttttccagaatgattggctcttaaatctgaatgaaatgatgataataacctacctaaatgagaaatggtaaatgtttgatcaacacaagtcaattacgtacattcctctgttttttttggagatgacttggtctgatcttaaaagtcaaccgtacatccatgaccatttcctgtgatgttacatatatgaacttactaacgtaatttacacattcttttaacaacaatgaacttttttaatttattttgttttgaaagtttgtttgaagaggtacacaaacaggtttcactttatctagtattttctttcccgaaatttccaaatcaggcaccttacaatttctacattattgatagaaatcttaatcactattagaatagatgctcatgattaagtggtcatcaacagagcttagttattgtttattttttttccttatacatctcttgttttatgaagtatatactattttgataaaataactaatgatctaattttcagcttttgatgtggttagtattattatcattttgttttacactcttgttagtagttttaatattgttttgtatgggcagtttgtattataaaattagtgcacatcgttacaatactccaccaactatactgttcgttcggtgtaacttgttagactcaacattttaaacaatagtttcatcccatgctaaagatctaaatcattactgtttatctcaaaaaatcaaatgatcattaaattttctcattttgttactaaataggtgaaaactaaaatcggccttctcgtttgggtacgtgttaacgaacttcaaatgagaattgctaaaagacaagtgtcatattaatatctcatataattttaaaaaaatatcttttaaaaatattgctagataacactgatgtttaattacgaggctattttatatacctattttatatattaaaatgtcatattctggcatgtaatatgtaccaattgaatatgaataagttaaaaagtgtaacaatcaatcaacaatcacctactatattttcctttttggaggaaataatcaactactatttttctttttctatgaacaaatctaaaatagtaattaaatcctggttttcttgaaggagtgttaataaaataagaattaaaggttggtcgttgtcattgactggtgtaactcaattttgatacgattattctttttctaaagagaattttattatttacttttcaaataataataataaaagagaattctatatacacaaacaaaaacaacaaaaacaaaaaatagtgcctcatacaatttttctggaaaaaaattatattttcacatttaaagatttttttttttatatttttacgatttttcataatatataaaataatattcagataatataaaatcaacaacaaattaccaagagagaccatattttttgtaaataaattcaaaaaaatcgtaaaaatattataaattccataaaaccgttttttttttataattttttcattattggtgtgtatttatgaaataattcctaaaattttggtcagctaataattgtcttcggccggccctctacttataaaaatattaagtttttcttttcttcttaagaaaagtaacattatttatatgcactttgaaaagtatcactatctaaatagtaatatgaagtagagaaatttcatcccaaaaaaaaaaagcaaagtaaaaaataatatatttctattggtggtgacactgacccgcaattttactataatggcttccactttctcatggccagccttatgctctgttctctctgtttttttttttttttttgcctattcttattatttaatttaccacataagcaaataattattattattattctgaaaaaaaaatgatggaaaaacagtacaagagatagatggtgagcaatactatttggctatagtacaaaatatagaagaccaattgttgaaaataagggagccgcaaacttgttgtttctgcaccagtaacatagtgaagatgatgatgatgtttcattcgtgggtgatgatgaattattattcaaattggcatcaacactgcatgtgtaagcacaggaatcaaccttaattagtcacttagttagttcacatatagcataataatttccttagggagttattatagtaaaaatttatgctttaactttaattatgttatttttccctctgaaaacaaaaagtttgttttaaaatagagaatagatattgctcttttatgtatatgagaaatcgacaatgtatatttttataggagtcaaaccttaatgatagaccgttattgattctttcaagaagtgaaggtggaagcggacccgtgaaattgtttccttttaagtttctgcgaagtgaaagagagcatgcatattatgatatttctatataattctttttaacttataaaattaaacaaacaattacaaagtctgttaagtttacttacaagactcttaagaatgagagttgagccaaaaattcagggaccgtcccagttaagctgttgtttgatagatccctgaagatatatacaatggtttgtcaaagaaaagtagtaataaaagttgttttatattgtacagtacttaaaataattctccaaatattattacaaaataaatcataaaaacataaactgttttagggtatatatatcacaagtagtaataatgagatacacttacaagttttgtaacatggttaaattggcaatgtaaggagaaatctcccccactaatccacttgaagacaaatccctgttttcaagtgaaacaaagtaaaatataagattaagatacatataggttactaagtttaaacaataagtataaatatatagatttttttttttcttaagacagttataaggacatacaaggatgtaattttgtatgaactactgtatgtatcattatgggtacaattaagaccatcccagacgtaagtcacaggaacacaaggatctccttgccaattcttcttcacttcatacacggtcttaatattcaatatagcatcaactgatattattattattaatttatacacaacagaagaaaaaaaaagaaaaggttaattataagagatatataagtataataatagaaaataaaaaaattgtacatgtgaaaaaatttataccatctgtttgctctgtttcttgttgcaacatctccttcaaaacataaatctcgagggcatttacaaggggtggtagagttgaatttgaggttttgttaaaccaaatctgaatatttccttcaatgtcggggaacttgcctttagaactgtagattgtgttttgcttcaagtagagtggagctagagattcgaaccacaagtttccattgatgaagatatcaaactctcttgtttggttatttttgagcttctttagttctgcaaagtgcataaagaataaatatctggaagaagtatttaaatttttccagtttaatcccatgtagctgatactattatttcgtgtatatgcagtgctcatcacagccgatggtggctcaaatatattggtggatatagcgttttcatccgtgagagagacatttattggcttccacacctctgttttgagtggtgaccacaaccgatcataaacatcatctttgtacctatatatacatatattatatatggatcaacgcattattaatataacgattatacatggtatatattggtacatggtcattaattgatatataacattcaatagggttgtttaattggaagaattgtaggatccaaaatagtactattttatgtaaataataaagtttctgtcataattaaaaatattttgacatttgggtataattgtataaaaaatatagggtcaaaaataatattttaaaaaatatagatccaaactaataattagtgaaaatagaaagtccaaaataatatatatatatatatatatatgtatttatatatgttaaaaactaataccacttatacttttatagtattacaatgggtaaatactattttggaccttctgttttacaaaagttatcaattagaccttgtgttttgttaaatgacaaaatggacactgtatttt

SEQ ID NO: 162993 - DNA, 2971 bp, Cannabis sativa
ttcttagaaaaaagaatacttgacttatgcttactacacaattggcccgaccactcttcatactttttgaagcactccccaataacactagcattttgttgagtagctcaagcaaacaagattgtgtcatccgtgaacacaagatgagatattgggattgcattcctactaactttaattccatgaatcttaccctcatcttgtgcctttgaatcagccgagacaaaacatgattacacaagagaaataagctttatgcatatctattttcacagccatcaaaccacctttgcttctatacttcttgatggtattcaccacttcatgagtcaaacagtagcatcaactatccaccatcctggaatgaaagtggattgaaacggcgatacaatttgatccataatccatcttaaacgttggaacaataaacgagaaatcactttataaacaaaattgcatagactgataggtcaaaacatctccacctcatccacattgttaccttttggaatgaggcaaatataattcaaattgaactcaggataaagaaccccatttcagaagaaatcttgtatgcactgaatcacatgatcccctaccgtatcctaacattttcgaaagaaaataccaaacatcccatcagggcttggtgccttcaatgagtgcttcacaatgatatgcctcttaatctcagtaattgtaggtatatcccctagaaaatcattaacttcctgcgagatcatagacactataagaccccttatctttcttctaatatttaaatctaccgttcttatctttcaagaaccatgtatgattctgtttcattcaaaccaaaatcgaagtctaaaagaatttactgttcttatcgccttaggtcatccacaattctctcgaactctgcttccatatcagttcctttctcgtctattctttagagatctgccattggattttacgttattcttccaccaaatcatcattaacatcttgatattgaatccaacacagtttctcttctagcaatttcaactttgctttgctatccccacaaacccgtttgttccatccctggagagcaatctttgttttcttcaatctcttccctaggcctttaaaacacctgctatcaccgaagctattccaagccttcctaataatatccacacaagaatcatcttgaaacgtaaaactcatccctgaaaattaattttaattcaagaaaactaatcatggtgaattcattttatatattcttatgatgtagacctgcaagaaatagccctcgagttcccgaatcaatccaaatcaagtattatacataaaatacttatcacaacaatctataaattctaattgttgcattaacattgttttatcaaaattttaatattgaaattattcaaattcaatggtgaaaaagaactaaattcgtattcatcttgcgtcacggatctgactgcacattaattacaatctgcctacgtataaagaaattgacatcgtattacaattttcttacagttgtcgtctcgttttatgccatgttcacatttctattatgtcaattcgtataaattgatctgacttgtacataatttaggtgttatctacatatatttcatatagaaaattgaaggttgatatacgcgcaattacataatgataagttgaataacaattttctgtacattgcataatctttttacaaacatattggctatgcattgtttttccaagttgtttcctagttgccttactataattattaaaattacaggaaacataattaattctatttctgctacaattcagtggacagtttgatcaacaaataattatgttaattatgaagtcaagtggcaaatttatttcaaaggattgcaaatatacagaatctacataagttgaatcaagtcatgaaaatgtaactaagaaaacactccattctaactaaaataccaaattaaagaaagttacaaatcattgaaaataaaggacgaggacagcttaatcatctacattcaactaaaattgaaagaatgtcacaaaatatccattgtgtgaacatgatcaacaacacactaacaattaacatttttattttgtttaactttattctggttaatatgatttcatgtacaattttttaaacgacacgaacataaaataaagttttttaatgattaccgaacaacctaataataataataataataataaataaataaaatctctaaagaatcaaaaataaattaacataaaagtaagtacaaaactattataccattcatattttctaaaattctctcaaaacaaatgtgggatcacatggtttgttttttcattaattttttccaacacaagaataaccacaaattattttgatctagtgataaagttcaatgtttgaaatctgtatataataagtataggatcgtattactttagaatttcatacaaagtatatttattttacttgtttatcatcaatagatacgatatttttaagactgttatcgaaagtggattagttctaccatggccatgtatgtcattgcatcagacattattccatctttcgtggcactcaaggttgatcattatttaggagaattttggtgaagtgactctgaattgaggaaatctactcattttattgcttggaactctcttcacaaatccaaattccttgtcgaattagattttcgaaggttggtagctagtaacaaggcctttttaatgaaatgggcatggaaagcgctaacaaataaaaacatcttatagagtactatggtaaaaagaaaataccttaagagtaataattaatttcttgatatagaaagtaagataatcaaaagtgcccattacaaatttgaaaaccttgaatgcaaatcgattagtggttaaaaatatatttttatttattttaaatgataaaataaattgagttttaattgatattttcatg

SEQ ID NO: 162994 - DNA, 2081 bp, Cannabis sativa
  modified_base (2021)..(2045): a, c, t, g, unknown or other
tttttttttttttttaaataactccttaaggagtgaagttactaaaactttgaaatagtagttatactgaaacttttttaacatgtcacatcacatattttgtattttcatttatatgtaaatatagatattgaatttttccttcataattacaacatttataaaataaataagaaataattaataaaatatttttatttcttaaaaatatatataatgtttttttaattttaaaattttgaaaatataattctataatttctcataatatttttttattttattaattatttagtgtaaataatgaatattttatacacatttctgtaattcgtaattcataatatttttcactttttttttataaaattaaaattttgataaaacaataaaatataataaaaaaatataactaattaggcaagattgaattaatcacaaaaatacattcaacgacatactaatttcgtgacaaataaaaataaagaaagaaatattttcttatacatacaaatatagcacccaaaatagttcataaaccatgtggattcttttcaaaacaaacatcatattatatcaaacttacgcacactattttgttctcgaaatgtgaaaatatcaaaaattagtaaaaataaaataaaaaaaaaacatatagaatgccacctaacactatttgtgctttcctttatataaatatatagattattatttttagaattgaaaaagtctttgtttgaataaaaaagaaaaatcatttttcaatttaatgcagaactctacaataatgataatttgtgagtatgaaatagttacatgaacttcttagcgctccacgtcaatattttttgtttttaataaatgagcatgatttgacaatggtaaatagttaaaagaaaatttttaaacaacataaaaatttacataatagtggagaaaagatcatattttttagcacatttgtttaataacatttttaataggtgttaaattagtgatgaagtgctaaattataacacacaaacaaaaaataaatactctagatctagtatcaaaaagataattacataagccattattttttataaattttttacctttttacattcaatttttttatatatttttacagttgtttaccgagatttacatatatgagattaagtaagaatttaagaaattaaatagtgatcaagtaaataatatggaggatttttacgtggttcggatgttaattatcactagttcacgagtcagtgtattggccttttaggttttgaaatgtattacaaatgagttttacaataaaaaaaccctaacccttgctatctagtgatttctctaggtttctcttggagaagtagaaagcttagattcaaaccagcagagcttcggctaaaattctcccccctccttgcatgaattagtactagagtttatataggctagaatttgggtatgggcatacccgtgacccattcaggctttttgtcaaagcaaatccactaatgggataaaatacacaaatcatgaggcccacaaagatattcaactcgtggggtgaaggttctgtactgatgaggggagcgtttgctgcaggacacgtgttgcacgcagaggacgcttgttagacaaagttgtcaggggagccgttagaaaaaaggttatatggtggtgagcgtactaccatggtctgacacaggagacagcatctgatcttgtgtcaaagaggtggacacgtcattctaggggacatctggttcttgatccgtggtaagtcttcaagagtcatcctgtggtaggcgtccaggagcaccttgcgtggtctgcctcttgttctgtcttaatcatcgttcaaaggtctttgttcgttccgtatctcagaagattaggtgcctttcgggtcttggaagaatgttatgccctagaggtgtagcccatagtctttgttgggctttggccaattccaagtttagcttgggcttccacaagcaggaaggcttatgtaacaccctaactannnnnnnnnnnnnnnnnnnnnnnnnaacatgctgtgcagctcgttgctagtcaacgaggtt

SEQ ID NO: 162995 - DNA, 1094 bp, Cannabis sativa
agttcttgtctctcgtcaaaatcaaatagtattatttagaaagaaaatgacattatttcaacgttactctctcaaattctaaattgttataattaatgaatgaaaaataataacataattatttgtacgtgggtgggtcacactcaaatctcattttaattaataatcaatcctttatgtaaatttactaatttgtcctttcaaaacagctgcaactggggctggtttcatagctcgggacatcacatttgtgaactgggccggcccagctagacaccaagccgtcgcactccgggtaggtgcagaccacgcggttgtttaccgttgtcaaatcctcggataccaagacactctgtacgtgcattccaatcgccagttcttccgcgagtgcgaagtttacggaacagtcgacttcatattcggaaacgccgctgtggttttccaaaactgttcaatctacgcacgaaagcccatggcccaacagaaaaacacgatcacggcccaaaaccgaaaagacccgaaccaaaatacgggtatatcgatccacgcttcatggatccttgccacgtcagatcttgaagcctcgaagggtagcttcccgacgtatctgggccgtccgtggaaaatgtacgctagaaccgtgtacatgatgacgtacatgggtgatcacatccatccacgtggatggctagaatggaacacgagtaattttgcacttaacacgtgttattacggagagtatatgaattccgggccgggtggggccgtgggtcaacgggtcaaatggtcgggttatcgggtcataacatccactgtcgaagccagtaagttcaccgttgcacagttcattttcgggtcttcttggctaccttcgaccggagtggctttctcggccggtttatcagtataaaaaatttcaaataatatataataggaactaaatgttgggcccaagcccaataatggcctggtggggcccactttatatgaatatagttttttttttctttatttaaaagcactattttaattttttttttttttcaaatgatttagcaataagcaatgttgttaatttttcttttttttttttt

SEQ ID NO: 162996 - DNA, 2254 bp, Cannabis sativa
gggggggggggggaagagataaatttggtttttcctcttcttaattttcttattattttcttaataaatcaaatcaaataatcagcataaaacagagcttaggagttaaattccaattttgcccctagttttacacttaagcaatctataggtctaggggtaaaatagtctaaaatcaaaatccaacctaattttgatattctaaatatcaatatatggatactccgctaaataaaaggttctaaaactcacctatgagactctattggccatcagtatcattttccatcattaccaagtgaaaaccataaaagttataaatttcgcatatgacataaataatacacttatagtttaataaaatctctggagttaataaattataattctaatgcccattttctaaaaatggaaccaacaacatatataatcatgcataatcataaaatatcaataattaatgctaatccccctactaatccataatctaatcatgcggtcattacaataggggttgtagaaaacacatctccactactcataccatctcagtaccaggccacgctgaggacgtggacatactcggtctcatacctctcttcttcaacacgtatccaaattctcccttcacttcatatttctcacactcactcacgaatctctcatgacacgactataacacgaccgtcaaacacaccacatacagcttgcatgcgagcccttcacacaccacatagggctcgcgtgcgagccccacacacctcgcatgccacagatcacatgtggatctcacacaaacgtctcgcattatggctcgcatggacatctcgcatacatcgtggcttgcataaatgctccaccacttcacaaaggctccacgattcacataaatggtccctgacctgcaaaaatgctcctctgcttgcatgaaggcacaatggctcacacaaaggcacaccagctcgcacacagacgcaccaactcaaacaaaggcaacctaactcgcacaccccactgtcacatttcagttgtcttagtattttggccataactttctcgatatatgtcagactttgatgaaatacgatgaaaagataagaaagagatctatggattttttgttaaggacaagatctaattctaaatgcatcattatgaaaatcctccgacaattaacatttagtatgttggtcttactaactctactcgtgctcgttgacctccatcgaaaatacatcaaacaagtacatatagatgatggaccttttcaaattttcatagagtgatgtcacctctgttttgctttcccaacttacccaacacttttcttacgggtgaccatgagttcggtctctgaaatgcttggaaaagtctccaagaatcatcaacactgattcttagacttaacaccgggttaactattgacttatcttaaagggtagcttttctattttttggggtttttttagttggtatcatggtcgtagtccctatgaaagtgataatatttagcggtgtctctcttgctcatatcttttttgattgtaggtcttttgtatggcacaatggactgagttgccatgaagatcctttctctctcctcagtaacgatagtgaaggtagtgaattttagagctctctctcgaggatgttgttggtcggggtcgttattgaactttctcttctttccattgccttgattatttttgttgttctaccttttaccaccctaacctaaaatgctactgttttaaggctgggagttataattacagtggatgggtgtattagcagcagtgatgggatttgggttgatctttttctaaccaattgtgtccaatcaccagactgcttctttgagctttataaatctatctgcgcggtcaaggaattctcccatcgaacccacagtaaacattttagtatatttctataattcttccaaaggttcaattccttctaggatagcggtcaatcttctctccttggccaatcccttcatctttgttgccttagtcataaatcgactgatataatcttgtaagggttccaccaatatctattttacttcgacttggtctttcaaactttcaaaaatttccaaccaaggtggaattatgggaggcgttgcatcgtgttctttctgggttgttgaatcatttcccttttcctggcttgagttacttgtgtgtagtatcgtgacatctttgcagggttttatgccctaaataaaactctttacaatctgattagt

SEQ ID NO: 162997 - DNA, 3596 bp, Cannabis sativa
taatctttattattgatcaaatactcacattatcgttttatttactctgcgtcattaattagaaacgagatcaacatgtttcaataccattaaatgcaaaatagcaatgttcaatgaaagtagatacaattaagtgaattttttagaaatatttaatttttttttttaaaaaaaatatagtaaaaataccatatattacaaaagtataagttttatttacaaaaatactaattacatcgggatcaaacttcttccccctaactcatacacacccttcccatgccatctgagcttctcacatttggccaaattataaatttgtaaataattatttaaactagtcatatttttttattaattaaaatatatttttagtaatttttcatattttaaaattgatataaatgattaaaaaataaaataaaattgaccaattatgccagcatggtcgctaaggcgacccttaaaatctcttttagagtgagcacttttgcccaaaaaaaaaaaaaatgggtatgtttgacgcaattttttctagcacttatcacttatattagcgtggatattaactcataacgaataaaatatataatgtgggtacttttgccggaaaaaaaaaatataccaaatcatcaaaattttaaaagattaagtacttttactgtcatttttctcatatttatttgatgagttttatttttatatatataataataactttttatttttattaagcatatatataagatttatttgatttgttttactagtgttatactaatttataaacatggtcaatgtatgagttaaatattttatattctatcatatgacatatatatgcaaattccatgacagaactaattcataatgcagatagatcatgaataatgcatcacaaacaccaaaacctccaaaaaccatctcacatcttgctcacaaaaaacatataaaacccaactcatttctattttcctctgacatacaaattttaagaataataaacccaactcatttctagtcaataataataataaaaatgacgaaacacattgctacatttctagttctcatcgtggttctcttctcctctacatctaaaggtaaacatatatattaggttttataatttttatatacaatatttatacaataatatattatgatctctaacttctaagcacatgttatagcaacgagtagtggtgatgacaacaaccacaaggcatggaacctatgcaaaggaaagaagattcacaacgcaccgttttactgtaaacaaccagagtgcagccagctatgtggagacattcatccaagcataagaggtttcggaagttgtagaaatgaagtttgccagtgtctcttcttttgccctgctaacaaaaacttaaggaaagacttcatcaaggctaataaactatccaacatcacaaaactacctaagatgtcttcatcatcatcttcttcctcttcgcctacttctaaacatattaagaagccttgaaattgactttgctatatctaagataatagtagtagagttattaagctagctatatatagttctaggagatatataattaaagatataataagacttttctttttccttagagaaaatgatggaaccatattgtgatattaatgtgttgaagttaggtagctagtattttgaacttttctcagcatataattaccactcaataacaacgtaactaaggaatattgtcacatttggatttatatacatatatatattttcttgtggtgaagtactattgttcaaaaaattgaaagtatttaatttttagtggggttttcttagcttctcctaaaaacactttccattaaacatgttaattaggccttaagtataagactatattatattaaagaaagaatattgtaaactacattataaacatggaggcttcaaactctagctataaaaggtagcgacatatgttgtaacacgataaaacaactcaaaaatagcatgaaattagcgggtcggcgtttaaataagcaagtatcaaaatagatcatgattaaatttcgggtcaaactcagattaacttactaaaccccaaaatattttaacactagtaagtgtgcatatatattaggggttttttttcttcataaatatagaaaaatataaaaaagtttatttttatatgacataaataaataatacaaaatatataagatcaaaaaataatcaaaatttaaaatatgaaaaaaaaaagataataaataaatttgaaaaaaatttgtaataataagtttcgtcagaatagtcaccggtgtcggaaaagtcgccgaattattcaccgaaaaagttatcatcgccagaaaagtcaccgaaaaaatcaccgtcgctagaacaatcattgaaaaagtcactagaagtagatttctcaaatataataataaaaatagaaccggttccataacataatgaataaaaataaataacacataataattcaaactagttataaattaaaatagaaccgattctataacataatgaataaaaacaagtagcatgcaataattcaaaccggttataattaaaaatagaactggttctataacatcatgaataaaaataacatagaataactcaaaactggttataattaaaataaaatcaacacaaaataactcaaactagatataattaaaatagaacttattctataacattgttataatgaataaaaacaagtaacaagaaataattcaaaccgattataattaaagaactgattctataacataatgaatacaaataaataacacataataactcaaaccgattataattaaaaaaaacaaccaagaaattagctcctaaaatactgaaacataataattctcataaaactgattataattttttttttaaaaaaaaagcggggatcaatttcaaaaatactaaaagataaatataaataaaaccggttccataacaaaataaataaaaataaataataacatgcaataactcaaaatataatataaaaaaaccgattatatttatcaattagttaaaaatttaaaacaaagaaattggtttcataaagtaactaagataaaaacttatacacaaaaatcagttaaataaaaaattgattacttaaattaactaaataaaaaatcggttcccgaaataactaaattaaaaactagttctttacattaattaaattaaaaatcaatttttaaaataaataacttaacttctttaacttagttacatttttttttgctgaataacaatttacatgcattttgtatatgcttaacaataaaaagtataggcacggttttatgtctacaaaactaaaatctttccaggcctccaaaactatattatcggaggctccataccattataatataaaattttaaaacaaataacatacaataacttaaaatataagataaagaaacaagttatattatcattgttaaaaggctaataagaatttttgcccctgaactttgacatgtaccaaatcataccccctaaacttttaaggccattgaaaatgccccctaaactattgagattttggatttaa

SEQ ID NO: 162998 - DNA, 2383 bp, Cannabis sativa
ggcatgatttggtagatattaaaggctgggaagcatagcttaggacataaacaatcactaaaatagtaaaattaaatgaaattagacaaaaatccttaaatctaacaatctcaatagttcgggggaaaattttaatggccaaaaaagttcagggggcacgatttggcacatgtcaaagttcaagggaaaaattactaattagccttaataaaattgtttgaattggacattatactaattttttaaaacactttgttgatgaagcattaacggcagggctgaccctaagctaaggcaatgtttatgacctacctattttaggggaccaaacaaaaaaatatctttcaaaaatgtacatattttttaataaacttttaaaaatattatttattcttgtaataagggtctattttttttcctaaggtccaatttaactcaaggcaggccctaattaaacgtgatattaatatgacttagttcaagagtttaaataaaaaataaatgcataaataataatataataataaattatgagaatatatatgaattactagagttggtatttgtatatttaatgttaataaattaaatttcaagttgttaaatagacttttgtactgtaattatagttgtaactcatgcccacatatgcaaattattttaaaaaatgagcgtaatataactgaagtgagatatatgcaacgatttttataattgaggaagaatttttacaaaaagtaaaataaaggacaaaactctacacaaatcataattgaggaggaaaaatcatatttattcttatttatatataggatagatactattttgaaccccgtattttataaaagttatcaattggaccttctgttttgttaaatgacaaaatacaccttgtctttttttaaaatgatccaaacaggaccctgaattaattttttttttgtcaaaataaaacttaataataatctgatttagagttgttatggcaaaacttgttacattttttatacgtgttcatgttagaaattgttttcaagttgattttattaaaaaataaaattgtcgaaaattgagctcaatgtcttatttttacaattttagaaaatataggatttatttgtcatttaacaaaacagatggtccaattattaacttttacaaaacacaagatctaaaataatatttacccttatatatggattgaataataataaaactatagctaactctttgctgatagtctacataatttcttgtattttcatttcttcctttatcgaatattctcgtttgtaatcttatgagatctttttacttatttttaacaaattaataacaataatttgtaaaattttaccctcattttaaattttatactattattagtgtaattttttttaataattattagtataattaaatattaacttttaattttaataactatattatacaaaattgttaattattggatagacatttactagagtcaaataaaaatacaaacaaactatattttagggaaatttgcggcaaaaatctcctaaaagttgactttcatgcagattagtccccaacctcaaaaaataacggcaatagtcctcaaggtcatgttttttctaagtccgttgatacccagtttgacagtcatgttaagtactggcaagaatgccacgtgttgaagtattattagtctaaattttaattttaattaaaaataaataaaaattttaatattattttttattttcttattttttttcttcactgtttgtgtttatccttcttcttcttcatggggcacaattccaatccatccatggccatggaaaacacaacaactgagaggcccaagaacatgttgctcactgcccctcccgatctcctcaaccagccgcctattttttttttttttttattttcaatctctatgctcatcaccttatctctttctcccccttccaccatcattgatttaaaatccagaaatggagattggctcgttgggcttcaaaaatgcccacatcagagccatggcaaggtgaggctccgacgacggggttggctacagacaaggcccaaagctcatggggacagagaaaatcagcatatcggagcttgggctttcacgaatcaaagatggtggtgacttgggatctcgcgagttgaccttaacgagtttttcaatttgagtttcattaattgaagctgcatatggagacctggatgatggagtttcaggcaacctagggcggttgcgatctgtagatggatgatgtggtttcaccactaaatttgacgggagaagggtgggtgggggttgggagtcggcgtgtgactagatgaagaagacgtcgatggtgtggctggatgaaaaggatgt

SEQ ID NO: 162999 - DNA, 1282 bp, Cannabis sativa
tcataaaaatagttaaaaacacataatttataaccatgcaaattgactttaccataaatatgtaaaaattttcctttaaaaaaaacaatacaaaaactaattattgcactttgcatacatggaaagcaatgagtggaaatccaaaacacaagcacgtggtctgtgccgcagagaatcaaaactccactgaaacagtttcctatgcaaaggcgtggaagctatcaagtacagcacagtacaccataagcaagcatagactctaataattcagttattcgaagtagaaccaaagctcaaatccccactctttattctcacgcgcttaaacaaaggagattaataaagtacacaaaaccgtacaaaaagagaaaagtgtaatacacgctctggttaagagagtgggtccaaccaaattataatagaccatgaccataataataataagaaattaaataatcatgattattggattgttactataattgttattaatttcactgtcacgtgcgatctttggattctttaacttcttggaccccaccacgtgatctgtctcagtatttaattaccaaattacccctaggtatctattttatttatttttttacccctaacctaaaaataaataaataaaataaaaaataaaaacggctagtgccactgcaaagctctgaaaaagcttatatttcttttttttttctttcttaatttcacacggatggagtttatattcccaagagaaaataataataataatttttctttaattgatgggtctcaatctaattaatcttcatagtatgaatttgatgccatagaatggaaactttgggggttttgtaaaattcatgagtgaagaataagaagaaaaaaagatgagaccttttgaagaaaggaaaatttagatataaagtgagatagtgatatattatatgtttcttcaaatttctcttttcatcttaagaaaatgactttacttatatgaaaagaaaaaaaatcataattggagtcgaatatatcataattaccttatatatataaggtaatcataaggtaggtaaagaataagcacctcctaaaaattaacataaagaagtaatttttactaaaaacacagctacttttagtgaattttttagtcagtgcataaattttttgggattaaatatgacttttagggtgcatttggaaagccaccatgtaattagatttgtgtgtattggaagtaattacacaatttgacatgtttgtctgaccaagtaattacactgtaactgtgtaa

SEQ ID NO: 163000 - DNA, 1957 bp, Cannabis sativa
aggttttcatatgctcaccttacttttgtctccaagttctttaagttcagcttcaattagcttgtccatggacttgacttccactttgtctgggattgcagattttgagacttctgtttccagacactgtttctttgctggcggttcttcagcctcagctgcatctgttccattgctttcatcaacctccttattgtcattaggttcgccgtccttaccattatcaggggagtcagaatcagttttattatgatctagtgtctcacttgtttccttatcattgcttttgtcaccctcagtagaagtagcagatttattctctttcttctcctcctcttccccgtcctcgtcgtcgtcagtttcactagaagaatcagagtatgtaaacttaattttcttatttgaagctttaccatgtaagcctccaacctgcatgccaggatccttcccaatgactagttcctcaaaaaactacaaacaaaaaattagaaataatatcaatatcccatgcacaagtgtttcatgcactagcaatttgcaagaaacgataaccaactaatttttggataagttgtgcttgaactaaactactaataagaaaccacttgattcattatataataagcaccaaatgagaaagtgtcagtacatgagaagttgatatgattcaacagttcttcatcagtcaacaatttaaaatcaacctgctggccctgtgattctaatgtagatagaacattaacactcacaaggaatgtggaggtacttaaatatatagctgaaggaagagtgatataagccgataacagatcattgaaattcaccattcagctcatcaaaattgtcaaaagatatgaaattcttggtattaattaccccaataacaaagtttacacacaactattactcacaaagttcaaacttttttttatatctgaatgatctcaaattaagtcattcatattaatccttctctaaatacaagttaacgatataagacccgcctaaacttattaacctaattcttcacaatttttatctgaattcttctgcttttcatacttgggcttcactctcatgccgttccttggtataattgtattcgaggaaaacttttatctaatttacagacaaatatatgtgcaaatagaatgctgccgcaagcaacaataccatttaaatttcaaacacggggggaaactgagtgaaatgttttctaagttaaacagcaattcaccaaaaataaaaacccagatgggaacttaaaacttaaaattgaaaatgaaaacctggaatctagaaatattatattaacagtaataataaataaataaataaataaaagagagcaataaaaagatagaagaacataccgagtcaatgacgtcaatggcctcatgagaggcttggcgttccctgccaccatcacaggtaatgaagaagccctggactccgggccgtaatgggtaggaacccttcttcttcaccggcttctgcaagtcgagatatagcctcaataaatctaaaaacccaatatgtcattaaaaatatgagtaataagcagagagatagagaagggttacgttgtgaggaagataccgttgccttcccttcttgaacttggaagagttgttgaaatcggacttgggtttgttctcggcggccattagagggaatgaaatagaagaagaaatgtaaacagttgggttgagttgagtctaactccaaactcccagaccttctgctacacttgttcggtgttctccgcagtggcacctttttatacacctaattagaatttctgcacccaacttcaacttgaaccaaatcattaaattttggctaatttgcaatttttccctccgaactatgacacttgctaaatcgtgccccctgaactatttttgacgttaaaaattctcctcaaactatcgacaatgcttaatttaaggtattc

SEQ ID NO: 163001 - DNA, 3810 bp, Cannabis sativa
aatatacgtatatatgacaaaaaaagccagtaaagaaaacggactctttgtaaatgaataaattaccaagaacaaacaagaagaaagagcaaaacctgttgccccagtggcagtggacttgcagtctttgcattcgctttgccatcatccagtaatttgctctcggaacaagatttcatatgcttccgcctcttgtaagtcagaagtacctcccttttcccagagctcaatcctgcaacgcccgttgttccattcccattattaactacttcattttgcagcccctctaggcactccgtaccgtcaccgttgcttgttccttcgtcgccacccatctcaaagaaacccaagaaagcaaaaaatgaacccctaattccgcccaatttgcaacaacaaacaagggtttcgaaccgctatcacctatctacctaaaagttcataaattcccgtgagtttaattaacaacacgagtaccaaaaaaaaaaaagatgcaaatgaagtcaataccgaaacagctgcaaacaaattcattcaatttgaacttcgtaagcaatacagtaaagaccccaagaaacacgaggaaattcaatatccaaaattgttacctaaagcctaggtaggtaataaaacgaacagaaattcaagttagagcaagataaaaagatatctgacccttgtttcggacataaaagagaatgaagacaacaatttagttagctttttatgaaattcgtattacatttcccggtaaaccaaacaagagatataccaaacaagatctacattgatttgacaaagaaacgaacctcagaaaagacgattgatcaaaatcttgaaccctacagaaacgttcttcttcggaaatggtattggagagaagactcgaaccgaacacgagtcacgacgagtgccttggaattttgaaaagagtgtctctcaactgaagcgtttcttttctttccgctgattatgttttcctcttctttcttttctcgtatttatactattaagtaagtaataatgggattactacgataccggtttcttaaaacaaatgattaattaaattgtattattggatttattattaaaattaaaaatatacataaatcttttaaaaaaaaaaagcaaaaaatgagcaatatttgtctaagtaaatgatttgatgttataattatcaagataattagtaagttagagtgtctcttagaaaattgttgtgagttagttaacattgttagataattgttagcttgttagtcgagctgtatataggagcattgtattgttatgtttctcagttaatgaaattctttaacatttagtttatttctctctttctgaactttccttattctctcttcttcctaaaattaatatggtatcagagccacttgattaatgagcttcttgcttctacttcttcttcttgttcatctcaatattctcatactctgttatggtatgacacgaggaggagaaactcaaactcgtaataatggtaacaaaggtgctaaagattcgaatcagtttgcagctcttaatgaaagcaacagatttcttacgatcgatccacacagtccttattatatctcgaatgcagataatgcttcttcatctctggttccgaagattcttaccggtgcagataactatagtttttggaagaggtcgatgatggtggcactgttggcaagaaacaaaatcaacttcataaatagaaagcttctaactccagatgaagatgatgaagactatgatgcatggatcaaatgtaatagtttggttatttcttggatatcgattctaaactctgtatcacatttgataggtgacagtgttatgtatgtggaatgataggtgacagtgttatgtatgtggaagatgcttctcagatctggtctgaattagaagagagatttcattagagaaatgctcttagaatttttgaagtaaaaagatcgatgtagaatttgacacaatgatcgagtgatgtcacttcgtactacacttaactcaaaggattatgggaattgttacaggaacataggccacaacttgtatgcacttgttgagctatgaagatcatacaggagtatcaagatgaggacaaagttcttgagttccttattggtctaaatgagtcctatcttagtgccagatctcagttcttacttcaaaatccacttccaaatgtgaataaggcttatgcttgtataatttaagaaaaaaaaacaaaaaggaatctttattcctcaaggtgaagcttcaaaatctactattaaaaatctaggtcaatttgttggaagtgcacaaggcaatcgaagtaacaatcatactaatcatagatctgacaatagatacaatcgttttgacaatcgacctgtttgttcacattgtgaaatccctggacatatcattaccaagtgttatagaattcatggctattctcttggccatcgattatttgtaagacttccaagagaaaatcttaaaccatgatactagcaagaacgatcatcaactaacttcacaacaagaaatgatgctaatgaaagcatgacttaagagcaaaacttggctatgcaatgtagaagcttatgtctatgctaacatggaaaatgtatgaaagctctcagcaatcacagcaatctcaacaacctgatcaacctattgtgtcaaacatttctggcaatgtgtatttcatctctaaatctagatagattgttgatactgatgctacacaccatgtatgttctaatcctacttggttttattctatccaaaaagacactaaattgacacatgttaagttgccaaatgtaaccaacgttaagatatcttttattggcactgtcaaattgctaaacataactcatacaaatgtgctttgtgttcttgagtttaagcataatttgatctcagcttgtgccctatctgattcagctaattactcttttatatttcttcctaacaaatgtgtcatccaagatatcaccaagaatcaagtgattgggatgggtgaaagaatttgcaacttgtattgcctgtctaaaaataattttcctgttgtttgttctatttttaattctaaaatcagtaatgacacattgtggcattataggcttggccatgcttcttgtgtaaaaaatcacactgaataaagctttacaatttcaatattcacataattctgatttttattgttccatttgtcatcttgcaaaacaaagaaaattacctttcatttccaatcataatgttttcaagcattgttttgatctcattcacattgatatttggggaccatataacactcaaattgttgaaagctatagatacttcatcactattgttgatgattgctctaggtacacctggatcaatctcataaagaacaaatcgtatgctcaaactgttgttccagcctttattcaactagtcaaaactcaatacaactctttgataaaaggaatcagatctaacaatgccaaagagcttcaatttcctgagttttttttcttcattaggtattattcactaccattcttgtgtgcaaaggcctcaacagaatgttgttattgagagaaaatatcaacatttgttgaatgttgctcaagccatcttatttcagtcacatgttccattaccttattaggggaatgcataagcactgcaacctatattattaattaaacacctacacccaatctcaaacacagattcctttttaagtgttgggttttgtgccttaaataaaactctatttcaatgtaatcttttctattcaattatcaataaagaaacaga

SEQ ID NO: 163002 - DNA, 2327 bp, Cannabis sativa
aaaaaaaaaaaaaaactaacaagacagcatttagattcacatttagaagtccatcactcaccaacataaaaactaccaaaactgatcccaaaatatgcaacaagactctcaagaaatgaagattgatatggcgtaaactgtcaagaaatgattatagatagaagagcagctatgatgccaagaatctacttgcgttccaccaactgaagagtgaataatcgcaaggctctaaaatacgctgctatcaaccaaaaatataagagtacaaaggaatatcctggctaatattcagattaggtcaccaattaccaacatcagcaacaatgttggatgagtatagttacaaaacaacagatatcttcattaagccagtggaactacttgctttccaccaatttgaagaatgaacacccttgttttcacattctatgtactataatgaaaaatcatgctatagaaaaacatacagctttaagttctggatcttaacccaaatatttccagtttccacttaactccagaaaatgaatatccaacataattctcgagaaaatattacaaaaataacagtcctaatgtatgaagagattacatgatacaagaatttgcaatttttcttttaaacccatagagcaatgatgaaagacaacgaaaaaaaaaatcaagaaagtcacataaagttatactcactcctaatctgtaggacccaaaagtgaatatgacagcatttgcatcctccaccatctgatctgtatagcctctttggcgagttaacagcttcacccaatcctttacaatctgtgtcacagtgattagcgaatcacaaccattattcaaacaattaaagacatcacataccaaaagaatatgtaaaaaaagaacaaataaataataagatgaaagtaaagagcattagaaatgattgtaaaaccttactatatcacaaactaattaatgcgtagacactgttagtttactttggacaacagaaaatcatttaggcttcatcactgtggctattcagctagacctatcattcatcatctatgcacaacagttaccaaggaaaaacattgaaaaataatctacttaaaaagaaaatcctaaaaacaaacaaaaactgaaatcaaaaatagaatatggataaaagcgtgtcagcatcataaaagacgtttactgaacaggaaacttcaaacaaaagacagacttttctaaattcactaacaggaaaagggggatagggttggtaatgcctaaaataacaagatatcacaataccgacttagattttgttaactttagaaataacgttataaaataccgtagattaaatattacaaaaacaaaaaataaattaataataaacgaaagtagtattcattacctccgcaatgcgaccaagaacctcctctctcctagcagcttcttcttggctctcgtaaagccccgaattgatcaagaactacaaatttcactcaataaacatgatttgcttaaaatgctaaactgaagaaacaaatccctaagatttgaaatcggagaaagaagtaccttttccaaataatcattccgatgaagatccgcgtcggtgggacccgccacagagattgggttcgtgatgccgtactttttggtcggcgatgatgatccattcggattcggtgaaccaaccatctcagttgcttcagaagtaaaaccctaagagcaaaggtagagtctaaagtcggtatctagagattctgatttcaaatcataggaattgaggatgaattaacgctgaaactgaaagaccactcactcactctcccacaaacgctgtagatattcagatccaaacccctaatttcgcaaggagagacgagggtgatcaaaaccaagtttgcaggagagaaagagcgagggggaggaggggaaaataggggagagagagagatgagaaagaaagatcgagagaaaccaagttggaaagattttttttattatttttcgattcgatttattcttttttccagcaatcaatttattgagagagttagatccagctaagcttagatatttgtttttccttttcttttcttatttatttattttttaaaatcaaaggatggctttaaagtacttttgtagacttaaaacacacttaggaagtctttggtaaatttgattagtactttcactaagaaggtgaaaagttatgaaattgtgaagttattttaagtttaggtaaatagtagcataagtacctaaagttttgagtttataagcggcataaatctaataattttttttagtggcataagtactcaatgtttataaaactgtaattt

SEQ ID NO: 163003 - DNA, 658 bp, Cannabis sativa
gaaaccaaacgaatttggtcataaagcttcatataatgactccaactccaagtatgtagtgagtaaacttgctctgtgcaatgccatttatgttccacactaacgcaatatcctatttatataccacatatggcatcaatacaattttttactgcaaaacatatgagaaatggaaaaactgattagatattggatataagttatattatatacatatatatatatatatatgtatatctatctatatgtataattaaacctgcagaataagaacatgcttctcctatatggtctttagagtaccaagcaaaatctttattagtatgaaggaacgcagcgtatatacctgcaaacatatatatatatatatatatatatcatatatgtacaaagaaatgaaaatttagaactaggaagaagatgaagaaaaacttacataatgagagcgtaagaggagttagatttttttactaaaaggagaaataaaaattattattttataaatgattcccgctgaaaatttttagctttttttttttcgtgaaaatgaaaattttttagcttaatatttccttaatcatatatttgaaatacatatattgttggaatttattttaccaggatcttagatctacttgttgtttaacaccctaaatat

SEQ ID NO: 163004 - DNA, 1117 bp, Cannabis sativa
aggcaaacccatttttgtagtaatgaatcttgaccagacttgagccagagaatgtggctcccgatgaagatgttcctagtggtcctgctcctaaggaagataatattacaaagaggacgaaccccaaagatcctgaaacttttgattccactggggacaaaggaaaatatgtcatgggggaacctccaaaaataactgttcataaggagatgcattgtgaaaccgtctttctaatggcaaggacctctgcccactcaagttgaggaagaaacttaactttccaaattgtcgaagaaaacaccactcctctttgatctcgaatgaccataccaagtccgcaagagcttatgttgattgcggcatccatattagctttgaagaacttggtgcctagaggaattcaatggggaaaaggctcaacattacaaagtacagggaaagtagaaatagaaagaggggcccaactattttcatggggatacgagtaaaagaagttagtcatccaacgtcccactaattttggaggaatggtaagcttttcatgcgcgcacgaaattgttacgacagtaccaaataagtcactaagtgacaagaattagttcaatatctctatggggaatttgtaggattaaattacaagttaagccatagatatcacttacaagagtcgaaggatcaccaagctttaaagtgtaaagtttttctctttcttgttggaatcacatgggtttaccagctagggtctctcttgatctctcttttgctagctggttggatagtctctttaactgtcttgatgatgaccgtgtttgttccctctctatggtctgttggtccttatggaaagcaagaaattcaattgtttggaaagataaggcgcgtactattgcaaatgttgtaacatcagctcgcatagctcttgatcactggcgtaaagctcaagataacaactctctgtcttacatttactctagtaattatgatgatggagctgaactttggactaaaccgggtataaacacaatcaagatcaacgttgatgctgtaatttttgctagtgacaactagtatggctatggaatggttgcaagaaacgacttaggatctctcattgatg

SEQ ID NO: 163005 - DNA, 1884 bp, Cannabis sativa
  modified_base (1815)..(1816): a, c, t, g, unknown or other
tatcaaatagagagaagtgtgatcgaaattggtttgtttattcaaaaggaattagatagaatattttgtttttgttgcaaagttttaaaagtgggattagtagaggcatgttaacaaatgaagactttagtgattagacacatattggtaaaagacttaaagaacatgaaatcagtatagaacatgttaaaaatataaccacttggtatgaattgcgtttaaggttcaaaaagaatcgaacgattgataaaactacccagaataattgaaaaagaaaaagatcattagaaaaaaaatttactaaaatttcttgttaaacataaattgatctttcatgattctaatgagaaattatatcaaaaagtaatgaaatttttttaggcttaattgacatgttggcaaagttgggccggttgaagagctatgcaacttggtctattgcccagagtccaccaaactaaatagctcaattaagttccattttaaaggctattttgattctctaatcccaatgccacttttaatgttaaattattaattaatatatatttagttaaactttgctttcaccgtatatataatattaattatattatattttataaattataagtaaaattgatgagtagaaaaacattaatagattagatttttgcaggcaaaatggaacaacagaaaaatagtagtaagtgaaaggatgattttttttttttgtttttttgagttggcttaccatcaagtatcaacatcaatttagtgtaaaaacatcaatttctccatcagattttaattaaactaaagtatctatataatattttaaacttttatgttaagaattatggggttccatttcaacaccaattggtaatgagtagagtagcacatgttcttatatatggttcaatactttcacatttaatccatgtgggacaatactctccaatattttaatatatatgaagaacaagaaatgaaataggaattaaatattttttgtcatattgttttattctttcttatttcttgatttatttctttgtttttttttttatatacaataaatataatgctaaaattattagagaaaaaaatatatgtaatatattttatagtgttcaatgttcattctcctttaataccattaattcgttctattatattatattataattgctatttttaattaaaattaatcactatttttttaattattaattagtcactacttattagtactacttttttttattgttataaaaatatcattgcataaatcaaaaaattaattaaaaaaggtattgggcaattggcgactcttaatttgtgatagatttttttttttaatttgatgtttttaaaaattgaagatagaattggtagcgaatactagattcttttgttccttttttcacttctaatttaataaattattactgtattgattgctttttaaaatattatattagttcttgtgttttttttttcactatgcctcctatgagaaccagaagttattttagaatatcataattatgatattattaatgttgaaattcctgaaaatatggctccaaatgagaatgttagtattgagaatcaaactgaaagggttgatgtggaaaatagaagtgacgtacctattgaaaatgatattgtgaaaaataatagtgaggtgctcattgaaaattataatatgaacaatcataattctaataatataaatagttatgatgatcatttgaattattaacttgaaaatgatgatgttttagaggataatgataataacaatgcagagcaatcaaacccatttgnnatttgcttgatatatttgatccaagaaattgggatgctcttgattcaaaaatgattaatttattagtg

SEQ ID NO: 163006 - DNA, 3166 bp, Cannabis sativa
ggacttgacggagccttacgacaagaagcaccgcagaacggcggtgatcattgggttctcatctgggatcttagtcttaatatgctctctgctttgtttcgttatggccctgaaaaaacagaggggacagaagggtgatcgaagcatggacccaataatggctgctgaggtggctgcgagtgcacaggcggcggtggtaatggagttagagcaagagaaagagttagagcagaaggtaaaaagggctcagggaatgcaagtggctaagagtggcagcttggcattctgtgcaggcgaagcccaattatactcgttggagcagcttatgaaggcctccgctgaacttttgggaagaggtacagttggtaccacttataaagccgttttggataatcgtttgattgtgagcgtcaaaaggctggactctgttaaactcagcggaacaactagggaggcgttcgagcagcacatggaatcggtcggtggtttgaggcatccgaatctagtgccgctcagagcttattttcaagccaaggaagaaaggctcctggtttatgattaccagcccaatggcagtctcttctctctcattcacggtaagttcttcatcttccttcttcttacttggtcttagtgtgtcttgactggtcactggtggtgagaggtgagtcttgtttttaggtaattgactcggactgcaggtccttcgtccacgtgacgcgacagttaggagatgctattataaaatgttttttctttttccttttcatattatcattagatttggaattggattatttagattataataggatgactggactaggtatgatattttgattctattggttaatttggtttggctgcactcatgccgagtagtaatttattattctccaccgagaatcctgcttgtgattaagactaacaaggcgaagttgggaattgactatgattatgatgactcggataaaataattattaattaattgtaacctgtgtgttagattaagagtccaaaagcaagtatgatggggcacaggacgaagtggggagccaggtccccacatgctaaatctaactctatattgaaagctgtagctaataaatatacttgctctttccgtacgtttggctaagtgtaagccaagccatatatatgccacacccacacacgcgaaagaccatttatttgaactactatgatcacactacttttcactatctacaagtgtataatagaaatcttcttttaattacgtactacatttttacaggttcaaaatccacgagggcaaagccactccactggacatcatgcttgaaaatagcggaggacgtggcccaaggcctttcctacatccaccaagcgtggaggctcgttcacggcaatctcaagtccaccaacgttctccttggccctgactttgaggcctgcgtcaccgactattgcctctctgtcctcgtcaacccttcatccactgatgacgagcaggttatggcagcctgcaaagcacccgaaatcctcaactcgaacgggcaaattacatcaaagtccgacgtctatgcttatgggattttattgatggagcttctcaccggaaagttgccatcggagcagccatatttggcgccaaacgagatgatggagtgggtgaagtcaacgagggaggtcgaggagggagtggaaaacaacaaaatggaaatgcttcttgaagtggccatagcttgtagtttaacatcgccagagcagaggcccactatgtggcaggtgatgaagatgttacaagagattaaagagacggtattaaaggaagacagtgatccagacccgcttcctgccatgtcctagtccttattcatcacctcactatttctaccatgttttggcataaaaattagattaaaacagaccaagtgttaccctttttttccatatataaatatgttttatcttttctaactattatttttctttctccctttcaatatgtatcatcgtagtgtacatatatttttctaggttcactcccccacccaaaaaataaaatagaatttatcatcactacatttagttttcttttttactttcacaataaacagcgtcactaccagcgtcagtttagaactgaaactaaatcattggtcttttctttaattatcatcaattttaaattgaattgctaattataatatttttttttcttaactttcatatctgaaagtacatagtacatgttagaatataatttttttttaatttttttttatgacagtatttgttataattataacattattactgtaaatttttgaaaaatttcgaatagtttacaatactaaaaataagtttggaaattttttaacacacatggtaagctagaatatatcacgaattctgaatctatatcgtaaactatttagattttttttaaaaatttacaagtttaatattgtatctataacgaacattcttataaaaaaaattaaaaaaaaaataatcctatatgtatttttagacacaagattaaagacgttgatagtaggactcaattttttttttttttgaacaatgaacatttattgaaaataatttgagtttaatacatcatcatcagaaaaagatgagaaatcgtctatcaaaattagttcgtcgctcatcgtgagtgcacaaactgctaatttatgtatagaacgaacatgaattaaggatacctcaagaaaatttgataactaactaacaaaaaacatctaagaaaaatcagaatagcaaaaaaggaactcttaggaaatataatagacagtccacgtgcaaattacagatacaaaatctattttctgctagtctccctagtgaaaactactccaatacatcaacatgtcacataatatgcttaaatgacaatttgagctcttacaaaaatattaaaagaaatttatgaaaatatttttatatcaataaactaagcaaactaacaaatctcaaaaattaactgccttcaaaaaaaaagtatgaaaaacttatcttatttaggaattctatgtccttattaaacttatgtgaaagttaataatataagaatatttttatttaaggaaatatatttctatttaaagaaataaatttctatttaaggaaataaataaataattgattttctgataa

SEQ ID NO: 163007 - DNA, 900 bp, Cannabis sativa
tagatgtcttaagagagaaaaggaaatatctctgacaaagaaaatttggactgcttaagtctttggatagaatcaaatctcttctctcttttacagtcatctctaccaaactttttttatctaatatatttatatttttttttgtctgggtcaataaagaaaaaaaaaattgtgacaaagaagcaaatagttttactattgttattatgtttttttttttttcaactttacttattattcccgtttaacccttagtacacgcaataatgaatagggtgggctaagagaagtatggagcttactattttaccttgaaatgaattttgtttggctatatggaccgttcgatgtattgatattatcaatgaaaaatgagtttatggttatgattgaaacttgaaagactttatcaaaatccatttttgatagtgccataatttgacactagtaattacttgcaattaattaaatagttaatttcaattattcaataagtgaatattaaatcgatagcgattcttttggactatttaatcttagaagtaacaatgacatcctaaaaatacgattggttttaggctattttaatttcagagttgttgagatcgttatctctatctatctatatatacttgcttatagctgacttgagatatattctatgtttaatgtctactcccaccaattggattaaatttacatgagtgctttggtaaattcatattcgatatatagacagatattttcatagaataatgttctgttactaaagctttattcccagatgtgctgtgtaattatgtatgttttattagaaaaattaataataaatccaagatttatttgtatataacatagaacacaataataatacataataattaggtatgcgtacctgat

SEQ ID NO: 163008 - DNA, 1592 bp, Cannabis sativa
gttcaacaagcttgaaggatggaaaatgaaacttatctcttatgcagggcgtctcactttaatcaaatcagtcacctcctccatgccgatttatgcaatgtctactgcaaagatccctctttctacttgtcgagatcttgatgctcttatgagaaaatattggtggctgggaaatgttgaaaagaatagattccttgctctaaaagcttgggactggatttgccaaccgaaagcttctggggggctaggaatcagaagatgtgaagatatgaacaaagctttattgacaaagttggcttggagtctggcaacaaaagagcagaaaccgtgggtgtcatgtttgcttcaaaaatattgcaaatatgaaagttttctcaatgtaagcagcaagagtagtgactcctaccaatggaaatgcatattgaatacaagatcaatcatattccgaggatcgatctcagttgctgcgacggggaactcaattgatttttggcgtcaaccatggattccttggttagaataccaagaattcgtggatcttatgaatggccttaagaataggggattcacaaccaaaactctggaggatatttcaataggtaataattggaatgaagagatggtgatgcaaatttttgggagtgaaatgggcaatcgagttctaaacattcccaggataccctccccttatcaagaccatttgttttggaagggttctccaaaaggcaaattctctgttaaggccgcttattatgttgatcaatgttggcgttttgcaccagtcaaaagtatttggaattggatatgggaggcgggaattcatcctagaatttctgttttcctttggagagtcttgaatgatgctatccccacaaagagtagattgccttttttgaatgataatatatgcaatctatgtgaagtagaagaggagagtcctctacatttgttctttaattgcagcttcgccaaagctatttggttcgggggagtcttaccaattagagttcagtatgttgaggagaacaatttgatctgcttagtggaagaattggtgaataacttccctctaactgattcgggagtaagtagaagttttttcctcaattacattggctgcgtctgtgatgcaatctggacccagaggaatgttttttgcatcaacaatacaccagtaagtccttcctttactctaaagtcagtatggaaaaaattcgaagagattcaaaacagtatgtgcaggaaggagattgaaagggaaatgagcacagttcagaccaggaggtgcgatgtaatccagcttcctgcatccaaacaggttaaccaaatcttgttcacggatgcttcctgggtgaagggagaagcaggaatagcagttattagcgttaatttggagtctggaagctggtgggttaagtctcagcagcttgatgcgagttcagccttggaaggggaattaaaagcaatgcttcttgctctcaattgggcattggagtcaggatggggagaggtactcattttatcagattcgaaagtggctggacaagccttatgttctgcagaaagtagcccggattggagaggttcgaatg

SEQ ID NO: 163009 - DNA, 1144 bp, Cannabis sativa
aatttttacaatttatcaagaaaaataaattagctataatttaatagtttttttaatatatatttttgttatatgcataaagaaatatataatataatattatgctttcagaaagataatataatgttaattgttaactacttctttaaaaaaatgttaggaccaaggtgcgttttacttatgttaggagaggtaagaatgctactgctcaaggttagtgtggtcttttactttatgaatgtattattgtaattattgagtgactttgcaaattggtatatggttgtttgagaggtttatggggtttatgcatgtattgagaacttctcacgacagcaagggtcctatagggctctaagttgtaatcactttccttcaattgaataacactcaactgaatattttctctcttcattgttttaatgtttccgcatcgttttgttactcaattgtgatagttgggcacatcaattggtatcagagcgggaaatcttggtgtatgatgaatactcaaagttcaaagaaggtaatggagtcagttcaattggcagtaggggatgaggaatcacaagcaccagtttcagagtaatggaactcaatgaaagagaagatcactgcccatgaccaaggcatcgctgtcatcagagagaagttggatttgattctacggggtcaagctcgaattgcaatagagcttaccgatggaccacgaagcccaatggggaagatgtctcaatctccgatcgggtctagtaggtcgggaaatcaaaatcacgaagaaatcagtgtgaggcgagctaagttccatacgaggaagatcgaattgctggtgttcatggtatcctatctcgatgattggtactattgggcatatatattttgggttgtagagatttatgatcaaagagcaattataggcggcgattttatgctcggaaggaccagctcttcgttggttttgttaggagaacagccgctgaaaaatcagaagttggggagaacttaagaatcttcttctttgatgattcatgccagcgcacaaggggacaacgtatgatcggaaactggtgttgcattaaaccacctgttggaatatttttaccaggatctagatttactaccatgtatatttttaacatcctaa

SEQ ID NO: 163010 - DNA, 1677 bp, Cannabis sativa
aaaataatttccaacagaaactccataatagtcgacctccatcccagtccgtccatgttctccaccatcttctccactctcccatgactcaacaatcattctcccctactatttatactcagcaacagagtatttttaccctattcctacgcttcctcttctcacttacagatactctcttttctatggaatctcttgcaacaattatgaattcaaacctagtcttatctgagaaggaaaaatttgtccatacacttatagaatctgaccttgctgatggtcaccacgaaccaaaattctttcttgttgcttgatgtcttttacctgctttaaatccaaaatcttttattaaaacgatgggagatttttggtcgaaaaaatgtcagtttgttgttttggtttctgaaatgcagtctaaccttttcttgctaacctttgcttgtgtaggagacaaatatagaattatgaatggggagccctggcatttcaataaaaacctcattgttttacactctctatctgttctgcttaatgtcacaaaggcagacttgtgcaaagtgcaattctgggtccaaacacatcgccttcctttccttagtaaatcctgtgctcttgcaaagaagattggtgactgggttggagagtatattgatgttcatgagaattctctttatgaaggctaaggtccttttattagaaccagagtttggattgacattaatcaaccactaatgcgaggcaaacttgtcaatctcccaaaggttcgtgatgaacactagcttgaattttgctatgaacacctaccaattttttgctttatatgcggactgttgggacacccttttgagtgttgtgctttgtttcttgaggaggttgatgatggtcttgatccagaattaccttatgggcctgaaatgataggggataagttgccaaactcggggtatgaccgttataggcatgatttgtcaaaagccaatgcttatcctttcttaactagacttgccaaaaaatcaatctgctctaccttttctccttcactgtcaaacaagcaccttgctcttggaggtcaatctcaccccattaaccttacccaacccgaatcctcttctaaagaaaatatagtatcacagtctaaggctatactccctgactttccatcaccattcccatcctactttacatcaattccccttatttgatgaaggtctttccactcaacctctacaaatattggttccacccctattcctatcccaccaattaccttggatatccctgtcataactacacctattgttatatactcccctgctgctctatttgttgaggtcagttctggtatggtttgttcttttgcttcttctattgatgcaattctgatggcaacaaaagcaaaaggaaaatttgagatgatagatgaagctatacataggggtgaaattcgatctgttacggtcggtttttacctgctgccaaaccgaccaggcggttacggtgtaattcttcacaaaactgtaaccgaccgttaacatcaaaaaaccgtctgtaatcgacagtggttataaatggtttgaaacggtttttaacggtttgggctttacaaggcccattaaattagatttaatggttttttttaccgtttttgacagtttgaccacttattatatgttccat

SEQ ID NO: 163011 - DNA, 2443 bp, Cannabis sativa
aagacctcaaaagtaacaaaagtcactcggccaaggtccttaagaagttactcactgaagttccttaaaaattcactcggccaaggtcctcaagaagtcgctcggccaaggtccttaagaagtcactcggccaaggtcctcgagaagtaactcgtccaagctctttaagaagtcactcgaccaagcttttcaagaagtcactcggccaagctcttcaagaagtcactcaatcaagctcttcaagaagtcacacaaccaagctcttcaagaagtcactcgaccaagctctccacgaagtcactcggtcaagactcttgggaagtgacttagtcatgacagttggaacttggtggaatcttcctaagcaagaggagaaggaagtaacaagaatacagacacaaggacaaagtaagcacacaaggagagtacgaccacaccctttgcaaattctgaaggcaaggaggtacaaggagtggaggcaccacacctataaggtctgagaacctgaccaagggtactctacaaccactacccctatagcccgggaccacctgacaccaaataagagtacaaggttcaacaccacctcttgcgcctgtagcttgcagggtgaaagcgatactttgtcctcttgggaccaccatgtacctcaggcttttacagcctataaatacccctcctttagatgtagaagagggttggaaaatcatacttataataccatattgaaagcaatagaaattttaccattctcctctccatttcgagatagcaatttgaatttacatttcatctttctcttcatcttatttatgaacttgaagcataatttcattttatggccaacaagttggttgacgagttctcaccatcaatagtttggcgttgtttgtgggaacgacaagcttaagttgagtcatttcttcacaaatcatcaatacaaaattcctagacgctcttaccaccttcaggacgtggagattcatctggacaccaaccaattaatccccttagggcaagatctccccttgcctactgtcgaagaagaaggcaaaaatggctacaaacctcaggaagaagaaaacatgaatgttgtcagttccgaagtagaaggagagggtgcagatgggcgaagacctcaagtagggcaaggagataattgccatgaatagatcttgttgggtgagctacatgatggagctaatgcctccatcacgattgaggggggaggtggattatcgaggtgtaaggccccgtcacctataaggcacccctgccaccgacactaaaagatctcgaaacctcacatcatatgccaggaaaagagaagcgggtttattccataacgtcaagctcccaaacatgcatacatcacgaggaagagaatgagttaaagatgaataacttaaggctggaggaaattgttgctaacatgcaaaaggtgttggaagaactcttgatgggacgttacgaggcgcatctggtcaaacaaagggagccagaggcaaaaagaaaagatggatgtgagcttgaggatgaaggaatgtctaagcactccacgaataacatgtcggagtccatggcacataagcctcaaactagaaaggacccaaaatatttgtcgcacccaaagaaaacaaattcaaaggtagcccaaggcgatttgagagaaaaactcaaacaaaaagccagtgtcgagaaacaggtgccgtcactggtgaccccccttcctaaagatggtacaaaacgcactcttccaaacctctgggaaaaattgaacaggcaaaagtaggagcttggaaaggagatggaagatatttggcaaaggatagcacccgcatcatcagaagaaggtagttggagtgaggacaattttgacaaggagtcacctttctccagagaaattcagtctgaacagctacctcccaacttcaaggaaccaaatatactcccctttgaaggagtcaccgacccaaaacatcatctggattcctttaatgaaatcatgaaaatgaagaaggttataagtaaggtatggtgccaatgtttcgcggtgactcttcgaggcgcaacatacaattcgttcaaaagattggccccgggtcgattacttcatggaggcagttcaccaacaaatttttggtccagcaccatgcctcccatgattatgttgttctaaggacaagcttggccaatatcaagcatggagaaactaaaagcctgaagagctatattcagaggttcaatgctaaagtagcaaaagttggaagattatccaaagatgaacacaagatggctacagccgcatgagtcaggccaaaaggcaagctatggaacaacatgtttgttagaatattagttgtatattaggtgttaaagaattagggtaacttgtatttagtagtttcctattttgttggtagtttcctattttttagtctcc

SEQ ID NO: 163012 - DNA, 1159 bp, Cannabis sativa
agagagagagagagagaataaaaattgagctaagattattatttgtactattttgaaaaatacaatatttaaattgtcatttaacaaaataaaatgtccaattaataatttttagaataaaaaattacatgttgaaaatagtatttaccttttccacaataataatttttcaagaaaaaaaaaatccaataccaaatattattataatggttatgaaccagttggaggaaggaaaaactacaaaataagttgggtactagtaatggtcattgttattattatcatgatagacactatcttgttcctcttgttgtggtttttgacatgtttgggtggtgaagtagaatggttcaagtgtgtatccaagagagttttggaaagtagaagtgggccatgagagagtcacacctgtgtgtccattcccaaaattagtcataatgttacaatcatagtctggtgaggacaccaatcgagccctacaaagctttgggttcagcttcttattctcacaaacttctgaatttatgttcaactcaaatccacccaactcatctgtcgaatcgctggaataatgcactactctccttctctcatccatacatgttatcgatacaatcccacctaatttaacaatacataaaacaaaaagaaatatcatcattaatgaacaatcattttcttttttatattgagaaataaaataaatgtttgtataaataaataagtacctttaattggcttggcacctttaacccattcgctccagggacgattacagtcttggcatagcactttcccagttacacgtatatcttgtatggtttggtctccccaaacttgacccattataactgatgctgcgactatccataacgctactacagataccatctttatgatttgtctttaactttcacagctattattagtttgttaagtgatttcttgagaggaaccaaaattgtggatacatatatatagacaagactagagtagaagggaattgtggaaagtggaaggccactattctcaacgtgcattccatttactaattattatattagaaaatttattatattatgtataacattaattattgcttccaactactttgattgggataattataccgaaatttttaatttttttaactttatat

SEQ ID NO: 163013 - DNA, 1304 bp, Cannabis sativa
tttgttacgtattaatgctttgtggtattttccttttgaatcggtgtaaataactccaatagcactgggatctgtttgtttaaacatagataataattagtcagcatatatatatttatatagtcattaaattattttatgtgaatgaagaacatgtatgacacactcaaatttaacatattatatttatgtgtaattaatcttaattatataattaaaagtgatgagattccatttatgataaatattaactatatatgcatgctattgtgtgtatgtgatttttgtatgtttctatatataatatggtgctatgtcaacttcacatgatgttattacgtacaaatttatattatattgtaacagagatatagaccaaatagtctaattaattaaattttattttgaaatggaattatacgaaaatctttatataatatatattattattaagtgcatgtgaatgaataatgttcctactaactagctaataatatagtgataatctatataattaattaacttttggtgaataaactactattattaagatattaagagtacgaattaagaaatcatttaatttgttggttgaagccaacttttctagtgtgtgaaatgatttaaaatgattaaactaatacaaattacttcaaaccaaaaatagataatattaaaaaggagagtgaaagaacaacatacttgaggatttagtggagaagatgattttcttcacgtaagcatgaattgcaattttcatgtttttgagatttcccttattaagcaactcaacagctccatgtcttctccccatattatcaaaagtagaaccagattgtttagttccaaccttatgttttgtagtgactccattatcaggaccaacaccagcttccaacaaagcctcctcaaccgcaaattgccaagttgacaaattcgaatacgaaactatcttgctcttcacccactcataggctttctcaacctcatccatgtcccattccactccagacttagccaaaaaatcattgtcagcttcagaaaagaacgcggcgtttatcatacttgtccctcccaaaaccctacctcttacgctctccactccttcctctgaagtgaacctttgcgccggggtatccccatcatcatcgtctgcttcaacgagattagttagaaacccggacgcaaccaacgtgttggggtgagctttagggacgtttcctctttcgaggacaagaactgagtacttttctgatagagttgcggccaaaggacatcctgcggtgccacctccaaccacaatg

SEQ ID NO: 163014 - DNA, 1754 bp, Cannabis sativa
caaaaattataccttatataattatttcaaataagtatgagatctatgaactcactactctgacaactagacatgtacattcaattttccgacccatcaacataattattgcctataaataagaccacacatgtcactctataaaagattcaaatttggttattaagcatatacactcaaaaacagtaatattacacaccttaaacactataacaaattgtgaatgtttgcagttttttatattatttattgaattaaaaaataaagaaattaatattaaatttcactaataattatagtttgctataatcattgatatttgatattttaagctgtcctttaatatttttcttgtaaaatctcatgtgacttattatttttttttttatatattttgatctctcacgtatgcatatatttttaataattttaataattaaataaataaatatgtttatgagaaaaacatgatgatttgtttttataattaatctgaaaatgtggttgaaccgaaccctgaactcaagtaaataaacccaactacccatttacacctactcgtttcatatctttcatggatattaatgcatggctgaaccaatttatttattatttattattattattttttgaacaaatttattaaatctcttaatatataagtagtcgtataatattatgtatatgtatatatacatttgctggagaataagtcgtattataacattaaatatatatatatatatcatatgtatatatacatttgctggagaataagttgtattataacattaaatatatatatatatcatatgtatatatatgcaagagatcgcgatatatgatcaccccagaaatactttataattgagtgttttgtaataaaatagatataaaaaaatttattagctaaacaattttatatagtcgcagaaataactatgaaatatattaatgtgcaattataaatgattattattgtcgtaaaatcataaattgatattgtgtaattataaaattaagtgaaattatttacaaattttaatatttcacattattaatttgataaattgaacttttaataattaaattattaatactacacgatgcgagttggaagaggtaataaagaacaattgttatatgaacagctcatatattttttttttcgaatttaactaatttaattaaagtcgatcgtaattaattttaatccagctcatatatttatatatataatacatatatgcacgtgataataattttgatatttaaataaattgtcataaagttcggagacgacagtcatacatgctaattctatgtattctattgtcttttctttattaattatgtctgaaaattattaaaaatgtaaattaataatgctttaaataattgagaattcattgtttgcccatatacgtttcagaaaatttaattgaataattaataatcaacctatatatgtttgcccataatcaaacaataacaatctttttttttttcgattcattattaaagaatttatttagggcaatcaccaccacgtatattattagagttgatcgagatttcagtaacttaaaaataaggcaaaataagatagataaagtgataataacaaatccttaagttatttaatgagtaaagtcaatgttcgagggataatgttatggcaaagggatcgacatgcttatctccagaacgatgggttaagccgcctttgggagcgtataaactaaatgttgatg

SEQ ID NO: 163015 - DNA, 4504 bp, Cannabis sativa
tcgctctagcttatggctacaaggcgatattgcctgtagtggcagaatcccttaacaaagtagaagaaagaatagatcaagccaacataaagttgtaggcctataagtaagaagtagcaaggcacttcaacaaagaagtcaggagtaggaaattcttcataggagacctggtgctccaaagagtgttcctgaacaattaagattcagcagcagaagtgttcggacctaactgggaaggcccctatcaagttacagagataactagctagggagcctacaagttaggaaggtacaacgagaacatagagcttgttctcctaccaagatactggaatggagagcaccttcgcaaatactatcagtaactagcttacaaaacactactttgaagtggcagttttatctactcaaccttagagtataaaagagttatcacccatgacctttagaagctaaatctgtgtaatgtaagcttgtaaattaaatttatgtaagttgcacagaggaaaagaccaattaatgaataaaaaaccatgtttacgttctatttattgtgtctaaaccacttgctcacaagactaatttcttaaagttactcttttcattcaatgtgtgtgctatggtaccttcccaagaaagaacccaggcacagtctgtgaaacttggttaatagcaagtgaccaagagacatgtctacatggtcacttgaggggcacccaaactgtacaatgcattgaactagtacagatagcttatgtagagaaattttaacgcttcgaagaagctactaaacctacctctaagtcgtgcaggcatacttcaacatgacatagtaaattcgaacccttacatgtcagggccataagaagaaagccaaaattaaagaccatcttgttggtcacacaatccatgataaaaatgcaatagggccaaacaatagtaatgttcaaaaatagagggcctataggccaaagatacaaacatgaaggccttggagttgacaataagtagtgttccaaaaagcccacatgccacatggaacatgaaaataagtaatgttctcaaaataaaatgccataggccatacagaacatgaaaatattgccaatgttatacaaacataatgaggaatactactaatgaaaaatattgtctatgtgtgtgcaggggcaggtgaagtcgagtcagaagttgcaagatcgagatcgccgaagtttgcaccgacatcaacttcaacatgctagccggcctggtggcaaatatcctggccagccacccccttagtaggtgcactagccagcccctcgtcatgatatcctttgaagacccctctaaataggcagcgggctggtctgcttcccaccgactcttgaaaaccacccttcctcgtacaaatgtgcaccccacaaaagcctcattacccatgtataacagtttggtcttgtgattatgcaacatgaactcaaaagtgagctcagaggagaaatcaacaactcctccctgatggcctactggccctcaatagccgcttacagttgctcctcattcttaataaggttagaatgtaacctagagataaaggcagcttagtggtattctccttgtttctagaaacgagcatggactcttggccaaaaatcatactctatctctcaccaagtccttgtcagacatggctctgccttcaccagaagggaagcctctagggtcttcacctgctccaaaagagcatttgaggacccctaggagccatcacgtactaagcacagcttcatcaaggcctaaaaacaaaacaagatagcatcattgtcaaaattacaacattggatggccaacccctctttgggactggtatgcccagctagccccacacaggaacatccatgacgaaccagacacttgcaataatccccatggtcaggcagcctatacagtgctagaaaatgaatgaagttgaaattataacttactagagaaaggtcctgaaggcgagtatagtagatcctattaggctcaccatcaccaagctccttgagctcctcatccttaaagggaaaactctctctatccgtttaagggctgcctcaacagccctccaccctgcaactgacctcgctcctctgtcaggcctccgtgcaccctggcctgtgggctgtatcacaagctgcccagtaggtgtgggccctagtgaaggaagaggcagagacgacccagcaacatcccctccacgagaagttcaggccaccttggctctcactcgtcctgcgggctcatttgatggtcccccagtgagacgtctcagcttggaagacatatctgcaaaaagtagcaaagttagaaagcaatcataaacattcaatgcaagacaaaaatatggtgttatcaactaccaaataccatcgtcatcaaaagaggaactatcagagtcctctacaaccggcatgcccttgcctttagatgtaggcacggggcgagtaggtccctttaaagcctggcctctaggttcaatgcggagagaaaaatcaccaactagacccccactacccaggcactaacaaagagccctatccttcctctccaaattttgcacaatgtgagataaaggtaccttgtcatctcagtctttgtccacagctgggactcctgcaaccctaggggcaggaggatataaaccatacttctaaaaattggccacactgatcaaccagagtatatttctctgctctgctgagagagacttaatgtggttgtctatatcccttatttgcaaagtggggatagaacgcttgcaaaatggcacactctggaagcgcccatgacaaacctctttaacatcccaagcaatgaagtatttatcggcatactcgcaaaccttcgacataggtgaattttttgtaccatctagccactggtgttcaccttggctaaagtatgtagcgttgtctagaaattattgattaaatggtaacactgcgctatgctcaatgtggccttctgaccacgccaaccatcccaaggggagtcggtgcgcttgataatctctacatggtatcgcacagttgatacccctcactacgccacttgcatgaaccttgctaaaagcctcattagaaagagtagaagcaggagaaacccaactgtctccttgtgatctcgcatctagtatctctgccttagaagacagttctaagtcatgatcccatcaaagctctgaaggcccaccaagaatgtttactgggttaccattggtgtcataattacccaatggacagttttggaggatagaacaagtcttgtacctcctcctcctcactagtacaaccttctcatgatcgaacttggcatcaggactctcagctccctgatctatctctggattgatatcaacttggggttgagcaacgtcctcaacggtcctgactcgaccccttgtggctgctctggcaacttgagggtcacacggttgtgctctagggagagtttagttcattcttgccataaataaagaataaataagggacctacacgatgttcacctcccctattcaacacccagtgctacctccatagaagaaataatgggaggtgagcaacctgacaaagctacaaagacattctagttaacagtacccaatggtaccttccaggtaaatcacaatgtataaggtctattatcgactaagtaccgtattaagtacacctactaagacaaatagtgagccctaagttatattttttagtataatggactcactaccgatccttatactgagttcccaagggtgaccccgcataaggtaatagttgtatatgcctccaaacccgtcacgagaccctagcctaggtccatagagggaaacaaactaactaccctcttggagccttgcccttccaggatagggttctaggccttagtggtcggctaggccccaggacccagccaagtggctagccaagaacccatgttccaggcataggccgaccaacctatggggtaacccccttagccgtctagaccctctgacagcccaccatggcaagccaggtcttgcacaagacctccttgatcggccaggacctgcacaatctaaactagtgtttagtgttttttaagaaatcaaatgtgttctccgtgttcttcatgttctttatgactcaaagagccaagaatcactacgaaggtcggattcagatcttttttgtctagaaattatacattatgtattgtaaagctatcatgcggatcaaaatatcgaaaggacaataatataatctcagaatcaaagcatgttcaaaacaagaagtagtgttcatgcattcatggcaagattagccaaattaagtgaaatagaaggaatagaaagattatcgactatgagaaatattggaaatattttactaggatctagatttactaccaagtatgtttgtttaacatcctaatatgaattctaaaacaatgaaacaaacaaataagagtttaagaaaacttacattgggtgca

SEQ ID NO: 163016 - DNA, 4502 bp, Cannabis sativa
attataaactataaaaaaactaaataaagaatttgatagtgttcctccacgtacaaagaaaaacactattcattttctaaacatattttaatattatatataatgttttatttttttttcaaaatactctaacaatatataaataatattttatttatattttaataatataacaataaaaatatattttttaaataatatagaaatataaaataaaaaaacgaatgtaatgtaaaagtttaaagtaaaatataaaaaattaaatttaaatattgtattttaaaaaatagaataaaaaactaatttaagtgctctaaagaattcatctccatctccacaaaaagacaaaataaaaaaagacttgtttttattttatttgtgaatttttttcttataaatttctttacaactttttttacaataattgatttttattctaccttttgtagtacttgacatgaataacagtatatcactatttatagtatttatacctcccttattatttttttatgaatgacaactttttctattttttttttctctacaaaaacttctgtaggtttttttttaagatcttaatatttttttcttatgaatgatttttttatatataattttttgtgtaatatttttttatttggtgaataattttttcttttgctaaaaaggtgagttatttttattattatcattaataaaatattattatttcaaaccttaagatgtcccatactatacagacacgacacttaataattatttagcagtgtttaccaagattttcgaaaactgagtaattagagcttaagaaaagtataaaaacaataaatattagataatttttacgtggtttgggcgttaataatctctagtctacgattttgttgtattagtcgtgtcggtgagtgtttgaatattataagtgtttacaatataaatactaactctgtattcttgttgtttctcttaaagaagaagaaagctagtaagaattttagcagaggttctataaatatgaaattagtcacactttacacaggaaaaatcgtcgtatttataggcacacaggtgggtaaaggcataccctttagccacctagaacttcttactcaacacgccataagggttgatactacaacaggatgatctgatagttggttggtaggtagctttcccatcgtgtggtgtacgactattataaggcattgtgtgggaatgtggacacgagttgctcaaagatttcacctttgaaagtggttgcctagacaagtcgttggacaaaagggggctacaaaggcacgcacgtgcactaccgtggtctggcgcatgggacaagatctgattcagtgtcaaaagatatgcaattgtcgcattgggctccagatggaatatagtcggattggttccaagaccggttggccacatcctttcgggattacacaaacctggtgtccttctagaatgcttatgacttcgggggactctgtcctttcttagcagtggatgaatggttggagttctagaatctttctcgtccttgttaacacggggatccttcgactatacttggaatataacttctttcttaaccttattaagcgaaaggtacacgctaattagaaatagtccaaggcagcactcttccgtgattgccacgaattaagcatctgggaatacggataacatttctcccctaagcttccaggactttctgagctttgggagcttacaacttctctcgggaactcgctgttgacatgcaccaattgttggggtcgcggatgcgtctttttggtgagctgtaatccgttaagggtagatagaatgctagaaactactagcattgcaatcatgcggtacactagacgccctggttaattcattacacgcgtgttggggcgcatctgtcagagaaagttaaaattgatagtggggtaattcgaaaagacctgtctttatggctcaatggacccgaggtaaaccatgactaataaattcttctagccctttcaactcccctatcgttggaccatgatagaagatctggaccgttgattttgaaaaaactgaatgtcttcttgaagtataaattgacactaacagcgttcttttcgttttttcacaccacacttcaaactttttcccagtaacttctctcttttgtcgctcttattgcacgcaagaagagtgcgaaaatctgattaagcaactgctcaacctccgcgtggagctttttcctaacattgagcccttgcaaatcaaccaacttgacccagacgaaggattcgactttcaagccaattacgaccgcctcatcgactgggctccaaaatttcaaacgagactcttcgacatcaactcatcttctatccacccaataagtaagtacactaacccctggttgaacttttactatttcgtatctaggatagaaatttcgtgctcatgctagggctaggattgtttacatgttgagtagcaaagtagaatatgcgaaagaaatttcgtaattttaagaaaaaatctgtctgaggatcgaattgtcataaaagcgaataatgtcttctgggcatgtttcttttttattatctgagatttagtaagtgcccatatgtttgtagatcgtgggatttagtcgattagggtactagtttggaggtttttgttttatcaattagttgcttcaagaaactcacttttctttttcgtttttatgctagtagaaatggacttgaactaggatctccaagcaggcgttgtaggaatcactgagagtgtccatgtcgctcttgttgaggaagctccaacggaaggtatccaggctatggttctcgttgtaatgcctcagcaaggggcaactctagaaattgtcctagaggatgaacctactacagaggaaggaccctccaaaaaggacaatggaaaaaagagggccaagacacccccagccgcacaggcttacaatgactccatttgggagatggacgaaaaagctaactatatccaatctttcatctacgacagcatcattatcgcaacaacaataatagcaccaacaacaacaacaacaccatcaacaaattccaccaccacaacaacaacaacaacaaaaacttccaccacaacaactgcaaatagttccaccccaaattactttgcctcttatacaacaattagcaccttcaaactcaacaaacgtttttgcaaaaaataaataaaaaagataatacattatgtatcaaaattaacaaaaggatcttcataaaaaaaaaaaaaaataataataaaaagaagaaaaattaacaaaaggacaaaaagaaaaataatagcgaggctggacgacgatattagcccgcttatctttctttttctataaatagtatgtgcataattttcaatgcctgaaagatatggttcttcttcttcatactcatccaatacacaatagtactaatattttttaaaaggagagatttatatcatttatcttcagaataaaataaagatttataagaaagaaaaaggtgtaaaaggaaggaatatgtctccatctgtttaaatctttattttaaattttaattttgttggtcttaaaagaagagaatgcaatggacatgaaatgacccccttcaatttaaaaaagaaggcaaagcatctcatctttcacactctctctaatgtatgttattatgtctatttaatctcatcttttaattaatcaattttttatttgtaattaaaataataattgtttattccaggtcagattcggctcactcagggggcccaattcacaatcacaagagtgaagtcggtatggttactgtttacggtcaaaggtaagatgacgtgggaggaagagagtagtgtgttgtgtctttttcacgcacacccaaaaaccagacttttttagtagttttgggtttggagtctagcactagcagtgggacctcacactactcaacagactgaaatgcaatgggacccacttttgttattaccaattatcatccattagaccaagtccaacgctctctatgtatatgtattgtagctacttcatcaatattcaattggatctaatccaatttaattacaaaaaaaaaattaaatatttaaaattaaattgaatattaaaaactaaattataagaaaattagattggttattaaaattcaatctaatctaatctaattacatttatatatctattaaaaatattatttatatataataaaaatattaaaaaagtaaaaaaatatatatttttagtgactacttactttttctttgaatttgtattttttattgtttttattctattttattacttctagttattttaaatttttagctgtattaaatttgtaatgataatatatatatggagtattaaacttattaagtttttaggttttttttttatatttttaaattattattaaaatttaagtgtgtaattagatttttaattaaaaaactaatctattttttttttt

SEQ ID NO: 163017 - DNA, 2273 bp, Cannabis sativa
gggggggggggggggtactattactactattacgaggctgaacctatataaattcttgtgttcttattggttaatttcatataattattgttaattattatctattattctaatggctttaattgactcagcttttctcgttaaaagcgagatcaacattttggtacttctattgagagcaaaaaaacacgatcattgtttcgattctctttaaaacacacaaagatggatgtgactacaaagagcgacaatcccactaaaacagctgatcccatggctacagatcttaatgtgcagactccaatgaatcgaagagatccagtgaggatgtgtcccgatccaaccattcctcagcctccgagaggtccctaattagcaggaccatgagtaaaaacccctcagactagattcactttgagcacacaggagactggaactaccagtacacaacatgttgaaactggaccaagtgtcgggggtccaccaactggagggtctcaggcagatattggtgatgataatgaattgcaaaatttgcgagaggccctagggcgggtgcaacatcataccaacacccttcaccacgactaggagaacacatgagcagttgtgaaactggcatttgagcagcaaaagcgctaattcctggagtgcgggatcaacagacaaaaataatgagagcccaacaagcaaccattgacaaccgttctaaacaggcaaccgagttgataactcaggcatatcaactaactaggcggataccaattgatgacaccacactcatatgagatccaaatagggggaaagagccatataacccagaaggatcgcagtatggaccagaggaatatccgaccaactgcatccaatctgaggccacataatcaaactgtggcccacatggtagacgagcaggttttgcctaaccataattttaaaggagatggtcagtataacttctgtcctcaaatggatataccagaccagtcaattgttcataatgtccatatcagaagacccccgaatgaatcagtctttaataaattgggacccatacacgatctaaggaagatttaaatcgcataagagaaagtcgggatagatgagcaatccctcctaacatccagcaaacaatgtagacaattacatgcccgataatgttatagggggcccataagtgacacaggtcggccaataggcaggtcaagttgatccagtggtacaagcccaaatagatcaacttaagagcctaatccaaagcctgatcgacccaaaactcaccgactgataacttgaccggacaagaggatcacctttttcacttcacatcaatgcccttgaactctcgcacaaaaattcccacatggaagatgtatatgggcaaagaagatcttctgtctcatattaagtactttgaaatgtagatggatttgtagacaataaaaggtgatgtgcagtgcaaattctttcctgccaccttggcggaggccgcctagcggtgctacttcaagttggctccaagaaactacatttcatgggattctttcatggtagaatttcacacttagtttttctcttctaggcaactccaattcattaagaagacctgatcaaagtaaaatagatggcaggggagcttttaagagactacggaagctacaaaggtgaaaggattaaccgaggaagggaaactggccaccgtcttaggaggaattgaacccctgggagaattatggaaatacatcatcaaaaggcttactgtatggtcaatgggagaattcttagaccgtgtagatggattcattaatcttgaagaactagttcggtgtgtagatacaattagtcagaaaaggaaaccatctccacaccactgctgccaatacatcgttccagcacaatcataactctcaacctcaaaataacaacaattcaagtcaaattggtagaaggtcaaataatagcaaccaaaaatgcaatagaaagaaaggcaagttcaacaataaccttgaacaacaacatccttgagagaaagccccatagttcactacccctttactatcctttactaaagaaatagaaactatcttcatgacaacccagttcatggtgccgtacaaaagatcccatccgataaagaaagatataagaaaaagagataccatgtgtagaaaatagtgaatcgaattgtgtatatattttatagaatagtacatatttatatacaaagctaggagactaaatgggaaactaccaataacaaaataggaaactac

SEQ ID NO: 163018 - DNA, 1158 bp, Cannabis sativa
tacttattttggagagtgagaagaagcaacaatgacaacttcatgaactaatttaccactaataatatttttagagtttcaatcttgggtttaatcaatgtccataccctcctaccaaatgtctttctctaatacacaaatttttgttttttctggccaaggaatttggccccagaaaaaaatattgttgctggctggaccaatattatttaatacatattgaagcaaatttatcgatgtgaaagtacagcttaacagccagggaagggaagggagttgtggccacccttcgataggtgagaggtctcttagaacagcagcactagttttataccgtacaaattttctcgcaatccaaacacacgtaattgaaatttccatacaaaacagcgtcctctcctgctcatttttcttctctgttttaatcacaaaattaatgatatagactcgtggctctaatcttcttactcttctattaatgttgtacccagtttcaggggtaattaaaagagaattgaaaaaccctttaatttgacaatgatttaataatttattgtaagaattcattaatgacacaaacacaacgattgggactgggattgggacccaacttgtttaggggtcagtcaaatttatataaaagttaaccttttacttctctgtcaagaattttgactgacatgattttataagctcatctcattgataagaaagtctaagcattattcattgatacttagtgttattcttatctataaaactgaaaaactttgtagtttacactacgattcaagctcagtggatgtcatgtaacttgaggtatattcatttacactctataccttgcttgcttctttgagccatgattctgaatcagtgtttccaaacgttttgactgttttattttaatcttcaaggctcaagctttcatcctgacatttgattttgctagctactttaattattaaagaagaaaaatacaattcacgcattactgaaagtactctagtgaagaatggtagtagttagtgcccaaaaagaagaaaatcccatttttcataaattgaaataggataatctcattctctaagggaaatttcaatttttgaccctaataatacaacctatatcaaaatttatacccctttataatttgta

SEQ ID NO: 163019 - DNA, 1131 bp, Cannabis sativa
taaaagttcctaaaagttgctccttaaagaacccaaaaatataactaaaactaagggttttgatatttttcattttagaagaaaaatagaatttgagactcaaaagttcgtcaaagaacaatgcaaaaaaagtttgtgtacatttttatcctctaaaatcatatctaccaaaaaagcttttagtggatatgatctcagaagaaagagatatttttagtggatattgacaaataattatattaaaaaataaaaaattaatattaaatatgcacataaaatgaaataatgacacatatttaaaaaattatttcatttaaaatcatttttaattctaatgaagcatgattcattagggcatgtttaatgtggtagtttgagaaaaagctggttagagtgtggggtgaaaggtggatgaggtggaggagtaatttaaaccgtaaattttaaagaaaaaattaaaaaatagtatataaagtaattttttaatattaaatggactcacaataacaattataaaagttatgatctcagttttacactctattacgatccattaaggtaaattaatttcgtatattaatttgaagtaaaagttgattaaaaaaaaaaaaaacaaaaaaagttgatttgacaaatatcttatttcctattaaagctacttttgcaaacatttccatccaatatgacataattactcaaacaaaataataattaaatagctatgtaggccaactttaattatttttaaatttcaagttttaaatttttaaaatacttaaatgatctaagtactaataaaaatcatcataaaataaaatttaattttaatttctttatgaaaatcagagatgcactcatgtatcactttttgagttgtaatccaaatacccctaaatataagtgtagaattattctgaatgattatttaataatagaataaatatggtttatctcacccactaaattatgattattaattgtagagttatttttgaatttttttctaaactataatggaaagatgacttgaaaattttagggttaatcttgttcagatgggtaggaagaatagaacgatataattttggtggaaagaaacctatactatctgactcttattaggtttagttt

SEQ ID NO: 163020 - DNA, 3353 bp, Cannabis sativa
ctcccatgatgccaccgtcagccacgaatatctcgcgaaggctgccattttgcggaagagccatgagagagagtaggttatccttcaaaagaggactactcagctttcttccatcaagacggtcgagattgcagaaggaactcaccggcctctgcccccaagccctatgttagatctgcccgcagtgagtcataatctaaaaccttcagtgggtagatcaattgccccttatgcggcagaaatgatagacaacataggtcgtagcgtgagcaagcttactttggagaagtgggcggtaagtagcagtgttaatctgtacaccctatcaacagctaccaaatagcaggctgcaggggtgactcctaaccttttgacttttgtttacttacgataagatcttcatctccaggataattttggtaatttattcttaacttcatttcttcaaatggcattattcgcggagagggccgccaaagaagcgaggaatgtgaccatagagctagtccctggccgttgaaaatgaagctttatgcaccagagcagagcattttaaggcttaaatagcctccggcacccacatgactctgcgagagtgggaagccaagttgattgctgagaaaaagaaatgggacgccatatacttaaagaagtatttggaccacaaggcttaatttgagcaggaggctgcaaggtcagcgtgtgaggttgagaaggatgcccactcccttcaagaggaactagccaaagccgtaaaagggaaggacatcgctgaggcctgcatgatggagaagtccacgaccatcattacccttctgtaacaggccaaaccttctccaacaggccaaaaaccattaggaagacacgcgcgaaaaggggttacacattcagagcctcgaagacgaagtgaaagaggagaaaagcaagcggatgactgggaggttaaatgcttcaactagaccattctctaccaaggagcctgtcgcaccattgacctccgtaaagagaccattgataggctacaaaagcaagttaatcagagtccctcaaacaacataaaggcatatgttgccttagctgcaatgcgtaggatgagggagactgcaccccaactaatttaggatgcagctaatagggcagcatctggggcggagaggtatcgcctttacaccttggagatgtcttatgtcatagtccctcattacttgtggtcgaaggacccttacatagtttggcaaattgatgaggcagacagggaggagattactaggaaggtactttccatgagtcgtggaaaatgccttgaggagtttccacttacggttgacaatgactgtgatgaggaaattagtgtcgtggcctccagttctcaagaatctgtagaagttgaggtgtcttcgggaaaggtcgaggaaaggcctgctcaagatgctaccaaagctgacacagagttggatgagcgatccccaacggactcagcatcgcctttaccttccctagaccattaggggccttttttgtctttttgcctcttatttttatgtcgtagaattgtttgcacttctgcttggttcatgaggctgtttgtgatacttgtctctaggaacaccttggtttgcttttttgacacaacactatatttaggctttatcattttcgatgcgtagttgtttctaaggactatcttcttaagctattctgaagtttgtggttccaaggccatcactcaaaaccttttgatattgattaactttctatcctcctgttggcttagtaggcacttcaagcaagacaaggagattgtcgctacaaatagaccctagtggacgagcagcgcaacgaaaataccacctccatcacgaccaaaggtaaaggtgtgaaatgagagaaggaggtcccatcgtcacccacgcatcctccacgaccaacatcgtgagatctcagtacctcgcaacatcatcctagaaaggagaaatgggctaactctatgagcctaaaatcctaaactcgccactatgaagacgaaatataaaaatctccgctggaagagtcaaaggctagaaactacggtggccagcatgcaaaaagtactgagctccattctcgaaggcaaaactcaaacttcacactttctgtacaaaggttaccgacaagagtgcaaaatttcaactacgcacaatggcgagaagagctccatgccatcaacgagtggtaccccaaaaggtgagggaggaaggggcctatcgcaaaatgagaactcaagaggtcgctcaaaggaacatgaatctatctgtaggggtaagaccataatgggagaaacatcatatagtcttatgaaggggcttcagccaaagaatctcatgcaaagggacactgcactagcacccccctctcaagagcaaagcgagcagaaggtatctcccctcaaccatgacggagagcttaacgacaatgggatgagaggattactacatgtgggctccatgcgaactgctgggaaaatccaagttccattcaccaactctcgagaaagagtaaaaaagagaatgagagagctagaagcagtgatgcaggatctacgtcgaaggatggctacgacatcaaaggaaaattcaaaggatgatgaactcaacgaggagtctcctttcttgagggaaattcaaatggaactacttccacccaatttaaaggagcctcgcatgacgtcatatgatggtacactaacccaaaataccatctaggagcttttaatgagctaatgaagatgaaaagggtgtcttgcaaggaaaggtgtcaatgccttgtggttacacttgaaggggtcgcaagtggttcaagaagtatggacctggaacaattacatcgtgggaaatttttttagaggaattctttcaacagcatcaagcggtgagtgattacattatgcatgtaatgagtatcaccaatgtaaagcaaggggagaaagaaggcttaagggggtacatccaatgctttaattccaaagctgccaaagtaggaagaatgtccaatgaagaacataagttcgccatagctagtggaatacgcccttggagtagattatgggggaatatgtttagatgacgttaaagacttctacaagagagcggaaagatatatctgcatcaaggaaggcgatggagtcttagaaacaaacaaaagcaaatgtacttcgggaagcttaccagactcttatacggtctactcggcaataaccccaattctcgtacatccaagtaaagcctacgctatacaacccatcaaaataaatatcaaagatatccccttaagcaaatttcccctacacaagaagaagttcatgttgggttttatgc

SEQ ID NO: 163021 - DNA, 2737 bp, Cannabis sativa
  modified_base (296)..(296): a, c, t, g, unknown or other
aaaaaaaaaaaaaaaactataatagaaaatagatactctaaaacatatccaatcatgcatgttctaaacgaattttttaactaaaatagagagtgagacttaaaaaaataagcttcaaccatataaaaaatgactctctatattagcgaaaaaataggaaactttataaatataaatataaagagcttcttacttttttactaaatttttttaatagtattttaatcaaaattattattatttttttcattattgtataaaattaatttatttttaacaaatttaaattataaaanattattaaaataattaaatactaattaaaatagggagcataattggaacaataataataaaagtaactctctattttaactttctagctattttagctaaaaaaaacaagaaagagagagtatcattgtagatgctttaaatatagggagctccttaattttttgctaacattttttaatagtattttaatcaaaagtactattttttttttattattttataaagttaatttatatttgacaaatttaaattataaaatattattaaaataattaaatataaactaaagtagggagcatgattaaagtaacaacaataaaaatgactttctattttaattactttttagctattttagctaaaaaaatagttagtaattagtcattttaataatattttataatttgaatttgtgaaatataaattaattttataaaataatgaaaaagtaatagtatttttttattaaaatactattaaaaaagtttagcaaaaaagtaagagttctctatcaattctctattatatagttattttttatatagttgaagctcgtttttcaagtcttactctttattttagctaagaattatgcttaaagagcatagttagagatgctctaataattttaagagcattgttataaaaagttgtatctagtactacttagaggaagagttttgtaattagttagcgatgttttataaaaattaatatttaatatttaattgtatcaatagtaatataatacggtggcaaatactaaatactattaaaccacataagagagtgcgtgtgttggagatcctgggttcgagtcccacatgattgtaatatataaacgcttaaataaaaaaaaatactaaatactattggtaccatttagcatctcttaattttaagtgccaacccacttagttatatttaatttgattatcaattctttggaaggcttaaacaaatgaataaaattcagtttgattgaaataaaaggtcaaattcgcacaactttttgtgcaataaaagagtagtttgaatggtaggataaagaagtcattttatatataaatgtatttttctttatatttattgtagtcaatcatcaatttcaatatctttcttaattattgtcccataaagacatgttgaatatttgtttttaagagtaatttatggtataaatatttaagtttaatttttaattacaaaataatatttaagttaaatttttagtgttaataatgtctaaattataattttggaatttttgtaggtacttaattattaaatgttaagaaagttgccacgtggcgattcctgattggtccaagtcactaaatttatattttttaaaaaaaataattaaaatatactaataaaaaaaatgatacgtagataataatttaacatttaacggtcacatacctacatagttttaaaaatataacttagatattattactgcaaaaaattaaatttatatatttatttacaattgagagttaattagttatttataccgtaaattatttttcttttaatagagatttatattgtagttacaatatatattgtaaacttttaaggaattataattaatttatagtactaacaacaaaatttttaatattttaatttattacaggtgttcaaaaaaaattcaaacttaactttatcacaataaactattaaaaaacttaaataaaatatgttataactacaataaatattaaaataagaaaataagaggttatagtatggagatttgtgattcaagccacatgactagatagatatacaattaatggccccataagcaagccccatctcactacattatgggctacactacaccattgttaagaagaaaagaaatttgaacttttgaattgaagggatggagaaatttagaagaaaagaaaagaaaataattttcttttatgttgtttgtggtaaactataatgagagaaaagttgactatttgtttaattttaatctttatttagtaaggataatttagtaaatttatatgtacatatttggagaaattttatttgtactcctattaaattataagtacatctaatatttaaaactaaggtaattactagggttgtacataaattttttttaaccgcccaactccaaacaacccatccaaaccaaatcgagataacccgacgaaaattacaaaccgaaaaatctgacgaaaatataatcgacacaatttgtatattaggcgggttaaaaataatatcaacccgcccaattaacccaaactaacccgaccaactcgattaagagagtttttatatatagatatatgtgtatttttatgtacatatttgggcaatctcaaataaacaagagagtttatggcttaaatgggtacacagtgtctatataaagagtcaatcatgggagacctactctccttcc

SEQ ID NO: 163022 - DNA, 2834 bp, Cannabis sativa
ggttgtaatggagaaagaaaggcagaatgaccaatattatgaatgctcgaacctaaataattccaaactaggatctattctttaccaagatactctgagttgtttgccatattttgtgcatctagtgtaagatgattagttgcaccgagtctagatactagttggagtcaacaactgaatttagtgtggttatcatggcttgcattaatgcaccagtaggggaatttgaaccaagggtagaaactggtccaagaaaggacttatcaaatttgtagaaacattggggaacaaaatcaaagtcttgaagaacttttgaatctaagtctcgagagatttgattcagttacaatcaatgtctgtatcaaactttggaggagcagaatttgattcaaaaaatcattgaagacaattgtcatgaacgactatgagaacctaatgtttccaagataggttactattttcatggattttagacgagagataatgctttaatgagattaattctatgtgattttgagctaaaccacccatggcttttgaagcaagatagaagatgaaggagaattcgggacaaaaacaagaacaactcagagaaactctagagctttagtaccatgtaaagaataacataattgaaaagaattcggttactatttatgattgagatacaaggggtatttatacaagatgaagctcaaaactaacagctcatagaaaattaactactaactgacatagttagttatattaactaccttcaataacttgtaatgctaaaaaaattcattggatttatgcctcttaaaaagtcaaaactttgaatacttatgccgctatgtacccttttcaatctatacgatatgacaccatatatatgttgcctttaaatagatgtagcttatatacttgtttcatcaatttaaatgaaactcgttaaataacataacaagctaagttcatctttaatgttataaatatttaattttgatatatatatatatataaatatttcatacttaggtattagaaagctaaaaagatataacaatcttgtgatatgtttatgtacatattattcatgtttttcttttattattaatatatgtaggttctgctcttggagtcattttcctactaattagtttatggtacttgataagaatcattaagaaaaaaaccaacatcaagcgcaaagaagttcattttcaaagaaacggtggtttattattacaacaacaactatctacacatgaatatagtattgagaatataaaattgtttaactcagaggaattagagaaggcaaccaacaattttgatatggatagaatccttggtcaaggaggtcagggaactgttcacaaaggtatgttgacagatggaagaattgttgctgttaaaaaatcaaaaatagatggagaagcaaaagtaggagagttcatcaatgaagttgtcatccttgcacaaatcaatcataggaatgttgtcaaattattaggttgttgtttggagactgaagttccacttctagtatatgaattcatacctaatggtactctatctcattatctccatgaccatgagagagagtttcaactaacatggaacatgcgcctaagaattgcttcagagattgcagcagcacttttttatttacactcagcaacttcatctccaatttaccatagagatatcaagtccacaaatatattgttagatgagaaatacagagccaaaattgcagattttgggacttcaaaagctgttgatgttgaccaaactcatgtcacgacacttatatatggaacatttggttatttggatccagagtattttcagtcaaaccaatttactgataaaagtgatgtttatagttttggagtcgttctagttgagttgttgacaagtgagaaagctgtttctattacaaggtccaaagaaggcaagagtctagccacatattttctcattgcaatgaatgagaatcatctttttgagattgttgatactaatcttgttaaagaatctcaaaaccatgtgaatgatcaaattgttgcagttgctaacttagctaggaaatgcttgaatttgaatggaaaaatgagaccaacaatgaaagaagtttcaattgagttagacaaaatccaaatggttacgagtggtgatgattacaacaatccacagagtgctgaagagatagtttatgtaagaactgagcaaattgagccttgggatttctcttataccacaacaagttcaactagtaacaattatgcttctccatcaacttccattgaactaccactattatcttctaagaatcattgaaaataattaaattattagtgtcattaatgtgaattctttgtaaagaagtattatcttccaaaaaacattatttgaatgaggaaattaataagggcatgtttgacattatacctaaaagattattttttttgtttttaaaagtagaaaactgttttgtgagaataatcaggcacgtttggctataattttttaaaatagtttacaaaaaagaaaaattttgagaacaacaaaatgttgttttatatttttaaaaacaattgattttttgtcaattatttttctccactttatctcacatcattttgtcacattattttctctgacattactttctttcaatacattttctctctcactgctctctcatcactttctcacattatgtttctctcttactacttgctctttcattactttctcttttgccaatttctctctcattaaagtcatggttctaggttagggtttgggatcctaaatacaaaaccagtttcattagaagatta

SEQ ID NO: 163023 - DNA, 2124 bp, Cannabis sativa
gggcaggatggggttacttgcttgacatggctcggtgaaactaggttcatagcaactggatgcgctgatggaaaagttcgaatatgggattgtctctcgggtgactgtgtaagaacctttagcgggcactcggatgtcatccaaggtctttctatttctgccaataaagaatatcttgtttcagtatcgcttgatggaactgctcgagttttcgagattgctgagtatcaataagcaacttgtaagaaggaaatcatgtgcattagtgacatagattatttttcttctatttgatgtgagtttatttatccttgtctaactaatattttccaatatatggatatgttgcttgcacaaaatgtcaagtttcaaagttttggttaataacagttttgatagtcatagctgcaaaatttcatgtttttgcttataataactgttaactgtattgtaatttatggaaatattgttgagaggaactggtttttcatttgattttttcttctgaatgtgtatgagctcttaatccttttttttttcaacttccaaacttaacaaacctcattttcaacttctggtgtgcttggattattcgtataggatatgtattatatattttttcattttaaatacttcatattgttttctaagtaatccattatatgtaaatttcactttattactattattgtaaattttccttaagggaattatacttattatatgaaggaaaatagcattattatataattaatggtattattcaagacttgttagatattgtaataattttaaaatatttcaaagaaaatcagtaaattaatttttattatattatatatttggaaacaatattggtaagcatcattaatttggtgacatataaattaataatgaaaaataaagggcttaaccaataaaatgataactaaaatgcttttattttttcatttattttttaaccatgaaattcttagcagtaaaaaaggaagaaaaaataatacttatatcctttaattacaattgatcatcatattgacaaagtgtgatcaattacaattaattattaataatgtaaaataatctaaactaaactaataagaaaatatcttttaatttatgcaactatcggtcttttagaaattatatcaatctaatgattgtttagcatctccatatcgacattaatttctctcttatgtttcgctattaactttcgcacaacgcttagtgcagttattaagccaccaaatttctgtagtctctgaaggtacttatcatcatcatcatcatcatcatcattctgtcgggatgatggaatcactctaatcacttcctctacataggaatccaacctagaaagcttctccgaaaacttttccatattcttcttctctagcaaaagactcttctcgtcaaattgatgagaattgtttagagaaagagcttttgaataatcataaccattattattagtgtttagtgacaaattcttaagacttttcatctctcgaataacaacatcttcacgctcaaaattacacaaaactttcatctctcgagtaacaacatcttcaccatcaaaatcgccatcatcttgtttcatgcattggctgaaccccattattctatcacttatttcttttttttttttttttgataaaagtaaataatgaataatacattagtcttcatccatatatatataggggttgatgtttttttttcctgattaaattcgaattatattcacactttttttattttattttatttttttttaaaaaaaaagatcaacgacctaagccttcaattatctttaaatgtgtttttaattacttatttcttaattaaagatatattgctatactcattcttatttatataaaagataaaatcaagagccctagcctccaattatctctgttttaaatattttatttgaattcccttataaatatatataaaattcaaatttaaattcattttttaagataaaaaaaccaccgtaaatatatttgttctaatttattaaatatctatagatatatagcagatctttaataacagatatataacgatttctcaaaatatatctttatatattaaaatgcctatctaacg

SEQ ID NO: 163024 - DNA, 2465 bp, Cannabis sativa
ttttcctttccaccttatccatgccttattgtcatatactttgtcaattagcattccctcagtatagtatactggaattaacttatcatcataaaaatgattgtctaattctaattctttttcaaattctttttggtcatcttcaatttgtaaactcccaacatcatcaaatttctcatcatgactactcatcaaggatgtgaaattgttgaaacaaaatggaatcattccatttatgttattatgagaaatgtctaatatacgaatagaatcaagatgacaaagattggagggcattacaccatgaaaatggttataatttaattgaaggacaaccaaattagtgagtatttccccaatccacaatggtatacttcctctcaaattgttctctccaacatctagaaatactaaacgagtgcaatttttcatggatgatggcaaagttcctgacaagttgttttttcccaaaattagggtttcgatttggtatagagaagaaatggagcttggaatcacccctgataatttattgttgtaaaaattgataacttttaattttcttagactaaataaacaatcaggaagggttccaactaacaaattgttagaaaggtcaagaattgttgtttttggggaataatcatcatcaactaataatgatagataattagtgcaaaacaaaggctcaaattgtgtgagagtattattggagagattcaacacagttactttgaaaagaaaactaggtgggatatggccatgaaagtggttggagcttaaatcaataaaaggaaaattattattagattctagttgaatttttggcaatgtggagttgataaagttaaaggataaatccaaataatgtaatttggaacttgtattgaaaaaccaactaggaatgacactagatattccacaatcagataaatcaagatatgaaatatttgattgtgttttgagccaagtgggaaattgtggacctaagaaacaagatctcaaaccaatgtattggagttgaaaagaaggaacccatttgtttgacaatttcaaagttaaattggcattagaagataggtcaatgtggttcaacttggagagattctcaaggtgtgtttcatagataactcctgtaaaagagttgttagaaacatccaataacttgagagtggaaagcttggcaatactttttggtaaatttccattcaactcattgttggagatatctaactctttaagagacatgggaaaatgttcaacattctttggaaatgttccttgaagtttatttgagcccaaatttagaatttccaatgaggaattgtgtttacaatgattaaggatatttatgatatcatcaagggtggaattgaatgtgtttccaaacataactaattctctaacattgcaaagactccccattgattttggtactttcccttcaaaatgattcaaggacaagtaacaagtcctaagatatttcaaattttcaaaagaacctaaaataggacctttgacattgaagttgctaagcaaagtgagatcaagtaaattgctactcaaattaagcaagcgagaaacggttgtagacccaaatgtggaagcatagacacgaatcgttgtgattgaattcgaagaatttgtggtacgagaaaaagattctaaatctggaaattgacaatcatataggtacaagcttgacaaggagggagctgttttgaatgtatgaaaccaatccatagatttagtgaaatttgtacttctcaacttgaaaactcttagataagagagatgagaaagccattcaaaactattacttgtcaaatggctaaaaagaccattaagatcaagaatatgcaacttagtgagatttccaagttgtgaaggaatttcaccaaacaaagggttctttgaaaaattgagatattcaaggtttgtgaaagaacctatgaattttggaattttagtgaaagaattgtaactaagatccaaatgctccaaatattggagttgaaccaaagatggactaatttcaccagtaattggattccaacccaaaccagaagaataataggtaatattaggacgaagatcaagcatgataatatgattagttaaattatcgcaccttattcctttccatttgcaacaatctttgctgttatttgtccaagatgataagagattctcagaatcatgaaggccttgtttgaaggtcagaagagcttgtctctctccttctatgcatgagtgattcacttcatcatcataagaaactctatgacttgctaggaagaacacacttagcattacaataactaccatattgatcataatttaaagtgattaataattataagtgagcattgaatgcaatctatgcacatccatctaactatatatagatactagatagagagaaattcttttgcaaaaaattttacttttagtcacactaaagt

SEQ ID NO: 163025 - DNA, 2892 bp, Cannabis sativa
agcaaactcacatgaatcatcaaggtgactatgatagaacttgttggagaagatggtatcaaaatcttccaaaacaactccagaggtaataggattctgttacaagatgataattattctctatagcataaaatataaggcatcagcaacagtacagcaaagaatttaagttcatattttctattattggttcaaatcttctactaactttccatacgaaccagcttgtgattctcacaaagaatttcttgaatactacattgttgggctggttattcgatagaggaagactgctactaatcaggaaattacttgagagacaaaggaatacggcaaaatagctcacatcagattcgataagggagctcaaatttgattggatcttctattcaataggctggaatactacatgaacaattaagattggtttctctaaacattcaccttacaattgggttctattcctcatctaacaatagccatggtggccaagggatttgtagaattctcagacaacagattattgaagacagaaaaagtcaagtgttcaattatagagaatggcttgagaataattttggggattctagtggggacaagggatgtcatcagctagtgatttggcaaaggcatattcatatttccatggattctgttggatagtggttagaactaatgaataattttggatggattccacgtgagcacattttaggtactgaagctccaagtaagatccctgaagaatttgtctttcagtatccaacaaattggaatttagatagagggaacgagcatggagaaagaaaacacaaactgccattacttgcaaaggaacgacaccacaagctagttcacatcagatttgctatggaagctcactatttgaatggtggaacatttaggaatggattctctaatattcactttgaggacaaggtgaaagtttgggttgtgggtaatgttaggactcaaatattagtaccaagaataaaaataagtcatgattaatgtgcggaattgtccttttctaagtggtttatgtaattgtttaagttgagtgagcgggaggtacttatctcttaggaagggatttgattattgatgaattttgaaagagtcaaaactctttttgggagatctccaagtgtcttgaaaacttggatctttgtaattctttcttagatatcaatattttctttgatgtaaggagttttcattttccaagtggtttatgcaagttttagttgagtgagcgggaggtttttatctcttagtaagggatctgattattgttgaattttgaaagagtcggactctttctgggagatctccaagtgtctcgaaaacctggatctttgtaattctttctttcatatcaaatatacctatcattagtgtatcaggataccctaatgataggtatatgtagcaacactatcaactatattgtaagaagacgtttgcacagataaaggttatttatacacaataatggtatgtcattgttctatgcactggtataaagaggaagaaaaaaataactaagcaatgagaaaacaccaaaaaataatttttaagttcactgtaacagaaaccttattcagaaaagacatcaaggaagatggaggtatgccggggtttgaagcagctgccgatgagatacttatgtttctagacttgagtgaatcttgggcatgatttaatgcatccaatgtcttgtttgtagctgaagaaacctacatcagaagcagctcaagcaattcacgtataattattagaagaaacaaaaacacaagacaaatgcaaggtttaaacgttttcatcagtgtctttgggttgggctagtttgttgtacgccttcttttcccttcccattccattctaatttatttctagtatattccatgttccaatttcttttttttttttttttgcaatgtagttaaaaaaataaaacaattacagtttgtagtcaagcaagcccttaggatctatatacagggaactttctaggatggaaaaaactcatccaccttttgtgtaacggcattattttatccaacatcccctcgaagggtagaacgtgagaaggcagcccctaaggatcagtcacctcctatgaagaagcccaagggaaatgctaggaatgatgttgccgaggcatcccagcgtaagaggtccccagctagggatgcggctagggggaaagcaaatgtgattgactgcgagcttcaccttcctcaaatgatcccaactttcgttgttccaaagaagtcgggtggcagctctagacctcaaagattctggaggtgattgctcacttgaaggtgttgggcaacaccttagtttcttcctatagatgattgtcgtctcgaatgcagacaattgtcagttgattacaatgctgaagactaagctagcagaggaggtgttgaaaaagggccttggatatatcatggggtaagtgaatactcactttgtttttactttctcactttgtttttactttcttccttttggtttatgagttatctaactcttgtttggtcacgtaggcttacatgagcttctcctacacagtggagaagaaaggaaaagtcagtgcattggagaagtgtcggtgcgttggagaagtctatcgctaaatgcaagcacgttctctccactgttgatgattcccttcaaaaatccttagagcatgaggatactctaaagaccgagttggccctagcctagagggagtgtggtgatacgaagagtacttttgagagtcattgaggtgaagaatgcctccattgttgagaagagtacttttaagagagtcattgaggtgaagaattcctccattgccaacaaagataagacgggcaacgctctcctgactgacct

SEQ ID NO: 163026 - DNA, 1412 bp, Cannabis sativa
aaatttaaatttcaactattaattgcccttttagattgttcaggtatttaaatgctaacgatacggtagttttggaagttttatcgataaaatttgagtttttagaattaattgttaacaaagtgaaactattaagaattttgccgcaattaactcatcaatatataaaagagaatttggtttcttgattttatttgaagaatattaatatagttacaacttacaagtgacgtattgtttgttttgtcttgttttgagcaggaatgcttgggaaaatcaagttgtacagtgccagcaaagagagaggttttcgacaagaatggtgatcattgcccagatacaatgaaaacgcttgcgatccaagtaaagtgtgctgctaaggattaatgagtagaggattgaaaaaagtaaaagttgggatcgtcagaatcaaaaacatgagtctcttcatattgtttaatgttctcaaccaatcaaccatttaaaactctcaacccttttcttcttttttttcttttctatatataatacataattttttgtttggcaaatatacaaaactttatttgctccaaagagaagctatattgattgatatatttgataggagatgatggatatgcattcttttggttgattttattcttttttctttcaaataaatatttaaaactacatatgaaacaaaagaaaaatcattttttttttatttttcatcttctttcggtgatggtctcgcttacaacaaatttaccaagctagcatattacaagggcatataaaaaatgtacacaaattcaaatattagaaccatacaataaaggaaaacctatatttcaaccaacacatcagaatcaaaatcaaaccatacccacacccaaactcaaatcttcgtcatattcttcttcttcgagtatataaggtacaattcgggagctttgatcacaccaagaaatttccatccattgtgaaaaacataattaatatttttgtttctttaatttttgacactatcaagatgtgctattatctacaaacataatttttataaatagatagatagtaattgataaatagattcaaattaagtacctattatcctttttactttaatcattaaaactaaaaattaaaacataaattattataaggagtattaatatgtgcacacatatatcactcacaaatatgacacatacatatgtgaaaaatcgctattaacatgaataagcccaatactaattgagtctaaataaaactatcataaggtgatattttattttagcaacctagtccatctaaatatttgaaaataaatggacttcctatatgcatctaagctcaaaagcaaacatataggctcacacatgtcaaatcatgtttctaggtttacacagataaaagaagtacaa

SEQ ID NO: 163027 - DNA, 1196 bp, Cannabis sativa
actatcttgcaaattagtgagaggcttgaagtaccaattctttccactctttaaagtcttgaggccattgatacagaccaagccatcttcctatatcagttataattttgttggtaaaacaacaattcacaaacaagtgatggtgggtttctctataagcttcacaaacaggacacaaatttgaaggaataggcataatgttgcttatgtgatccctagttaatagttaatcattaatagcttgtcagtaaataaatgggccggtgcttaggtataatattgagcttgtgccaaacttttggagcatattcaactttttttgctttgattagagagagataaaactctttgactttaaactttccatacctgccaactcgaatcaaagcctctatgtcaatggtggcccttagctttaagaatttattaaaaaaccaggtttgccatcatttcttctcatcatttcttatttaattacaggctttcaacagtaacgtaatgttactttctcatgcaatcttagcattttggttaatcctccaggtttgccattttgaattaattaattatctatttaaaaaaaacaaatatatcattatatttaaaaaaaaattctaaatatttttaattgtttaattgtactttacagactcgagattttgcgttaacaaattacgacccggtaatactcaaaatgactaccattaattgtgttattatcctctttattagtacataaaaataatactaattttctaatgaattaattttacatctgattatattttatattgggttgtacaatgcaggaagcaggcagaagattttacgagttcatgtggaagctttattatgctgaatatttagtatatgttttcatataattaagacacattaggtgtccaacacattatattatttatagctaaatattcgtataatttagtggtggatcttacctatttaaatttaaatgtatgcattatttgtttacagcaaaaataatataataatatagtgtaagacactaaattttatttaaaatttcactttcatatttccacatctagagttgtaatgacccgacaaatatcttaaccttgaattttttttttgaacaagaagaagatctttattcaaacagacaaaacaaacaagcaaacaacaccagctgcagaccgaaatctgccattaaa

SEQ ID NO: 163028 - DNA, 713 bp, Cannabis sativa
tatctttatgcttgttgtttcggggttacaacgcagtttaagcaatagtgtttgcacaagttcttcatatttgaattctattggtattaattcaccatgagcttcaaacccaatgtaattctagttctcatcccatcccattgtccgttgctttgtatcagtattcctattgcttgcattgtctgaaaaacaaaatacaggtttttgtttcagaaataaatatgacaaatgtgattttgtattttgttttaaaaaaacctgttcagtcaaaacaactgaattgcaaagaaaaaaaccatctctgttcttgtaatattagtcaggatatcattatcaattcagtatgcatttttccacaattcacagaaatcatgagtaacaataatttaactaagaataccaatacacaacgtcacaacaagaatcaattaaatattgtaataatacctctctctgttcatcataatattacacataataatcagctaaagtaacaacaatataaattagaacattaattatgataacactaaaatttgatgattcatttcataattgcaagtggataagtggaaatacatacctgataattgatttttccagaatttaatttcaaaagaataaaaaataagagttgtgaaacaaaaaagaaagaaaagcattgaactcatttacagcaacaaacgataaacaaagaaaattaaaatagaaaa

SEQ ID NO: 163029 - DNA, 2477 bp, Cannabis sativa
gtaatttttgttctctgtacaaagctcacatgcttctggtggagaaattgatatttatgtctacacatttggtaccctgtgttttatctaaatacaagtttggcaccctgtatttttaataatgcttatttggtatcttgtattttacaatcatacctatttggtaccctaaattcaaattttttcaataaaatttaatcaatacaatcaatagtctaaaattttatgaattctgaattcaaatttatttatttgataacatataattgagaactgtttggttaaattaataaaactgtattgattaaattttattttaggataccaaatatgtacaatttaaaaatatgaagtaccaatctagtattattgaaaacataaggtaccaaatatgtttttggtaaaaacacaaggtactaaatgagtgtattcccttgtaagtaatatgattgaatcatctctgattgaaattcatattcttaaagaaatgtgaatgaattttatcactgcattttccgtagtggaaaatgttaaatttgatttttacgtttcataggtaggttggcctcggaggcctctgtcaaaaatggctgctgctttaaaaaatagctacatggtagctactttgcattcagttcgaaagttaccaggatcaggtatgcagcaaacataacagtcttgtcatgcccttatttcctatagaattggtaatgcatgttatacaatatgcttcttgttacatataaaactatttgatgattatcttagtgtatttgaagttatttgacagagggagatgatcaaaagacgctaattggaatggctcgtgctacatcagatcatgcctttaatgcgacaatctgggatgtccttgttgatccttcttaccaggtttcatttatatgtgtaaattgtgcattgctttttccttttttagttaaacacttaggtgagccaaacctacattgtcgtaaatttatttcaatgttatgaagcaatggaattttttgtgccaaattcattattgctgtggttgttgatcgggtaatgtaatgtttcggctatctggggtattttgttgcactttattgaaggcgaaactaactgaaaaatagttggacatggttttgtgatttgtcaacacaataacacattaattttgattgtattcaatctgatactgtagctttctgactgtcctatcattcagggtcaaggccttggtaaggctcttgtcgaaaagataataagggcacttctgcagagggacataggcaatattacactcttcgcggatagccaaggtatgacaacattattatatagtggaatgtggattactattaaggattggtttttctagatcagttaatctttattgttaaattttccatattctttgagtgttctttcctttaggttatttactaatcaaccaaagattttttagattttgcaccctttttctagatttgcatgctgttatactttaatacttgaagcttgaacttgagctgttcgttatggttttttcagttgtggaattttatcgaaacctgggtttcgaacctgatccagagggcattaagggtatgttctggtaccctaaatattgattttaggcttaaatagggtaaaccagacacttttgttcagcaagttcagacatttcgaatcctacttttttgtaaatttgtcaattatgcatttgcattgacattttatgaattctttctgaactattatgtgatcgacttgcaaaaagggtatatatcatatatggcatcttgacttgcaaaagtgtttgattgtaaagtgagtctgtttatcttgtatattgtcagtgactataaatagctctaaattggaaatttcttctcccttattcccatacttttcttgtgtgaaatttatcaaactaacaatgtgaaatgctaaaatttgtaaaataatctcacttaatttattttatgtaaccatgatggtcgcacagtgtaaatctatggttgttttatggtcgcgcagtgtaattcttgatcgtttgtgtgaccatacatgattattttgctaataaaaattttgtaaaattatttggccaataaaaatttacataaacgctatttttaaaaaacactcgcaacatacatctgttttatttgaggaaagtacatattttgtatcatacatactagttactacctaatggatggagattaacggaatcattagttttagaagaaattacattgtatatctattttattttacctgttttatttttatttttatttttatagtttgttaagatatacctatgtttttattatattttttaacttaatgtaaattatgttttaattaagtagaaagtgaaggtaaattagacaactcacttaaaaagatgagtacattttaatgaaaattgattaaaggttacaaaaaaagatattttttaacttatgtagttttattgtcaa

SEQ ID NO: 163030 - DNA, 796 bp, Cannabis sativa
gtggtctttggactgatcccaatcatatctgtatggctccacgccagtatatcttggttctttttcactgtggaaacaatttttcttttaccactagagataagtttcatcccaccttaatgactttggtgcgatctattttgttgatcctgactttctcaacatcttccagtggtttgatcattctttctatccctacttgggatctaactcatcttcctctcagattacctcttgtttgggttggacgattgtttcaagagcctcttcaacttcttcttcgaccataataccaatctagcagagacattttaacatttcatggtgctttgaatactcccacaattccattatcacataagaacttaatgcacatgttcctgatagaagtaactgctctaaaattgactaagacggggcgtcctaggttggcgttgtaggcatcagacagtctaccactataaacgtgcaatatctaaatgcaaaggcactggaagttctagctacacccccatccaaaatggctgggagcttaattttcctcattgacaataaggaatcaccattgaagccttaaagttgtatcaggcatggcgtcagatcaacattcgtcaacccaatcacttggaaggaaaacttaaacaatacgttgataaagcttctgttgtccactaaaacttttgacagaatcttgtttgtgatttgggcttcaataactagtggtcattatggggggaaatgtacgtgcttaatgtcttcttctgtgaaagtgatgggtgttggaatttattttacc

SEQ ID NO: 163031 - DNA, 1881 bp, Cannabis sativa
gtagttgtgccaaatttagcgcatactaaaatttagaccaaatttagcacaaaatataatattgtgtaaaatttgacacacaataaatactactttttacattacattttttcattaatcattaataaaatactttgatacatacattttatttagaatattgtcattagtaattttttaaatatttaatttattgtttgtcattaataatattttactttttagaccaatttatttcttaaaatgttattgtgcattggagcaacatagtaaatattatgctaaatataaaatttgtttattttttgtgggataaatatcattttggaccctgtattttataaaagttaccaattagactttttgttttgttaaatgacaaaatagaccttgtaataggattctgaactgattttttgtcaaaataaaatttaataataattcgatctagagatgtcatgacaaaattgattacattttctgtatttgttcgtgttagaaattatgttaaagttgattatattagaaaataaaattatttaaaattgatgtcaaagtcctatttttactattttaaaaaatatagggtctattttatcatttaataaaataaaaagtccaatttgtaactttttcaaaatacaaagtctaaaatgatatttatcatttttttgtgtcaaatttaatacaatatttacatcttgcattggagatgatctaatcatgagacactagtattgagcactactagtatttaataacaatgctcatagtattatgtgcatgagttgctttaattatcatacgtgattagaattggactttatattacaccatctttaattacaagttaacgagaatattgctaattttcaacatattaaaattgattaaaatattccatttaactttgacaaaaacgttattattatataggaatccattggtggaggttgttttggattttgaatatttagcttaagtttacgataaaatctttaatttaataaattatataggttaattctatatttcaagagtgaaaatttagtctaatacatttcttatacgcgaactttaattttagtctgtaaactatttgataaaataattttaaggtacacaattataaaaaaataattggactaaaattgtactttaaatttttttcaaaatatatttattaaactctgttattcataaatttgattttggtttctctctaattttatacatgggttttaacttacaaaatatatagatcttcccatggattcaaatttttagttttatattttaaaatatttttctcaatttgaattatagtcacatttccagagtcatttctagttatatggaggtttgggcgaacttcaaaagagtcttttcacaactatttttttttattacttcttatacgaacacctagttaatgtatgttaaaaaattatatagtatttaaaaattatatatacacattaaacaaactaatcttataatagataaatataattatttttaaaataataatggaaacctatttttttaatacaaataaagagcttttagatatctagacttaagtttgtcatatataaatatacaagtactatatatattagtggctctcaagaaaaaatttgcaaaaaaaaccaaacgatttaactaaaagttatttgaattttattattattttatttgactaacatattttcattaaaaaacatcagagtttaatatattataaagaaataataaaaaattatctatttaaactagcttgccatccattttgaataggggtgggcatccgatccaatccaaccttttttttctcatccgatccaatccaattagtaattggatttggaaaatcatcat

SEQ ID NO: 163032 - DNA, 3706 bp, Cannabis sativa
aaaactaggatctgaggtggtgaacaagcctttaaaattatcttcaaagtaccggcatatttcttccctgtttgtgatccaattttggggagtcacctttatcgctccaatatgatttctacgccttcgcacaatagttgcagtgtgaaagcactttgtattactatccccttttgccacccacaactccctggacttttgtttccaaattctctccactttatattccaaataaagaatctccaattggattgaagcttccttagcacaattctcggaagtaattggagctccctgaattagactgagttggcgatgtagagtacgtagcttgaggtcacagaacccgaagcaatcacgattccaggtcttcagagctttcttcgtccacgacagtttcatcataactcgaaagctttgtcttcccgcacatggttggttccaggccctgtctatcgtagtgccgcaagaaggatcagaggctcaaacctccataaatctgaagggatacttgagtccaatctcattcggtcaggtatccaacagtaaaggcgcatgatcagaactgagaatcgggtgatgattaactctagcagaagggaacatcacacaccaatccggactagcaatggccctatcaagtcttttacgaactcgagcctgcgcatctctagcattgtaccaagtaaaggctgagccaatacacccaagatcaattcccccacagtcattgacaaaatttcccaaaaaatatccttcgtgagcagtaaactcccttcctccctacttttcatttgcattaagaatagcattaaggtcaccaatgatcaaccacggtccctcacaagctagaataatacctgtgatccactcccaaaattcagccttcttatttccataaggcgttccatagatgcagtaaaggaaccaaggttcgccaccatccaaagactcaactcgaagacaaaaacccgaatcaaacacttctttcacattaattaacattccttgcctccacacaacacaaaatcctcccccaataccaactgagtcaatgcagttaacaatcggaaaccccaaacgattcatacaacttaccatagccatactatccacctttgtctcagctaaaaataccaaatccactctttctctttgagcaaggccacgaatagcccactctgccgacggtctccgaagaccgcggcagttccaagcaaggcacctcatggcgcaggtgggggcatgaatctggccgcctcctcgccatccccaaaattttgggcatatgtaatcggaacttcaacaaattctcgagcatcccatctagattcccttcaatctcacccgcttccactcttctccttcttcttgttttgaccccagatccacggttagaggttcttctgccatctttcttcttttttccactctgaccacgtgaagattcaccaacttcacacgacccaaccctgcactccaagtttcccaagttctcagcttcacttccacccacgtcgatcacttcaggacatgccagactgacatcagagctggaatttcctttgaacaaaggggtctgaaacacatccgggttcgggctataccacacatgggctttcctcttcctagtacccagaagatgaataataagctcagataaattaggtggattcgaaataatagaaggttgggctttataaagatccaacacttcagggccaattaattggttatataagttttgcaactcaagttcattactgggccatctcaggggggtgggctcaagaaagttgtggggttgttgaaacctgcaggtccaaatgtggggtatatctaaacattgggtcagagtaggcccaatatcaggaatttgttctccctccaggtctggcccaataggaaaagcaaaatctggagtaggaagcacgtgtaaaacattcctgggggaacattcaaaaattgaggatcctccgaggtaggtaaagaaccttagaccacatcatcctttcccaagggaattttccccctgccatctgtcccttccgtaccattttcatgcacaccatgcatcgtaccttcatgtacgatgtccttacccttccctgccgaactggccaagcctcctccgtctccttccccagcagcaaccttccgatcaaggttccttcgcctccaccgtcccttggaactacttccatcttttgcaaaatcttccttggtaccagtagtgatttcccgttgagtacccttgctggtaaagcaattaccatgagctccatccactttgatccatggcccatacattctaacggccgtccccactgcaggtgtcacccacgccgtcggggaaagacattcccggttcaggtgggccagttttccacaattaaaacatagataaggcagcttttcgtatttgaattgcacccatgactccggattagcaccagccttgagaaaaaaactcgcagggaatggatggatgatccaaacgtcaatccaacatcggagaaaaccccttcgcacaatttcttccttccgttttccatccgttttgatgaagtgacctattttctttgccacaataggagcatttgtctccgataagcatctctttggcaagccatgaatttccacccaaaaccgtgccacttcgaaatcggacaatcgcgcttcaccttcaataggccaaggctttaggttttgcagtactccattaacgagccagggacgcctattcatgatcagttcacagtcctcctccgattcaaagaaaaaacccagaacaccttcctcacatttcttcattcaccagccatgttgggtcttccaaattccacttagaatctttcgaaccaccgacgcaggcatagttttgcaccccatgacttttcccacgcaagctttcttaacaacaatgtcttccaaagttaggtcttcaaacagctcaagcatttcaatttccatctcactatctcgctgtagaagttcaccagcttgtttatccatcgagactacctcaacaatcacttcagaatccaaaacttcgtttactatcaccataacgacacagaaaagagcctcagaaaaaaactagggataacccaaatagtccaccagtgagactagactctacaaaggagccataacataaagtgctctcatttgctattaagcagcgccatttaggaaatggttagagcagctccaacgaggctgcaaataagtggtatggtgtgtatatatgttccaaggaggctgcatatcatgcagcattttgatgttttatgtacagtgcacggcatataggccgtgcactgtagtcatggcattcttcttgttttttttttcttaatttggttaatatttatatatatatatatttatattattgtatttgtaaaattaaaaattattttttagaaaattttacaatgcacatttttaaaagtaatgtacgaatctattcctatttgtttcggcaccccacaaatttttttagtctatttttttttatatagtagtgtatattataattatttaagacatcctgtaaaatttagaaaaatttaatatgccgaaaataatgcacttctttaaaagtgtggtgcactgatataacaattgtgataacttttgtgaattaatatgatattattttttattttattaaaaaattaatataataataaggaatatt

SEQ ID NO: 163033 - DNA, 2616 bp, Cannabis sativa
  modified_base (2578)..(2581): a, c, t, g, unknown or other
atatacaagcaaagaacctatttaaccgagagattatactcatagctccacaagacccaagcaaaagactatacaacagcttaaataactcaaatatagctccataagtaaacctaaacatttcaagctaaaacagaaatcagatttctaaaaatgcatacaaaaactttctactaagaatatgaaagagagagcttaccttggtcaaacacctgcaaactcttgaaaatcctactagaaatcttcatgtgtactggcaatgttattcataaggctagatgagaaattattgaactgatttttcttgagaagctctaaaagtcataggaacctagggcatatcttacccttgtctccgacgtatttcatacctttcactaataacatacatagaaagacatgttttccccttcttgggatttctacgtttttgagcttaaaatctacatatcttttaagcacattgaccataatcttctctaaagccttactaatctactgaactgactccaaatccaggtatttttttcctcgggtttcaaaaatggtacattatactattaaacatctcataggaaaccatccctatcatactttgataactatttgttgcacaaaaactttatcaaagacaatactttttctatgaattcttaaaattcatcatgtaagcttgcagcatatcattaagtatctaaatcatccttctggactgactatctattaagggtagaaagttgtactaaacttcagttttgtactcatggccctctgtaaactttgttaaaacttagagacgaactttggtttcttatccaatgtaatggactttagtgttgcataaggtcacattatctccttcctatattttcaatactaactcttgcgccaaattaataccctgattcatattgaaccatagaaaattagacatgattgcggttttatgtgattcaattacaaaatttctaataacctctttccatatcacttgggcaaaattaatagatcatgataaccttactagtttttggtgtttaaccctaatttactgacaaagtaagcatctgaatacataattgtccacatatttttgcattctacatcattagtaagtagaatttcaagtcttggtacattttaatagtaccaaaatgtaacaatttatagagtggtatgagctttctttagagtctctcttctaagcttaacaatgtttggaacccaaacttgaattttatgatgtaacatcttctgatctgacattgaaaattctctaacctagccaattaacacttcttttcgaggtttcaataaatttgaacccaccaattgagcctttctatttttatttaatgaatctggttgaagtgttaacttactaagtttacccatcacaaattttaaagttagcttgatcatgacaaccgctaactaaggagaaatcatggatgcacggaaaaccctccggagatatttcttacctagggtttcctccactaaattagccttcccagtgtaatagtgtgttttacgttcttaatctttagctaactcaaacactgcctcttcttagttaactcagataagggcatagagatcttggaaactctttcacaaggcaatggtagtaaccaactgaatctagaaagcttctaatcttggtgactgactttggccttagccaatccctatcgaattgattctttcccgtataatccataatcccatttttactaacaacgtgcactaggaaagacactcaaaataaccaaaattcatatttcttaatttgatatgtagtttatgttgtcatagtcacttcaaaaccatctgtagatgtttctcatgctctgcttttaattgagagtacacaatgatattatcgataactactataacacatatagagagaaaatccttgaataccttgttcatcaaatctataagagttactagagcattggttagtctaaaagacataaccaaaaaattgacaatgaccatatctggtatgataggtattccttaagaggtccttttcttggattctaaactaatgataaccccagcgaagatcacacttggagaggactacctttcccctaaagttaatcaaacaaatctccaattctaggccaagggtacttatttttaattattaacttgtttacttcttggtagtcaatactcatatgacacgatccatcttcctttttcataaacaacactggaacttcccaaggcgggacactaggtcagataaatcccaagtcaaacttcacttaagattaccactttaattccttaagttctaatgaatccaaatttaaaaggtaacatgaaattctaatgctattaagattatagaaaaattagaaaattaaaagaaaaagataaatgataagcaaaagatcaaaggatttttctcttcttcttttgtctgtttaattttgaatggcatatactactaggattagtattccaatccaattaatcctaataccatgagcaaaaaaaaattcaattttcaaagaaagaggtaaaagataagtgaaaataaaaaaaaaaaaaaaannnnaaaaaaaaaaaaaaatttttttccttttttttttt

SEQ ID NO: 163034 - DNA, 1292 bp, Cannabis sativa
agatttatttgtgactatgtatctatactattagagctaatgtttgaatgtttaacgttattataattgattctgcctagtttaaattagttaaatagattctcataatgtaattataagagtaactcatgatcacatcaataaattctcaaaaaataaacaaaatacaactgaacaagaaaatttacaattttttccttagttacggggaattttttacaaaatataataattctagaacataactctacaatcgtcatagttcgagaataaaaaacctatttattcacctttataataattgttaatgtaaaatacgtgagatatgctattaaattatactcataacaatataattgttggacatcattgatgccttttagcttgttgtgtagtattttggttaaatcaatagtacactccataaagatatgttatggtaggtttcggtattcagattagtattttagttattttttcatgatcatatatgttgtggttatttaagactatttacaaatttttagaaaaatctgaataatttatagtgtctaatataaagttcaaacagttacttactattcgtttgagagaactacttaagtgtaaaaaaaaaaaaatatttgaactttattttcagcgatgtaaattataaaaataccctaaataactacaatctatataattaaaaaaataaattaagaaactctcctgaataccaaaataaataggggtctaccgaaacactcgttgtagtatacacttatcctatattatttaagtacatatgacattatctaatgtacacacaattgtacgctcactctttttttttgttaaaaatattgaagtagttattactactagactacatcgtatttcacaaaccagaattaagctgttaagcatgatttactacattaaataaatacacttctcaaaatgatcatactttctacgtcaacaaaataacttcctgtaaattcaaagcttcaaatccgtgtgtccttttcactaggaattttcttggcagaattcaatatatgttttggaaagttgaaagtatttttgagagccaagaatgtgctcttttccattataaaagagtgaagaaaataacccaatttttttttcagatcaaagctttacaaactaaactgatcaatcaacaccatgaaaagcgtttcacaaactcatttctctgttattcttcttcttcttgtttttatttttgtttggcttccattgaagattacttgctcaccaagaacacaagcagaggctctcataac

SEQ ID NO: 163035 - DNA, 913 bp, Cannabis sativa
ccacaaacaaaacagaaatctttcatctataagcagtacatacttcataattcgataaaaaactcttcccctatgaaaaatccgatgctaccaccattgtcgatgttcagtaccttgctacattcctccaagtgttcaaaatctaaatcctaatgatatagtgctatttcaatactatcagttttaaaatttctagaaaggaaagcagcagcaatttccaaaatttttttctaaaaaaaaaaaaaagacaatttccaaatttcatttgtcaacttggccattacaaaaacaattttacccaaatgtcaaaaacaaactgatgtgaaccccatttcttaacagaaaattcaagttaatcttctgataaaataaaagaaaatttctaaactggaaatatcatcattttacgccacttccttgtgctagaaaacattccaaagtaggcaaaaaacagaatttaatctaagtttcttttttaaagaaaaaaagaaaaaaaaatccagcgaaaaatttaccattcgaatactaagaactcggatttggacttaaatactaattaattaaattaattaactgcttaattcgaaaatattaagagtggaaatgaccatactaaccgtgaatcagagatcggaggcatagagatactggagccggtccatcccaagaaggccggcgcacggctagccactgcgatgagcgaaaacccgatacaacagcacaagagcagcttgatcttcaatgatcccacagttgagatcgcaacctgccggaacctctgaaccatccgacggttaacaaaaccagttctcatgaccgccgccgtcgttcttagctcagcaccaagaaaataatcaagaatcaagaaaagactcaggagcgaagctaccactgacctattcgctccccccga

SEQ ID NO: 163036 - DNA, 1679 bp, Cannabis sativa
  modified_base (402)..(405): a, c, t, g, unknown or other
tggttgattttcgttattatattttagttgtgcttttttattttttgctgaataaagtgtatttttataattttaaactttataaaatgtatttttgtaattaaaaacttaagccgtaaaattataaatagagagtatattgaaaatttatctttattttagtcactgttaattttaatattacatatgacactatatacaatgatgtaaaagggtatataggcaaaaagaagataaaaagaaaatggagaggacacttttggaaatatagggacttctatttgcaccccataaaatataaatacactctattattaaaaaaaaataaactaaaataatttttaaaaattactcttaatttatttttttcaatttttcctcatattattttatgttaatttnnnnacttattttaattttattttcatgattttttctaactcatgtatatatattttttattttttttaaaaaaaaaattcatataattttttattttattgttttggtataatatttaaagtataatttaattttgttcgatagtatattttttaagaatatgagttggaagaaaaaagttgaaaaaactaaatataattaatgatataaattttatataaataaaaattattaaaataaagtatctttagatttttttattaatttttttaaggtgtaaataaatattccctttccaaatccctatatttccaaaagtgtcctcttcattttcattttgtagtctcttagtaaattgtaagatatactgttgtaaacaaaagtatatagaattacaattaatttatgtaccgaaaatactaaaattacttttagagaatgaatattaagaacattcactaccaaacaatttttttatgtatgtattatatgtaaaattcagtataaagtaaaataaaaatggaaaaccaatataccaaatgttagggcaggaaacacatgttgctcttataatttcttaattagtcttctctttggatcactaattgacccggtaaaaaaaacataaattccaatatgcattatcacaaaatcaattccgcagctaaatatgactacaatatatttattattgaatgacttagcttaggcaatctaacctacgtgatctttagaaaaggatagattatgtgtagattttttaacaaaaaacttattattattatatataaatttctttattgattatatatagatgtattcttaattggtattgatgggtattattaaaaaaaaattgatattctatacctaattttatcatcatttttttttaagaaaaaaattcttacattatatggcttgaggttgttgtaccagagcatcttcaaagcattttgaagaatatttgatgagatagaaaatttaggtgacaaaatataaggatgttagagcatctcctatggagatactattaaggatgcttaatgacatgaatatatttatagtattttttaattgatgcttaccattggaatgaaaaagaatatcataccataacatcctaatgatgtgtaagagagataaaataaaataatatatttttaagtgatgtggaagtttatgacactcttaaagaatgttattattggagatgctcttataccttagacataaaagaatattattcttgaaatttgcattgatgtcacacaatg

SEQ ID NO: 163037 - DNA, 1084 bp, Cannabis sativa
gtgctttatggagatgactagtaaaattagctcgagtatcttctcctctaaaactgatgaaaacatcatatttttttcgggataagatggcaaggggctgattatcatcatccatagcgatctttaggatgtgaaatgtattttcatcatcatcatttatgggcgagatttgttaagaatgagaagaaattgatccgtacatctgataaagtctgttaatttatatatattttgtaatatccttttcttcttccgtgaagttgcgctattaatattattatattgatagttgaattataaagaaaacccctaatttggcttccttgaaagtttcttcgaaaatgtaaattataaattataattatcacagtaaacaattgtagtagttcaactataattaattaagcttgaagaggtctttcaatagtacgtaatatgcatatataaaatttcaacatgtgcaatgagaagtaaaataactggccaatagaacagacaaacatctatatatatatatatatatatatattagaagtaagttacgtgcaagtaagtatacttaattttatattgcattcagaaaaaaaatttatattaagtgcctcatattataaattgagattgtagaaatttagaaaataattccatcacaaattaataaagtaagaataaatcactttgataatcaatattaacatggtaaatataacagtaattgcaaaaataataaaatacttattgtgtagtaatctttgaattatactcagagaaaaaaaatacttaaggagatcctttcaaaggagagagatttctaactattgagatggtgacagaaagagaaagcatgtacgcaaagtaaaagtggccaatagaaaagacaaacattacatatatgtgtagtcatcgatcctatatattaataaaatgttccggatacgtagtttcgtggaaattgtcaccccaattaaataataataataaaataaaaaatcagttcattgtcttatttgtattattttataaaatacaggatcaattttatcatttaataaaataaatggtccaattgataacttttataaaa

SEQ ID NO: 163038 - DNA, 1674 bp, Cannabis sativa
ttgaaaattcccatttttattttgatttggaatttctatgaattgggattgtgcttattttctgatatggattatgttttgacagtttgtgctgatttggttcgcggtgccaaggacaagaggctaagagtcaagggaccagtgagaatgcccactaaggttttgcttatcacaaccagaaagtctccttgtggtgaaggtatgtgttgatgtccctcattccattagttttttcattggggatacaaatataggccttggtatcaatatattagtccagaggaaccaatttcaatggttaggcaaatggtttgctcgaacttggttttgggttgtataatgtatattgtagagattggttggtacttcacttttgagttttaagagccaatcataagcgctttggaaaatatcttacaggatgttggaagtttgttcagtgcacattgctttaatctcattactttcagatgattataggctttggtagtggattcagttttgaatgcaagtcagttattgatcataaaattcttttccaacaatttgccttttgatttcatcaatattttgcttgtggtttgcaggaacaaacacatttgacaggtttgagcttcgtgtccataaaagagtcattgacctcttcagctctccagatgtggtgaagcaaatcacctccatcacaattgagcctggtgtcgaggtggaagtgacaattgctgactcttaagtccctgccccataatttaatgccttctccacctcattattagttgataagaaattttcttttctatgctctcattttggcttaaacttggatgacataatagtgttagcaaaggactggccttatattcttatttttgagttaaaactactttgtgatgagggaattttgtttgttagcagctttcgtttcaaatttttggttgatttactgaaatacaacattttgattgttgaaaaagcctcgctccaaatattgtttttttttctttcttttctcttctttgagcgtaattctgttacattttttcttcctgatgttacttgtctttattgaagtcgttgaggcaagtaacactttgaatttgaagtagtaaaatttaaaatggctggatcccaaatgaaaattggttttatagtgtatattaattgtttgtttaatagacaattaacactatgttgtcgttttaatttcaatttacctatacatatcattacgagcagtgccatcaaatttttccagtagaaattctgatatacacatgtatgatatgtgattattctgattacatgcatccttttttgagtgttgattaccaggcacttgaaattccaatagaaatttcaagtctagtattgattaccacttaccaggcacttgaaattccaatagaaatttcaagtctagtgttgattaccaggctcttgtacatcattttattttgttgaatgattagtcacaagagaagacactcgagcaattataatctgagctgtaaaatctttcattccaagtctattttcctttgttgttacgacctacgatatatcgtcataattaatcctcataattacgttttgctaattctgctactgaattcatttcctcctgataattacgttttgctaattctgctactaaattcatttcctcctgataattac

SEQ ID NO: 163039 - DNA, 868 bp, Cannabis sativa
aatcacacatgaattatagttttatgatgatgctttgtctctaaaattaaatataacagaggaaaattatatggtgcacgacccacctaaaacgaatacgaatgtacatatgcataagtatttatatttatttttttaggttaatttttgtataattatgtacagagaaatttatggtataaatattttatatttttaattttatacacttaaatatcacattttttttaacggattaaataccacatgttcgtttccatccatttccattactaccattccgttaaatactgattgtacgtttattaaaatgacacgtgtcatatttttattggtcaaactcatattatttttttaaaaaaattaaatattattccaataagtaaaaaatatatattttaaaattataaaaactaaaaaatatgtttaattaatttttttattcttattaacacacttaatcaaaatttaaccacaaaatcttattttaagaacaatgttattcttcaaattaaaaaaaactttgtttattaaattcaaagattcaaattctattcaaaatcaatttacttaaaacttccaagaattttaactacaaaagtaatcagatccaaactaatattatacaataacaactaattagttaaaccaaattcaagaacataaaaatgtcaaatttattatattgacatataaaagaatattaagcattattaatagcttttagcatttttctaaaatataattgatgagtgaaacccataattaatactacttttggtgtagcaaaaatattattggagtggaaatggagcaatgagattagaggaattaattagcacactaattaatattaattaattaatta

SEQ ID NO: 163040 - DNA, 2017 bp, Cannabis sativa
gagagagagagagagatatgagattgtataaaatgagatctacaattaggggttttatatttaaatgagaacctcgatggtttaagccgtatgggattctttttacgtcttgtttttcaattttggtcctgtgactatttttaatcgttgagaatagtaaaccattgtttaaaactattaggaattcttctcgattgctgacggtattaaataatcacttacttttattagcgacgatcctaaaataataatttggggactgacgagaatagtgctttttgtagtaatgacccttcgatccctctcctcttttaaaattctaaatgtgctcttcatagtgtaaccaccacttttatcaaaagaccagaaccaatgatcttccaaaactaaattacacaaaagaatatcaagaatagcaaatacatctctttctgaaatgatatctttgcctatatcactatcccaaatgtgttccctaacaacaaaaagctactcaccttctcattaaccaagtcaagataaacactaaaaagtcacgttaattcccacaggaagccaaagatttttgaaaatataagtacttgcaccaccactaattttcttcttagtcccttgacgaattaaatcatgagttttcaaaagactccaccaaataaaacttggattgttcccaattaagttgagcatagagaaaattctcattcttaaaatagcgagccttataaatttgagaaactaccgagtcatgcttagtaatagatctccatgcttgttttcttaacatggcaaaattgaaatcctgaagcgacaaaaagcccaaaccctcaacctttttactaaacgacatcctatcccaactcatccaaaaaaatataattatgagaattagtaaaagactgcttccaccaaaaattagccataaattgctcaagatcatgaaaatttctactagcaaaagaaacacactcatggcaactctggacaacacttcgaaccaaaacctctttgcctacacgagataaaagcttttcgtcccaacactttctcatcttctctttcaagaactcctaacatagttaaccttttcctcccaatcgtacttggcaaatctaaatacatactattagcatctgtttctgtaattaatattcaatatattataaagagactaacgaacatattaataacattgcgactaaagaaagcaaaagacttattcaaattaatcttctggcccaacactcattcaaaactttgtaacatctcagtcacatttttagctccaccagtattagcttgattaaataaataactatcatcgacaaacaaaatataagaggcaaatggagcccccctaaacacacaacacaccctaataagttgataatgttcataatttcgaacaaagttgaaaacctctcaacacaaattaacaacaaataaggtgacaacatgtcacaccttgcctaatctcgcgagtaggaataatgggactcacttgatgatcgacatgcacaatctgataccgaactgaggaaaaactattagttttatggtactaaatcatgtatatagcgagaaatttcgtatatttgattatcattgtaccatagcccaaggatctctagatgtataaaaattaaattaaaaataaaatacattaaagaaatatatatatatatataccttgatgactatcagggtatcttcgaaacctttggtaagttggattgaataattctcacacattgtagtcttccaaatcgatccaccaaaaacaaagaataagtgtataattttttcttgttgagattttcaatacacgagcaagaatagtttgagagagagaaacaatttttcttttctccttgtatttcaaaaattacagtgtgaaaaactccttctgattactcaaatcagacttctatttacagtagttaattctcaattaattaaatgatatttaattatttaaataaatatctgttgaccgaggttttcggaaactaataaaata

SEQ ID NO: 163041 - DNA, 2002 bp, Cannabis sativa
aaaaaaaaaaaaaaaaaagcagtggtcgtgcctaatcaaaaagtttagccagtatttacaacactaaatctgagtggtttacaaacataagctgagagaagtcgtgccttttgacatgtgattagtctctatgttttagagcgagtctgagtgtttttatttctgtctgatctattctgatttcgtcctttcctggttcatgcatggcttctagcagacattaaaaatagatagaataatatatgtttggaggaagaagaggatagcgaagaggttcttgatatcacaaaggaaaacgcttctgacctttggaagcccgacaagggaatgacaattaagatccttaagcaaaatagattcttgtttcagttctaccacgaaatagacattaaacgtgttatcaatggcaggccatccacgtatgatcgtaaacaataaataatcaaacgactgaaaatagaggacaacccaaagctaatcgagcttcgtacccttgatatgtgggtttagatacacgatctccaagcaagattcaagactgagcaagtagttcaaaaagtaagtaactacataggtgctttccttaaatgggaaccaaatatgtggcgtgattctctcagagttcgggtgtccgttctcctaaatgctctactgaaaagaagaatgaagtttaaaaaatgtgatggtgttgctttttgggcaaatttcaaatatgagcgagttccgaccttttgcttcatttgtgacattatgggccactccgaaactatttgcgataaactctacgatacacctctagaagcaatcataaagccctacgggctgttcatgagagcaccacaaaaaggaaggaattttctcacagcttcaccatggctccgacagggtccaaccgatacacctaacagaccagaggtaaatcacgttgattctgatgaagttaatgcaaacataaatattttccctattattgttgaaaaaatcttggaagagaatcaccctgattttaagcatgggatacatgatcaaaggaatgaggcaaaaagttaactttggatgtcaatgagccagctgtcttcataaaagaaaataatgatatgtttacttctaatatggagttagctatttcaaagttaaaacggcgtcgtgtaggtctacctttaaataatgggcctactaatataaccaaggttatggagcaagataggaatttttttgagtcttctgatgggctttcaaaaaatagagaaacggtgggctttggtgttcaggcccactaaacattatgagtacaatcaattggaactatcgtgggcttgggaacccacgggccgttcagttcctagaaggcatatgcagttaaaagaagcccaaattcttgtttttgtgtgagacactttgtaaaaaagatctggtggagcgattaagggtccagcttgggttcgaaggtggtttctccatcgatgctacaggtagaaaaaggggcttggttctattttggaaaacctctgaagaagttaatcttctcggtttctcttcaaaccatatcgatattgaagtctgtatcagcgtcgtgttgatgtggcgtctgaccaatttttatggcaaaccaaatagaagattgcgtgatcgaacatggactctactttgttctttgtaccatgaatctcccatggtgcatcattggcgactttaacaacatttcaaactaaggcgataagagaggtggatgcccttacccaacctctttaatttatggctttcaattggttcttgatgactgcaatcttattgacctggaccttcgaggctatcctttcacttaggatcgtgggcgtggcacatatcattgtgttgaaattcatcttgaaaagctactgtttcccatagctggttaggtactattggattatattttaccaggatctagagttactaccatgtatgttgtttaacatcctaaatatgaatctctaaaataatgtaaataaacacatataaa

SEQ ID NO: 163042 - DNA, 1816 bp, Cannabis sativa
cacaggtcgttttttgaaaagcactaaaaaatatgtgtaaaaatatatttaaattaaattttatttagatgtaaattaaattgattaatgtataataaaaatatgtattctttaacttttcctttaaaaattttcaaatttttaaaattttacaaagtaccttcaatataactacaacttaaaaaattataaattcttttcaaatatccaaacaaataaaacatataattacaaagtagattgatagatgttaatgggtgcagaagcatcctaaatatattattatcaattttccatccttaatccaacacaacagcctggcacatctgcaatttcacttcgaaaagtattaaaactctttatatgattatataatttaattagaaaatgggtgacgtaggtgctagctaattagcttccccaattgaataaaaaacaaaatattttactaactattttctccacaattaatctctattctatatatacatgcatttgtagatgttatagatgcaaagagtagctagttctttcactattctcatcatggagatcaataatcaagggccacaaataattccacgagttctcatctttcccataccagctcaaggacacgtcagcccgatgttaaacctggcagagcttcttgccatgtcaggcctccacgtcacctttctaaacaccgaccacattcacaatcgtctcataaagtacaccgatgtaaaaactcggtgtactaagtacccaggcttccttttcaagaccatctcagatggtctagaaaaggagcacggtaaatcagtttgggattttatttttcatctacaaaaaaacatcaagccggttttgaaagagatgctcgtctccggccaactcggatcgggtgaaagtccttacattacttatatgattttggatggattatttggtgagtttactatagatgttgctgaggagcttggaattccttgtgttcattttaggacagcctctgcttgttgtttttggtctttctttttctttccgcgtcttgttgacaccggagagattccgatcacaggtaattatttttttttatttctttatattattatttttatttaaactaaccgaaatattcattaattaataggtaaatcaaacaaaattcattacatgtatatcatcttaaatgtgattatatatgaatgttcactcttgtttatatatcttaaaaaatattaagtttattcacattaataatcagtatagtatatgtataagcaaaaagccaattacaattttttaagtctaaaattacatgttaaaatatttttttttcataaaaatattagtttaaataaagtttttaatattttaatttattattttataaaaacttcaaactctgtaaaagtacttgtttcacatcttccctccaattaatttagtattcacttttttaaatactaaatcatgtatgtctcctcttctccccacgttagtcttttttttttttcttatattataaaaaattaattcctcttcactacacctataaattgaaaattgtcaaattattatctttcttaaaataaaataatttacggcataaatatttaagtttaatttattaactaaatatttaattttaattttaacggtaataatatttaaattataattctggaacttcgtaggcacttagttattaaactaggtgattgttacgtgccaagccacgtagtgttagttttatttaatattttagttttttatttgaattaataattaaaatagtataattatttaatagtataattattaaaaataa

SEQ ID NO: 163043 - DNA, 1640 bp, Cannabis sativa
gctgttggatcacctattttttctttgccatggaaaagagaaacgatgaacacaaacgcctaatcctccaccaagacatttttcaatccaaaaaaaatcgacaaattgaatcatccaataataataataaaaaatagagcttgacccaaatgatgacacttctcttagaatgcactgttgcgatcttaatcaacattctcaacgaggcttactgaatgattttggaacttaccaatataagttctccttgtgcatctttgtctgttgagtgtgtggtagcttatttcgctaaagctaaggctggtagagttgttaattcttggttttaaatattactatgttcctctttttttatgccattgataaattatagatctttacacgaaactttttcaaggatttaataatgttttaccttttgtaaagatcgctcatttcacctataatcaagctatacttgtatcgttacactcttgaaattgccaccacatcattaatctcgacatcatgcaatgtccttagtggcctgctttatttcaactcttagctacacatgtcaaggaccaaccctcacacgtgcagataactatcttgtctcaaatggatcaacaactctcgagtttcaccaaatagcttcttattacctcgtctgagtttaacccacttatgagaaaccctagaacaggattgttaaatgtgggtgtttcaatgtttcaagtcaggaaaggtgaaaccctagtcgtgcattggctctgacattgtttatacgacccgaccgaacccgattggaaaatgattaggcttgatgatgaacttaggccaaggatcttcactctggtagaataggatattgctcaatctaggtctttcttgatcagtttcttgagttactccattactattcaaccatgtttaattttatcggaccttatttgtgccccagtgactcaactcagcatgtggtggagcattgtttattttataggaagaataatagcatgttgttattagtgggtctggtcaaagtggtgagaagaagctaacaaattgggggagtgagttagttagaaggagcagtggtggtggtggtagcgatattggtttgggataggtggcaaaaaatgggaattgtatggctcaagctcaattaatattaaatatgtttagtgtcggtaatagtaatggtaacggtaataataatgaatatattttagttcaatggcatgattggacacttaaacttggttggaaagatacttgtttgtgtaccacttatgtacacacttgttgtactactaatgcttttactactttcaactatattattttcataattttaaatgatgtatattttttttatttattataataatattttaagtatatagttttatttatcttcatatttaaaatataatttatttttatataaaacgtatattttttagagtgtaaaatagaaaaaattctaaagtgagtatcaattttaatatatatttaacacaaactaaaaataataaaataatgggtgatcttgctgaacaatatgagaactttcagattgatgatgaagaagagggtgttcttattgaaggggaggctgatggtgatgaacagaccttcgatgatagatggtgtct

SEQ ID NO: 163044 - DNA, 3203 bp, Cannabis sativa
tgtattcttctcaggtcttgaataagttatattgtgatgcaattttcatctttagtattgggttactctagaagggttcttcaaccaactgccacttattgtgtgttcaagggtggtacagcttatttcaacggggcactttcgttctcccaaatagcattcgggcagttgaactgcagctcttctcattccagtgatgattgtgaacaacaatcttccactatcgtaagtgttagcaatagctgcaacagcaacaatgccgatagttgcacccccgacattgataccttcaggattgtcgaaatccttaataatatgaaaaaggacaccaaacttgctttctctttcttttcccaattgaaggaagctggtttccaacataatgtctatacatattctgcccttatcactaatttatgccattcgggctttcaaaagaagttggatgagctcttcttggatctcgtggtcacctgtaaagaacaccaatgcttgcaaatctctgagttgttacagactctcacagaagaagttgagtttgatcaatcattggttcgagcttatgatgccttgatcaaggcttatgctagtgtcggtatgtttgatgaagccattgatcttgtattttacatgaatagatgtggatttgcccctcatatctctgcttgcaattatcttattcagtgcttgagtaagcatgacaaagtggatatggctatggctgcattcaagcagcttaaaagaattggggtacgtcctaatggttacacttatgcaattattatgaagatgctttgcaagaagggaagactggaagaaacactcgatgtgttcttagaaatcgaggaagctggtgtagccaactcaactgttgcataccgagcgtacattgaaggtctttgtaccaaccaaaggtcagccttgggttatcaagtgctccaagcatgccaaggagcgagcaggcctgttggtaaacatgcttatgcagctgttatacacgggttatgcaaggagatgaaaattgaagaagccgaaaaagcttttctggatatggaaacacagggattagttcccaattcacatgtgtacattgcattgattcatggctattgcaacagcggtcaattacagaaagctttatctctctgtagttatatgatgtcaaatggtgtaaaagcaaatagtttgatcatcagttcgattcttcaatgcttgtgcaagatgggaatgcattctgaagtggtgaatcagtttacagatcacaaggattcggggatctatctcgatgaagtttgttacaacattgtaatggatgctttatgcaaactagggaaagtggaacaagccgttaacttggtcgaggagatgaaggccaagaagatggttttggatatctttcattataccactctgatcaatggatattatctccaaggtaaaatcgaggatggtttgaatctgatggatgaaatgaaggagaaaagtggattaacccctgatgttgcattctacacaatgatgataagtaactactgcaagataaattgcttatcaaaagcctatgatctcttccattatatgaaaaggaaaggcattgaacctgatgtgacttgttacaatgttttgataggcttgcattgcaaggcagaacatcttcatgaagcttttgcagtttttgatgaaatgactgcgaaaggattagaacctgatatagttacccatacagctcttctttcgggttactgtactaagggagaaatggaaaaggctcgattgctttttgatggcttgattaagaaagggttaactcctgatgtaaatttctatacaatgatgataaacagctactgcaaggtcaattgtatcagggaagcttatgatctcttacatgatatgaaaagtaaagggatagaacccgatgtgatatgttacacgattttgatcgacacaaattgtaagatgggtaatcttaaggaggctactgcagtttttcatgaaatggctgaaagtggtgtggaacctgatttagtaacttatagagctcttctgtcaggattttataataagggtgatgatgagaatgcttccatcctcattcaggaaatgtcttccaaagggatattgtttcatactgatagccaaataagctctctttaatggagcgcccatatctcccgctggctcaattcttaaaccccaactgcctcagttccattaatggtgttccattaattcttatccaatttttctccacaaacacaactgacccatatgaccaaaacatctgatttcatcgaggttggcggtggtagaagaagaaaggtcttgcttgagaagcttcaaaactgtaagggccccaaaacaccaatggtagctattgatcggaggtaataatgccaataattttttctttcatagactataatatgcgcatatataattgaatttcaataatattatgcacatagtttcaatttgaatttcaataataattataaattttttataattctgttcttttttcctttctctgttattcttttgcttcttattatttttgttttcttcaaatctctaaatacttgacatttccacctttagtcttgtttaagtacttcagtaattaattaacaaatttttgtttagttgtcaaaatgaattttgatgtggaacacaaaaatacttatagttgtgagccaagaatttagtggttttcaaggtattccatcttcttctattttttcagttgtgtatatagagcactatatttaaggggagatagttggttttgtggtggttaaagaaatcccaaaatacaaaaatgtcttgggtttgaacatgcatgagctttggaatataatatgtaacatactaaaatgatccccatgtgcaacatacatgccctcaaactaatattattaatatatattgctaatagtcaaaggacttccccatttctagcggttagtaactaataaaaacttatcattgtgttgtgtgctaattgactttcaaagtcctccctaattaagaaaaaggtgagttgtttttaatagcatttttttatatataatctaactaattagatctgcattaacccatagtaagataattatctcaatcacaccacttaaaagtattctcaatatgatcaaagttgtagtacttacgttggtgctaaccactagttttgtatggagtag

SEQ ID NO: 163045 - DNA, 600 bp, Cannabis sativa
aattaggctattcttcttttatgttacacttaattagggaagggtttagactaaattgtttgtaatttctccattttttatggctgcttataaataagaccatacactactgtaataaaagaatatgattttatgcttttaagcagcaacatcgcaaaatttcgaaaaatatccaattctccgttatttggtcactaactttcttgatcttcaagcactcacggccaagcctcagcccctacacatggtcttttaattttgcagagacttgtaattttagtaagcagttagtcgggcttagtcactaagacctgtttgcaaatgaggcaccccttttttcgaagatacgagactattttgccaaattattttattatattgacgagttacctaaaattgtgtgtgtgtgtttttctttattaaaaaaaggtgttacattctttatttccttcaatctgtttcattttttttttgagagaatctctttcgtttttttttaatatacttgattgacgaaaatctttatagcctccttataaataatttatttatttatgtatttatatatggaagaggtttcaatggttacatttttattgt

SEQ ID NO: 163046 - DNA, 879 bp, Cannabis sativa
acgccctcctttcttcaaccccaacccttttaccaaaacaaatttcagatttgttgaagttaacttcttgacccgaggctgcagcatactttcccaaaattctcttaaacctatgacaagcattcatagtagcatcaaaaaataccatgctatcatccgcaaagaataggtgagaaaccgacaatccttgcctaccaaaccgtaccccatgtagcctcccagcagcctcctcattgtaaatcaagcttgagaatgcttcagcacagatttgaaataagtaaggagacaaagggtctccctggcgcaaccctcgctaaggaaccacacaccctttcacctcaccattaatcaaaaacgaaaaactaacagaagtgacacatcgcataatcttctcaacccacctttcatgatatcccaaccgaagcatcatagctcgtagaaagccccactccaccttatcatacgccttagccatatcaagtttcaatgccaacttccttccattctgaaacctatttttgcgcatacaatgtaagccctcatacccaataatcccattatcatgtatcaaccgtcctttaacaaaagcactctgcgattctgagataaccatccccaaagaactcctcatccaattagctagacatttagacacaattttataaataacattacacaagcttatcggtctaaactcctccactcttcgcggcttctcaactttcggaattaaagcaataatagtatcattgatacactccaaattagcgccattattaagaatattgagacaaaccttcaccacttccgcttggagcttcttccaaaatttttgataaaacaaagtcgggagaccatcctcttctggagcctttgtgg

SEQ ID NO: 163047 - DNA, 1654 bp, Cannabis sativa
tatatatattgaaaaattatttattcgaattgcaggtgtggaggcttgttaccaatttcttctttctggggcccttttcagttccatttgcttttgatctaataataatgtaagagggccaagcgctactatatcttttatcactattttgataatagcctttgtcataataaagatatgtaaattaaaaaatggtatttatgaacttgggcttaaataaataaagtgaaatactctcatatttcaatgactttgtgtgctttgattcttgatttgcatatagagctagatatggtgtgtccctagagaagggaacttttgacaagagaacagcagactttgtatggatgtttatcttcggagcattgtcacttttggtaaggaaaaaaaatgacaatattttacagtctcattattttgtggcaatgaataaagtgatttaatatgagaaattacgataaccaattaataatcaggtgatggctattattccaatattatcatccccatttatgggaggctcactagtttttatgatcgtctatgtatggagccgtgaatacccaaatgctcgtatcaacatatacggtcttgtatcattgaaggtatcatattcatatgtacaaacaatacaacaatttctttttattttctaagaaacatgcctttttttttcttgctatataatatatatatataataaaattcgtttgtgtgatagggtttctatcttccatgggcaatgctaacactagatttactatttggagtgccattaatggaagacattttaggaatggtggtagggcatctctattactttcttacggtgctttatcctctttctggtgggaagtacattttcaagactcctatttgggtgtatcctttaatttatttttcttagtaatataatttatataatgcatttatgtcatgatgaagtaaaaagagttttcttaattaaggagtgaattttaattcagtcataaaatagtggcatattggggtaagggaagtcaaatgaactccccagtggagagagatccatttgctggagttgccttccgaggaagaagctatcgtctcaatgggactccaacaaggcccgcccaccatggccatcaggatcaggatcagaatcaacgccctaaccatcaagctaatgacaatgggggagtttttcgtggaaggagttaccgccttagtggaaattagggaaaattttatttttatggtttttaagtataaatttataagatactaaagagcaatgtttgcctttcaaagttgctctgtggcaatttttcttgttttttttttcttttcagctgtttactttcacttttttgcatttttcttcctgtaaccacctccgatgtcttccagtaaccacactaatcctcccctgttgtcatcccttcccctataactatttttctcttcttaactgatcttcaacctatcaccctgctctatttctatctcttctatttttttgtttattacctattcctactggatgtgtagtaattttctttccacttaatggactcttttctgttagaatactgtaaactctgaatatagctctaattaattcaagagaatcaaacaataagattaaggaatagcggaagcgtaccggagtcca

SEQ ID NO: 163048 - DNA, 1339 bp, Cannabis sativa
gaagttctcagtatgattagatacattgtgaggagtgtgcttgaaaatgtggtggaatttctcagctggagctttgatttctatattagtctctagctttccaatgaggtcagaggaagaagacatatttggtaatatactgagttcgagatctttggtcatctcatttgctaggtcaaccaaagtgtgggggtctataatctcatcgtggtgcttctcatactcaaaacgccaatgtacaatgctgccttcaccctcagctttaggagtcactacaagtattattttgaacttcttataatgctccatcaggtccccttcaatcagcttgaaagtgatagaattcttctcatcatctatagcttccactatttgcttagatactcttctcttcccatctgaaattagttaattcaacttatgcatatgaccacgctatatatatgaagcaaaaatatatataataatacagtaaaaattttaggaatatacaatttctatgcaaaaatactttaaaaataacgttcttatctaagaaaatttctataaatagtgttgagaatcatgatattccatctcaaaaccaattgacaatgagtagagtagctcgtgttctttatatatggctcaatacttttatttttaatcaatgtggaacaatatttgcttattttcaccatctggatatcgtgcgaatggggaaagtctgctatattctccattaaatagtcttgtaatttataatattgttgaaataataatttaagaataaaattgtatatcacactgagatcaaacccagagttggactacttacttcggcgcacaagccgcttttagtacggaggcagagactgaattaggttcaccatatattcacaattttttttcttttttttaaaaaaaaaaagaaaaagacaaatattgcatagtttatttgttgtactaactacactttttttttttccagcaaaaacaataaataaataaattaaaaccattcaattatatatacttttctgcaaaaggtgtgtagtatttggccccgatactagaacttgaaataaatgtagccagttatattgactggattaatatattagtgaaataaatttatacgtttgtattgaaagtataaatttatatatttatatataatttatgattagtattaattgtatatatatagtgtcatatatatatatatattttgtcaggatagtgttatatataattgaatattaattattatgaatatttgccgcacccgttattaaaattataatggttttttattttttttattttttatttttatactttaaaatatatttttttt

SEQ ID NO: 163049 - DNA, 1750 bp, Cannabis sativa
aaaaaaaaaaaaaaaaaagaaccgtacaaccgtatttttttttttaaattttttgttttgtttttgtgtgtttttttttaaaaaataatccctaaatttttcaaacatgagtatggagtggactgtaccatccattatacaagcccacccaattttcccacacaccaaacatgaccaaagtatatggtaaaaatcagcactagaaaattaaaactttgcactatgtttaattaatgaggaaattacatgatatgttttcttaacaaaaacttaacttgatacatttttcttagaaattgatagttatagtaaaaaaaataactaatcaaagcataaaaaatcatatttgagtagcaatatttttatgaaaaattagggataagttgagaactatttttttttattacacattaactaaatataactgcaaaataattttaattgataaatactttattttataatcaaaataccaaataaaatctcacataacttatcaaaattagagtctcttacacacataatgagaatataatctataaaactaggtataaattaaaaaataataaaagaaaggtaaaaattaaaatagaaactaaaaagcgagtatacaatataatttttaatatataaaaattaagtttagcatatatttttcttttcaaattttccttaacaaatacataaaaaaattcaaaattccaaaatctaaaagaaactaatgataatgaaggccttaattatttttgtgaagatgttttgagaaatgatttggtcttggtaataaccctaacaggcttaggattaaacctaagcaagttataggcccaaacaccactaatggccccaagaattggtgcgacaacataaatccagaatcctttaaattggttccacacaattgctgggcccaagcttcttgctgggttcatagatgctccagaaatgggcctgcatagaagaagcccaagcccattaattagaatatgattgaactcattaatttaattttttaattattattaaataaaacattgactagtaattaaaatttaataccctgctacaagcacgtttaatagaacagtaaaaccaactgcaatcccaccaagctgaccaatctgcataaatgaaaaccccaaaataagattaatttgtaaaaaaaaaattgaggctttgaatttggtgagaaatcataagtatatataaatatttacaattgttttatatacgattctaattaaaaaaattatagcaaaagtactttattttacgattttgttacagtcatgcttttttttgactattaatatcaactcaaaaatacgtgacaacatattattggactatatattaaataaactaaagaaatatatcgtcaagtgtttttgagttagctcttaacgtgtttaattgacacttaacaagtaaaaaaaaaataagactgcaacaaaatcataaaataaaatacttttactgcaatttttttattagagttatatgtttaacaattacaaatattaaaaaattttgctccaaatattccatataaatattacaattacttaaataagccccactcaaataataattatcccaatcttgataaatttaagttctataaaaacaaaaaatgctcttgatgggaattgaacattgacctctaccttatatgtaatttaatttaaccattacactaaagctaatattatgtctgtaattattattttttaggctaattagcaatttt

SEQ ID NO: 163050 - DNA, 4804 bp, Cannabis sativa
ttttttttttttttttttttttttttttttttttctgaatagagtactttagaaaggaatttctttggataaattttacttagtattttttttactgattttttttttttagtttttactgtgtttgtttgttgtgaagtgctaaaaacgatagaatatctgtttaaatatcgatttttctaaaccaactttcggggtaagaatttcattcaaaattaaattttggggttagaaaaaaataatcatttcatggacttaagggtaattttatattagttttgtcggtgctgtttttctgattctttttaaaaaaaatataaagagaatgttctgagttttaaataggaactttatttattatgtttattataccaaaattaataaccaacgtctaacacgtaaagctaaataaaaaaagattttgtttgatactaatgaagaaagagaggctgttgttacattatagttgcaatgaatttttattaggtttaccattttaaaaaagaggaggaaagggaaactcagaaataagataaaatttatcaatttatttttaggaaaagatgaaaagtttcttttccagagaaaaataatggaaaagttgaccatccagatcatgtgagaattttgagaatgtatgtgagatttttttttttctttttaacaaagtaaagtaatagtgtagagaaagagtcagagcctttgaattttaaaacaagaggaacaaaaagatcatcaaaaaaataaaaccagtagcgcagcggaaactgtttagtgttggcgcaaggtaacggtaatctttagtttaaaaggaaattagaagccgcaaaccaaactttctaaaccaaaacctgtctcactcactcactcactcactcgagcccacactaattaaaaataataataaaactaaggaaaagctatggattgtagatgtgtatacacgtggcagaagattataacatgcaacttcagatgggttaggttcacgaggaatacacggttttgatcgccttattcgaaggtcttaatctctgtggtcccatctctcaattatatcagtcattattatttatttggtgttattttaattttttgaaacaaatatgatttacttttacttttagaaaatacggtaattaatttaataaataaataattatcgactaattttaaacaaagatatagtttttttttcttttcgttaacattatcaccacctcgccaaactattaccacaccactattacactaaaccaaacaaaatttagaaaaataaaaaaaataatataattaaacaatttcattaagccaacaaagaggaaaatttcctttcacaaatctttatctcaaatcagaaataaaaaaatctataatcctgaatactacatattcataaatcaataataaaatatattataaagactatataaaaatgtgagttaaaattttctctagctattatatgtgtttgttaatatttatcttttattattattattattattattattattaatgtatatgaatataataaattaaaatattaatattaatataataaataaaaaatattaatataattatttttctcaaagtattaaaattaaaaaataaattattttaatttaacacaaaaatataaattaaagagtaaaataaataataaaaatgtcaatatctaatagtggaaacttaatgttgttaaagaaataaaaatttgggatcaatttataaaaatataaaatttgaaaactaacttgccaaacttatataatttggaaattaatttgtcaaaaaataaaatttgaagaccaacttgctaaaacatatatagtttaaggacctagagtataaataagaaaaaaataataataataattaatgagagtaaaatcgaaacattagttagagcttggttaatttagaattggattggctcgaatctttgggtgactttttccttataagacgtggaatgttatatctattaatttgtctacttcgtctttagttatccctttattttttttcattatttttttaatttttgttaacttgtctttatctttttttttagaaatacaaataagtaagaaaaaattaaaatatatgaaaaataatgtaaatttaattagtatataataagttttatgtaaatttagcaaaacaaatatatttgtgtcatttatattaattttttaatatatttaattataatattaaaatatgaagtattagtattattttttatattttatatattaaaataataataaaattgataataaaattattaatttttattttttactaaaaacattaattgttactttttagtaacaattttttagttacaacataatttatgttaattgtgactaaaacatagtatttagttacaaattgttactaatttaattttagtcataataaatagtgactaaaaattcatttagttacaacaaattgtaatttttgtaactaatacttttagtcccaaattttttaatcacaacataggaatcatgatttataactagttacaatttttttatcacaaaatttgtgactaaaaataaaaaattttatagtgtaatactaagttttacatcaataattatatattaaagtacaatattaaaatttaatgtaaatctatcacaaaattattctttaatatataaaaaatttacatccggtcttattctattatttttttcggagtttgggtagtgtcgtaagttattttaagctttggtttcgagtctaaccttcgaaacatttcaagctcaagcagaatagtatagtgcattaattcttcaatacgtttctatatcagaaagaatcagagcatttgaactccatacgtacatataaactaaatataaaaatattaaaaatgaacaataataaacatatgatcagatttgtttttgttttttttttcttattgaataaacattgattagatcatgacatatatgtattaggtacaaagccgacaaacttattattaattattattagtctgacattaatcgtgttctccgttatttaaaaaaaaaaacaaatatgtatacaaatacaaatacaatgtatgtgtaagtatgtgtatatatgtggacacactatcaatattttaaaatgaaaaattcattaaatagttctcaccgaattttcttcttgcaaaaatgttcgtggataattttaattaatagtttggggagatattatacagttttcaataggcagatattaatattatagggttggtggtgatttatttattactttatgctcactcttaatcattagttcatattcaaagacctggtcatgcattgcacattagttcaattcatcatatcacttcgttgataatatacaaaagtaaccacaattattagcattgttttcactcttttcttgtcatgttgtccttttttttataaaatgagaaaatctcattaaatcaaacaacatcattacatggggcaaaacttaagagaacattatctgctgttcacaatattaacaataaatttatctttaaagaacattttcctcctgcctacacacctacatcgatcttttatatcctaatttaattatattaatgacatggtgaacaataaaagatttatatctaaatatacaaaaaaatatatcacaaaaaatgtatgttgggactaaaagtaacaatttttaacagtgtcaccatccacaaacttttgtgtagtgtaactcaacggagaaatgacaaataaagaacaaataatcatgactcttacaaaattattacacacggaacaataaagagagtattaaaaagttataacttttggagtttattcttggtatggagagtcatcaaatcaattgagagttcatcatttacctaagaatgaatctatgtttgagtatggagtctactccacaccacgcaatcattgtctactttatcatcatgatcaataaggagtgagttgtagaatttactaaccttcttcatattatatatattatatatatatgttatattttatgtaatctatttttttatctatatatatacacatatattaggcaatgttacatgtaatgtatataaatttagttttttattaattaagtttaattaggtgatattgagtacaatttatgaatgtttaatttttataattagataatgtatttttttaatttttgaaataagtttgagattttgatttttgaatttttttttagtatcttatatattggtgtgttatttagatgtgattgtatatatacatattttatgtacaataaaactcaagtgagatattgtagtgaatctttgtgtacttgattttacagacgcctcttcttttaatttaaagttaaacatgcaaagttaaaaatgaggttaaaattatctacattaatattttaagtattatagatttaaattaaaattacttatataaaatatctatataatttttactttttgatatatatatatataatattataaaattaataaaaaatattatgtaatgtaatagtatattttgctacataattttatttttagatgtatataataatattataaattaaattaataataaatattctattaagtagtaatatattttgttaaaattaacgttgaaaactaaaaaatactgttaaatcaaaaaaaaaaattacataaccatatttcatatagaatattaggggtgttcacaaagtatccgatccaatcaaatccgcacgatccaatccaatccaatccgcaaaatgcggatatccg

SEQ ID NO: 163051 - DNA, 1096 bp, Cannabis sativa
attcccatcccggagtagtgaattacctaatataaaattaaagtatatatattaaaaatttaaatgtataaaattatcaaaataaataaaaattaaaatattatatactatttataatgcaatatattatgtattactttaaacacaacttataaatttgtaaaatgatagtaatatactaaaaaagtataaataattaaatataaactataaactacgaaatattattacaggattaaataaaatattaaacgggtcctcatcggggtagagaatgtcctatctccgtgcccgccctgtttaacattcaagaataaaaaaatcctcatccccattcccttccctatttatccttataggcgggtcccgcatgaaaaaatgtgtattcttaattattttaaactttatttttgataccataaattattcaaaatttaaggaaaactaaaaagatgcctataactagaaaacgatcatacgtacgaccctcttttggcacccaaagagtactgtcccatatatgtacctacaaatttgataatacgacgatgatgtgtaatttagaaaaatactaattaaaaatattattattggtacaataaaatattaaatattatatactttaattaaatcgttattatatataaaatatcggtaatcatttgtaaagtactatgcataatataatactaaaagtttatcgaaattttcgaaaaactctaatattattattcactgattattattttttttagcttaattgtattttattggtttctgaaaatcctagtaaatattaaacatcactgatatacgtagtaacaatactcatatatcataccggtatttttcatatatatttaattatatacacatatattgagccggccgtaagatttgataggccttaggaaaataaaaattattattattttggatcctgtattttgtaaaagttacctattggattctgtattttgtcaaatgaaaaaataaaccttgtatttttttataattatacaaataagatcctgaacttatttttttgtcaaaataaaacttaataataatcttatctagagatgttatgacaaaa

SEQ ID NO: 163052 - DNA, 883 bp, Cannabis sativa
tttgaaaccgccatagaagctgccagagcttacgaccgcgctgccttcaggatgagaggtagcaaagccatactgaattttcctctagaggccggcaggtcgccgatgccggagagcactgaggtgcacgcgccggccaattgtgctgttttgaaaaggaggagaggaagtgatgaggataaggaggttattagagaagcgaaggagttgaagaaggaagaaacgacgtcgtcgacattaacggagagtactacatcgtcaaatgatcatcaggaggtgaactcatcagggagtagtaacggtaacagtgcagttgtaccgttaacgccgtcaaattggacgtcggtatgggacagtcaagacgttaaggggatttttactgtgcctccgttatcacccttatctcctcacttttctattggatattctcaacttatggttatctgaatcaaataataataataataataataatatgttaatagctaggctagctattcacaatggctagaaaaagtcaatgggtagttagggttttatgtgtaaatatacgtatatgtatgtatgagtggtattaattataggttcaaattaagtagtatttttttagacagcttgcttaagtatgcaaaatggctgatgtactatgatgtaagcaccactatttatatggttgagaattcaatttgtttattattcctttattattgtaatcacactatagtatttcctaattctttttcctttttttttatttttttttcggcaaagtagagtattttcctaattcttaaatgagcattgctattgggcactagtggtgcctagcaccttctaaatgtgtcgacttgcaattggctagcgatactctataaaaattatt

SEQ ID NO: 163053 - DNA, 3131 bp, Cannabis sativa
ttaatctcaggaatgtcatgacatgttgggacgcctgcaaatttctcagtaggtaagataaattaagtgttcttgtactttgtttctggtattcacttgcatgaataagtctctgaacagtcacttaaatgcagcaatttctttgttaccttggggatggaaattgttcatttaatttgcaacgttgcttgctttgttttgtaatgtatgttcattagttaagaacaaatgacaagaattttcaacctgaaggtgttgagttccataacattctcaatgcagatgccattccctcgaacaaggccatgctcttgcaaatatatgtggccatgaaggccatgccatggtattgtgctcttccatccatttcagagtacatgattgaaaatggctggactaggtgtttctcgagaataaatgacatcggttggcttggatacttcatttatttagcagcttatcttgtaattgtggagtttggaatttattggatgcacagagaattgcacgacataaaacccctctacaaatatcttcatgctacccatcacatatacaacaagcagaatactctgtctccatttgctggtaagttatcaatctgttcttgatgaaattcatactacatgttgagttaaaaatatcccttatatggattaaacatctgtcttacattttagttttattttatttatatgagtttagcattacggtgtttcaattatttttgctagtaaccataatgtgtgttaacacctagaaggcgtcaaaatgtctttacaatgtaagttataagagtattgatttaacatagacagttaacacagaagagcgctttgtctgtatctatatatatgtatatatgtttctaagtgctcattctgtacaataattgctaatttcaatttgaacgccttcttcccctaaaacaaaatttttcatgcatacttacagacatactgtacgtatgtgaatgtgtgtgtgtgtgcgctatttcaaatgcaaaataagattgattgtttctgttaaacttctacactcgatgaagttgcatattggatgactcttctatgagcatgagaagaatatttctcagctgcaatgttggttcttccttctgccattataaggcatgtaggagatttatacttttattgattttctgtttggacattaaccagtgtcaaatacatgttatctttggtagcacacagcaaatttctctgcgttagatattgccaattttggttgtaggatgttaatattttattagttcttttcttattttacagcaaacattaaaagtacttttgcttgtccatatccgcacatgcatcaatatatttatatgtttctagtttctacggtcacttttgttctaatcaatcttgttatcttccataattccatttcgacccatatttgtaaaatcttgacataaatgaatacattcttatgtttctactgttacttctactctgcgcacttcactgacttctatttgaacccatttctacaatgtcttttccattaaacttttaggtttaattctcatttgtaaacagcatctgattgttattgggtactttttaccttaatccgatttcattccaaagcgcaattatgcatagtgggttgccttctttctaattatgacttgacaacaccatggattaatttttttttgatgaattccatgaatctggtcagcggttaaaaagttaatatactaactattgatttggaaataaagtttaattcacttctattctcaattattgtgccactcattatgtgtgtaaattcattgtgtaatgacctggtatgcatagtagaggcatattttgttcttatagtattttaaatatataaattttgtcaaacatctaaacattctcatgacaaatatttcaggtttggctttccacccattggatgggatactacaggctgtaccacatgtgatagcactttttatagtaccagtacagttgactacgcacttaggtttgttgtttattgaggctatatggacagcaaacattcacgactgcatccatgggaagttgtggcctattatgggtgctggcttccacaccattcaccacacaacgtatcgacataactacggccactataccgtgtggatggattggatgttcggaacgcttcgtgaccctctcgatgatggatccaagaaggaaatctgattcacttgccttgctcatccttcccattttcagccattttaaaaattttggttggactgtttttaatgcatgtagcatttgtgtaaattatgtttgtgaattgctaaaacaaaaaaaacaaaaacaaaaaaacaaaaacagagaagggatttttaggtggatatttttcagtttatatttgtgcagtagtttgacaataaaatttgagtttttagcggctaaactttctcaactatcgtttaacttacacttgacctttcaagctcaaattttggtagtaaaaccttccaaactattgaactgttagcaagttattatcttaagattttaacttgtgatttgctggtattatctcaagagcgaatacaattaaaagaggagtaagtcatttcctgttcatcaagggggccgaactttcataaatttgtgtgctatttttactatttattattcttctatacacgtgatcataatcaacaattaataaggctccactgttagttggttaaatttaaagttgacaataattgttgacctaaaatttggtcaattgacagcggagctttctttgttatcaataattaccacgtgtaaattataatagcaaataataaaagtaacacaataatttatagaggttcgactcccttatttagccggtaatgacctactcccctttttgttgtatttattctggagataatattacgcagattacagacttaaaccttgtaatttctagctatgactctcttgaatagtacattagtgagaactgagtattacatatttagaacaagtgagatttaatgaggaacataggctaaatgtctaatgaaaaaagtgaggaggcgtgagagagagaagctcaaggcatagagcttaaataacttagttctcgtttggtacgtcatataaggg

SEQ ID NO: 163054 - DNA, 4224 bp, Cannabis sativa
  modified_base (4170)..(4183): a, c, t, g, unknown or other
ccattcatgtgtaatacccattaatagcacacccgtctgatgacatatcaaaaaattatcaatcatgtaatgtcatatcattatattccaaattataatttttttacacgtattattattacaaaattttttacttattattaaataaaacacaatatttctattctctaatgtaatatcatttcacacacacaactctaaacttaacattccctctccaaaaaaaaaccataagcataacaaagccgcctctttcaaaaatgcaaactaggggcctctttcaatcaaaccagtgaaactctatagctcttctctaattctcaatgtcggtgacccttattccctttctacttatcgtgtttctctcaacctcataattaatatcgccattgttctcagcctcaccgccacatttttcttacactgtagatgcgccgatgtggatggatggtttgggtgctcaactactctcatcaatgataaactcccctttcaattaccgtaagtttgatatatatgatttggaatcatctattatttattccaattatgatttgagaagaacattgttggccactttcgttccaatcgttctattttggttattgaagataaatattgtagtgtgatttacagaaccggcaacatggaagacatggatacgatacttcttataccaccatgaccaaagttagtactctaattttggggttaaaaaaaataccaaaaaaaaaaatgacgacgatgcaagaggttacggaagggcaggggacaaacatgacgccattgcaagaggttacggaagttggtgatcctgggattgaagcaggggaaatggacgagatgagacagcacttcttcgattccatgacactagagcttgaggctgatgtggagctaagtgctgaagtaacgaaaaaagggatcttagctagaacctttggtagaagggatatagtaaggggtcgggttaaggaaatattgtccaaaatttggaagttggaaggaacttggcgaatgcagacaatgaagccgtggttgtgggacatctttttcgacaatgaaatggataagaaagaaattcttaagaaacgtccatggcttgtcaatggcgttttagttaacatcagggagtggcctgatgatgaaagttgggaaaaggtggacatgaacaaagtcaggtattgggtggaggctcatgggttacctacgccataccttacatgggaaaatacagatgtaatagcaaggaaggttggggtgtattgactttgatagagcccctcggacagtaattgctcgaagaggatacttaaagttcctagtagatagcctactcaatcaaagacttgttgctggtttttatctgaacatctcccatgattcacttgttgtcatttggctcactcgtatagcaaatgtgatcgtcctcaggagtttgcctaccctcctgtgggtagggcggtaccattatatgggacatggaataaagtgggagtgccgatacggaattgtttcgatcctgccattccaagattgaaagtggacgagacttttcgtcgtgctgaggattgtgctccggtagaagataaggacaagggtaaatcggtaataatggaggatgaaagtgatggcacaaagtcactgagacagtgtacaaacatgcagggagccgttggaatgataccctccccaaatagggtgatttctcaggggcaaagaaggcgtgcctggatgttcagaggaagttggctagttcgggaaagttgagtcaacaaagacaaaggctttcaccaaggttaagaagacatcctatgactagtattgacaatagaagaagagatgaggggataatagctagtttgatggctgacattgggcctacacgtgaccaaatggtggatatcccaccatgaggagatttgtaagtctagggttccacatcaacatcctgagcccacatatgtcacttggcccacagataaaaatcttgaggaagtcattgaccaagttatggacccggcccataatgagcttgggctcaatcaagttgtggtatctcatgattgtatggatttttctacttctgggactccctttactggtgcaaaaaaagagaaaagctagtgtgaccattgatcctgtgattgcacttggagatggagtcgaaacactgggggagaagacaccatcaaccccgctcaccacgttgcctcccttggagattaacacgtttgttctagggagcagtagccgtgaagagaccgctagcaagcaaagaagttataatcgaagatgaggggggaaaactcgggtggatgtcgtagaggagcaaaacaggacagtagagtctgtgagaaacgaaacagcgtggacaagaagaaaaataagaacaaaggtacgaattttaatgttggggaaggaattttgtttgacattactattcatgagactcaaaatctgaatgcgggtgaggaggcggcccattgcaagcccccaccgtcgccatgagaatcctttcttggaactgtcggggtattcgtagaaccccggcaacccaagctcttatgacttgggctaggtgaattaaactggagtgtatctttttaatggaaacaaagtgtagtgaagaggggatttttgaaattgccagatttttgggatatcaattttcttcaactcttcctgccaaaggcttagggggaggttttactctgttgtggaatggtaacattgatatggaagtggtagaagctaatggtggggtttttgaagtgctgattaaggagccaattactcggttgaaatggtgtatgtttgctgttaatggaaggccctatgacaatgaaaagaaatgtttttgggatatattggaggctagggtcaataggtgtgctttgccttggatggttattggtgatttaaatttgatagctcagccttgggagaaaagtggtggaaggaaagtttcggctcatgatatctcaattcttcagaatttccttcaaaatacgcagggggggttggtcttggctaccgtggatgcaagttcacttggcagaataatcgtttctcgggtggtctcactatagaaaggcttgatagagttatggtgtcgggaaactggatcacgaccttccctgtggccatggtatcgaatgcaccaattatcgtttcagaccatggttatatccttttggattctagtgcgggaaagcagaggggagtcaagccttttagattctttgaagcttgggctagagagcgatcctatcaagaaaccataaagtatgcatggtgtgagagaggcaggctgagtggcagaatttgtggaagattaagtgatactagacaagcgcttcagaaatggaaaaaaggggctttcaaggattgtgatattctgatcaaggaagcagaagataggctcggatggattcaagctcagcctgtgtctaactctcttttgcaagaggaatctatccttcaagctagaattacagagctgtggattcacaaagagtctatgtggagacaaaaatcaagggagatttggctgaaagtgggagataggaactccaaattttttcatgcttccacagttattcgaagacgaagaaatgagatcaatgcggtgaagaataaattgggaggatggaaaactaagacacacaaggtgggggttgtgttcaatgagcttttcagggagctatattgttcagaaagtacggttttaaatgaagatttctatgaactgttttctctgttagtaactgtggaggagaatacgatgcttaaagaaatcccatctcccgaagaagtgtggaatatggtagctgctatgcatcctttgaaggccccggggccggatggtatgccgtgttttttctatagaagatattgggagatagtggggaccgatgtgctgcacatggttccaaattttttctccactaagactttggagaagaaactaaattacacctttatctgcttaataccaaaggaggagaacgcgtgtacggtggataaatttaggccgattaccttatgcaactttgcctttaagattatttcgaagataatggccactagattgagggggtgattgacaagttaatatcaccttttcaattcgattttgttcctggaagtgttggaaattattttacnnnnnnnnnnnnnnactaacaagtatgttgaattaacaacctaatatgaattcta

SEQ ID NO: 163055 - DNA, 1611 bp, Cannabis sativa
ttcaacactctccaagctctcatcattgacagatttcaacttgcatgacatacacaggcataatgaaaaagcttggtaataagaaaaagcttggtacatgactttttcttattatacattactagattttgcctacaaagaagtgaagatcaatctgcaaaagtgaaaaaagaggatcaattaataattatttcataaagttacaacaaatcttcaattccattttgtaagaataattagatttatgatcatttttctggtacacataattatttcataccttatggttggcttctcacgtggtacagaagcaaagcacttgtttaaaattggtggtgccataagttcagcaggcttcaaaagatcatacaaattttattagtatttttgtaaaattacattgtgataaaacgactattattatactcgcaaaacaactatagattttcactttgcgatcattatggtctaccaaccaccaaaaaagaaaaacagattaaaaataacacaatagaaataaatacctttaagcctttcatctcgcatttcactttacttgtatgttccaattccaaatcatcttcaagctcttctaacacagcttgctgtggaggtggtggtggtggtggtggtgaagtattttcagttggcgaactgcttgatgatgatgatgatgatgatacttcactctcaccattctgatatctagtgtttgctaagctgtccatctttatggatgaagaactatcactaataatggaattagagcttgagtgcctagacttcacatttctcatgttgttttcaacaacattatcctcaagatgccttcttttaccacctttattactttcatctgtcttattaactggtgcttgttgtgcatgtccatacgcctttacttccaaagcgcaccttgtatccatacccggctttgagggtaagcgagccaggcgcttagtgccctgaaattgtgaaaaaagaaaattatcactacatacagtgttgtacagtaataattcagttagtatttaacgataaaaattaccttagaagtggtggtagtagggagcacaaaactaggtaagtttttccttttaacatggtgtacacgaatctccattccagacttccaacaagtatagttgttcagtactatccctttaaactctgcaatagttgccctaatatcaaaggttccatcttgatttggcaaaccaggtccttgttgttttcttttcaaacccataaagtagctacattgaaaaggtttggatttgtctgaaaaatcaccaggatgggggtgacattggagcatattcaaagtgtgcttctcaatctgaataatttacaaacatttgatcattagataagagcagaatatatatatatttatatataggatgtaccttcaatgttagctgacgtatacgagattcaacccaacctttccattgtctcaaatcatcaccattttcagcattgatgtctatttgtagataattattatatgctttgaagaaggaaaatctctcaaacagggtatcccattccaagtcttccttgttcgactccatagccttcaagtgcaattttaaaaaacactaaatt

SEQ ID NO: 163056 - DNA, 1083 bp, Cannabis sativa
  modified_base (1018)..(1039): a, c, t, g, unknown or other
tgcatttcgctgcttttgattgtttctacattactgttttgtgattgcatgattttagattgaaaacaatcaagagttctttcttacatgcctttacttttttttttatttaattttaatctcagctcgtcccggaatgttatacatgagggagaaagctaagtgggacgcatggaaggctgttgaaggtaacacttttatacagtaaattttaaaaacttgtagtgtttgccaatgatagtatttgggagtatgtctaaagaaaacataccatcattttcagcgaaatccaaggacgaagcaatgagtgactacatcactaaggtgaaacagttgctggaagaagcagctgcagcttctgcctgataacgtcttctcatgcctttgcagttccttgtgtttaaatttaagaattgtctcgagtaacttctggtgttcttgaaatgatattatgttaacttatatctaaattatgaatgaaatgatgctcttaatcttcttgagtgtcctttttattcttaatagttatacatggaaaatgttgttagaattgttcaaaatgtttagatctttttcttgggaaattgaatcaagggccggaagaaaattttcattcactctagaattttctttacataaacttggtaatttcacactcttaacaataattgattaaaactagagcttagtctgaatagaaaggatttaaggtcattacacagtttggaaatttaagatggaattggaattgggtgttattaaaggtaattacacagttttgcatgtttatttgactacgtaattagaggtcttagttgcactatttaaatgggtatttttatatattaaaagtatctttctaaaggcatttgttgatttcacgttttatttcttttttctgttaaagtgaaaaaaataaaataaaaccataaggcataatatctcaaaatttattttctatataaagtgtgcctagataaattcatgtgtgatcttttatttatatttaataaaatannnnnnnnnnnnnnnnnnnnnntaaaataaaaataaaacaaatttcattaatatttgaactgatat

SEQ ID NO: 163057 - DNA, 1544 bp, Cannabis sativa
aaaaaaaaaaaaaaggcaatataatttgcaaaacgacaatattgttaaataacgacaacgacaacaagaaatgcaatttctagaacaaacgacgacgtcaagttgtcaacacaaccacaatcgtacattcgtaaattcgtacattcctactctcaattgtcttcccaccaaagagaaaggattggatcctccattcccatacctgatatgctatgcccctctgttcctccttaattgagagtagtttgcatttgttttgggattgcagttatgcaagggcagtttggttcggatgtagctggagtatgaggactgatactactgctaccaactgggaggagtggctagattggttctcgaaatcagacaataggttggccaaccttgacttcaaccaatgcttgggaggagctgctattgtttttgacagcatatggaaggagcgcaataaaatcatccatgaagggaattcaactccgattgcagtcactattaactttataaactttaggctttgtgagttaattccaacccgtgattcttgcgatgcattgcaatctgcttggaatcctccgcctaaaggttggttggcgtgtaactctgatgttgctataggacactcccaatctgcaggagctgttgctttccgagatacttctggaacgattctgaacttgctcactttacggacgaaccattgtgatcctctgcctggcgaggttgctgccctgtgcgaaggtgctgtagctgctgtcaagctaggatacagaaacattattttccaatgtgattatttgaatgtggttactgcattgagaagcaatcctgcagagatacataagctacacttcaatatacaggacaaggtggaacactttctatctcttgttgaaaacttcaacctttgggaagtccaatggatcccaagaacttgcaatggtgtggcccactcggtggctcaatgggcaagtcgaaacaacaagtttggtgttcttgatttggccaattttgatgatttcctgcagtcgtttactgcagatggtcatggttccatataatttgtttgcctcgttttgtttgtttagtgtgttggcagcttttagtgttattagttgttgtgctagtgctagtgtatttttgtctatttctcttgactgttttccgcttctgcttcgggctgtagcaaggcgtctggtttgtcttagcctttggccatctttgttgcttgtttgttggttcttttgtaaccatttatcaaaaaaaaaaaagctaatttttatttctttaattgaaaaaatgaaaacaaattcaagaaatcaggcacgataaaaacttttgagaaattctataatgcacccccttgaaaaggatacaccgatacatctctctctgttttagtatccgaaataattttttagacaaatttttttctcatgatcatgtaaattatagttattcaagacatcctgcaaaattttaagaaattcggaaaagtataatacgtcgaaaattgcgttcaaacagtgtgttgcacacgtgactat

SEQ ID NO: 163058 - DNA, 950 bp, Cannabis sativa
aaaataaaataaaaaatcaatctttgatttgaatctcatcaaaacattattacaatttcttgtctttttcattaaaattcaggatctgggtattctccatttgatgaaactacaagtgggttctgttcccttgatcgaaattctttttgtaattgaatgaatcgtacttacaagtttgaggcaaacccactcgttctgatcccaaaagctttcttatctcagacctaactttataaaagacatgtcttaagcttcctctgttatgagacccaagtagcttagtctcttcctcgttcatttccagatcgctagcgaaagtgggctttcttgataaggcccaggcccaggcccaatcccaccatttcttaatagagctacctgcatattcacccatggaggagactgacttcgttctgcgcatagcccatgaagcagcttcagatgatgaaattgagggcttaatgttgagtgaaagagatgatagtcttcgtcggatctgaccttgctcttttgggtctgtagattgtgagaccggaaggaaattactacttcgcttttgaaacgtttcgactatagaactcatggtagagaaaatgctctcttttattttcttgggaaaaagagaaagagaaaatatgaagaagaaaggtttgaggtttgtgagttttaagagaagagaaggaaatgaaagtgtttggtttggtttggtttggggttcactcacagctctataacaggctggttttattcgttttttgtagtagttttttcttggggtgtggtgggctcctccatctttaacccccaacaaaatatatttatatttaggctaattagtgttttttccccgaactttgatatgtattaaatcatgtccttaaaattttttggctgttaaaaattccccataaattattgagattgttagatttaaggacttttatctgatt

SEQ ID NO: 163059 - DNA, 2172 bp, Cannabis sativa
  modified_base (2121)..(2127): a, c, t, g, unknown or other
cgacaacatatatgcttatctcatcaactatttgagaaaatcgacaagaaagatcttgtttgtcccacgcttgctagaggctattttcaagtctttaatttcgatcatttttaaacatatttaaaccaagagaaaagatttctagagcctcaatcttttcataaatgaaaagacaagaatcaaactctttcaaaggaaaaaaaaaaacttcagctcaaatcatttttgtttgtcataaaagtagcaaaagataagaacctaacctctctttgtgccccttaaaatagcgtagacatcggttatcatacattgagagataccggagggattctgcaaaatcaaacagttaccatagttctcacatgtaggcactagactcatcaaaactattaacaatgaacaagaatcaaacctccattagaattcaaattatatctcgaggaggaacatataacagaacttgggtgatgggtaaagcatattcgatcagccccatgtttcttatgatatgtggtcttaagcaaccttcaattgttaacaatcatgcaagttagcattcacactttaagcaagatctttataagaattcaaaatttgatacacacaaaaatttccaaaatatgatagttatatatcatgaaataattaacaaaatagctcttttttcaaaattattttgtactttggcctaattttgataattctttaacaaatgacatcaagttaaatattcaacaagaaaatggctttagtctgaaaatttaactagttgtctaaacaatttgaccaaagtaagggctgcacataaatggccaaacccgccacccaaccctactcaatctggaaaaataggtcgagcaaccagacccgaacaagccatggcccaaatggcttataacctaaaaaacttctcgatgaattcaaacttttagtttgtttaaattattattaatgttggtattgtagatgattttaattttttttaagacttatgtttggattaataagatttagtgttgttaaacattaattacaaatacttgaatttctttaattgtatgtttaaatttgatcatgttttcaaatttgataggaattttatatcgaattttaaattttaatttgatatgttttcttgaccgagtgaataactttgaaaatcaaatttgatacaggaagtttaaatgttgtaactgaagccagccaaaccatgctaagagttgggttatatataaccatttaaaagagttacaaatttatatataagtactgtttgattggggttttgcttcagcttttcagtaagagttctttataagaaagctactaaatccgatttcttggttactcaagcaacccagctacagaagtgctggactggctcatgtgcagcctatgagagacactaatttttcttataaattttataaaaaattatcgaaagtagaccgaagtcaattttgctaagggatgcatataacattatagcaaagcaagcagcactcacttggcatttaaaatatcatataatcgcactgaatcatcctcactagtagtgactagtatatcatcttttcgatgaaaatcgatacagttaacctttccaccctgaaatttaattaaaatcaatcttaaaactcaaaaagagggtgtgaatgtgaattatatagcatagatcataagaatacgaacagctaaaaaattttggtcgatttaggtgaatttgcttttaaaaatgaaaaaacctaaaccctaaatccatgcaaacctgacaaccgaaaaagaaaaaattaaagaaagatttcgagaggtagagcttacaaaatctgggaaaacggctccaatggccatgcttcggacaatgtcatcgtgaagctcggtaagggacgtcgtcatgtatgtatgaatggattatggaagattatttaaaagattgttcgccctaaaggaaggtatcctaacaagaacaacaattttattttgatttagatttttagtgtgaatactgtgagttgagttggtcactgtcctcgatggctccggctccttcagattccacccgtactaaaacaaagctcccctttcaaattcaataggttttttatttttattttttttatnnnnnnnttttattttattttattttttggctttggatggaatgctctttaa

SEQ ID NO: 163060 - DNA, 2440 bp, Cannabis sativa
tttaagatttttatggaatttttgttaaagtgaaaaggaacttctagtcttatcactagaaggcaaaaaggtagcaactttagagcttttagcattaacagtggtcatttttttttttctcaggagatgtttcatttgatatagctgttggtgcttatgttctttgattttataagagctagagctagtaagaacttttatctgcctgtggataacatctgcctatccattaccaaatttggtaaagtctattacttgggattttcaggtaccatgagagatatcaaagtaaaaggcacttctaatctgtgtactacttctactactgtatctgatggagaatcccatgtagcgcaatctgagttaatcatggacaaagagacatcatcccttggtgtgaaacaaactcctgaaattgaaaaaaagtttgtgcatcgtgtttatgatgccatagcacctcatttcagctcaacacggtatgccaagtggccaaaagttgctgcctttttgtcatccttggcctctggatctcttgtcttggatgctggatgtggtaatgggaagtacttgggattgaatcctgattgtttctttataggatgtgatataagctatcccctcattaagatctgtgcagatagagggagtgaagttttggtagcggatgctgtaaatcttccatacaggactggttttggtgatgctgcaatctccatagctgtgttacatcatctaagcacagagagtaggagaaagaaagcaattgaagaacttgtccgagttgtgaaaaagggtggtctagttctgataacggtttgggctgcagagcaagaggatagatcattgcttgctaaatggactccacttaaccaaaagtatgtggcagagtggataggtcctggcagtcctcgagatcgcaatagtccttcacccttcaaattgaaaagtattcctgaaaccgaggagaggaatttaggaaaagtaaaagattccaaggaaataacttctcgaagtgaagatgatagtgtagcttctgatgatgcgaacaatatcaataatcaagaatattttatcccttggcacttgccttatcatcgggccgaagttggaggcgcttctgcttgtgctgtcgaaaatggctttgcaaagaaagatgataaaaagggtgctgtagtatacaaccgatattaccatgtcttcagcgaaggcgagcttgaaaggtatgcatacaagtggtttaaggtgtttccatgtgattgtagtttctgttatcaataactaaaggtaagtttgtgcatagaaatatatctctagcaactgaatctttcgtagaggtacttttatactttctattagtcatgtgatgtagcttctaagttagcacatacacatatgctctgtttgccttaccctgattaatttcgtatctatgtacaatctaatgtggtagttatttcaatattcttgcagattagtagttggcatggagaatgctgttgttgttgaccgatttttcgataaatcgaactggtgcatcgttcttcaaaagacatcatgaagaatcaaataattaaggagataagcaaaatacatgctggaatagcaacttataggcaatgacatacaattgctgagaaagagagcaaagttttgttacatttcccaatgtatcttggattggctttaaggattttgtttcattgttacatgtaaaattctgattccaaccgcatttttcaagggttggactataaattttaatgagtagttcattgtttttataatctcaaagtaggttctatgaaagtatttcttctattaatttggatagccacacatcaaacttgtggtttgtgcttactttatttaagtatgtaccacaatatgagctaattatgtataaaccaacattagtattggataacattgtctgatcaaatataaaaatattgagtataagaatatgaattaattgacttattaccaattagttttactaattgattattgattttgagatggaattttataattctcaatactcttagttagccgcaagcaagcaaatggcactcttagcgcgaataagaataagcaagcataaggtgctgagcaaaaatagatattgagtcatatataagaacataagttactttactcatcaccaaattccatgagcctccgttggacccttacactcacgaaataatggttcttatacacaagtacgtcactctggctgcttcatggactgatgactgaccttacaaaccaacacgagtatttctagcgtgctttgtcctcactcgcacacatcctgagaaaatttcccaagaggtcacccatcttgaaattacctaaggtcaagcacacttaaacgtggagttctttcgtgatgggctaccgaaaaataagatacaccttgttgatataggtagta

SEQ ID NO: 163061 - DNA, 2097 bp, Cannabis sativa
aaaaaaaaatctgaatacataaacactctgtatgagcatgaaaagtatgaaacacaaacaattgtaaatacataaataactcaaattctagaagaaaaaataaataaatttgcagaggaattttttttttttcttattaagattcagaaaaaggaaaaaagaagagagcttctaataattaatatatatatttagaatattttctttacttttttaatgctataaaaaatttatgggaaaaatccaaaattcaaaactgaatagatcagcttttatattaatgtggaaatgaaacaaagctataaagtagtttctattcctagtcaacaatacttttttctggaaaaaataaataatgataaatgaaaaaaattaagattgagacatttagtaaaagcttaaaagctattttttcttttataaaaaagaatagaaactcacttgagttatgtgatgaaacacagtttgaagcaccaccaacaatattggattgcttccattgaaaattattgtctttgagattgagtagcttcttctcaggaaaacagagaaccccatttctagaaaagtttagagaaattagtagaaacaaaagcaaagaaaagaaccccatttccattgttgattgggaaaaaaatggtatagttagaaagataggaagaagaaatggtatttatggaagaataagaaaaggagagaattaatgaagatgagtctgtgagagagagagagaggagttgagttgagtgagtttggagattcctgggaattggaatttggcatgagaacaaaagatgaaggcctggccttttaggaccccacctaatgcatgagaaattattggggtttcacgtgcatatattatatatagtcttatgaaactaattaaagatacaatacaatacaagtggttttgtttcttgtttttgttaagctacattgtacttacaataattacactcaaatatcatgcatagtgatatgatattgtttttaaaaaataggttagttttgatttttatcattagaactttgttatatattaaattttgtttttcgaactttttagatcgttacaattttttttttatgaactattcaaattgttagatattttgtttaattttactaacgtgcctatcaaattttaatataaatcaaatcgtagctttttttatgtatcatattgtgtctctagaattttaacatatatcaaattgtaattcttaaacttttatccacatgagatgttggttagtaaaattgaacaagaatccttaaattcaacaatgttcataatttggaataatttttaacgatctaaaaatttcgataagatatatattaaaatttggaagataaaaatcataattagctataaatatattatatttgatattattattattattttgagtgagtgagtggactgaaacaattttctaaaaataaaataaaaactataatttgattggttcatttattcataattttcatgttattctctcattgtctttgaaggtgtgagaaagatgtatcctcttttaaaatgagtggctcaatataatttgtaatagtatttgcccattatgttactattcatgtagattaagattagaaactctagttgatcattgttaattatttaatgaattatgattaattaacatgaggacccataagtaagtacatggttaattataatcaaaaagagtttggaaaagtattgcctataagaaataaaaaaaaaaaaacatgtcttagttatttttttaataatatgtctcatagttcttaatttttaatgtattgtgttatgatttatgatatataaaaatatttatatatatatattacaaaagactgatttatgtttttttctaaatataaaagtgtgtataattttgttgtgtttttctagcattactcaaattcataatacatcaaatcgagcttttatacatttttaaaaaaagaagatcaaagctcttttatgtaatagattgttttttaaacaaaaaaatatacttacaaattggaagatattgaaatgaaattagcatcaagtgaccaagggccggatgtctacgaaggaga

SEQ ID NO: 163062 - DNA, 2395 bp, Cannabis sativa
aaggcatcataaactatgagaaacaaccatcccaagaccattgcaactacaaagagtgatattatccacatttcattcaaaagcaaaactaccacatccattcgcacataatagtaacactaaaaggtatcccccacgaaaagcacgattttagaaggatacaattaaactaacatcagtcgatgtaattaacctaacatacatctagtagacaattcaacttcacatccataaagtatccccaacgaaaagcgcaattttagaaggatccgatcgaactaacatcatttgatgcagttaacctaacatacatctagtagacaattcaacttcacatccataacattgcatcagcatcaatatgtgacatccaagtcaatcaaagatgtcccaggttcactgacataataaaccaaaggaattctgccaaattacatttcaactactcaaaaatagatttactatgtaattggttgagtcaggttttgtacaacagttgcactgctaaacttcttaaaaatgtaagcacactcccattacaaaaaacaaatttgggaggcgccccaattcctgcagtcacttctacaaggactgaatctaattctcttcagaaatccaatgtctacacagaaactagtttttcctaggtctaaatgtcttgccttcttcatgtttgagagaatgggcatgaaaaaaggttgcaagcaaaatcaacaagcctgaaacttgttgcaaaaagaaactgagacgaaagatgagctttcagatgctcccatcagcctctcagaggacctgaaataagatagtattgtcaccaatacatcaaaaaaattaagaatctgcataccttgttgttgtcctgtttttttatctttaatcaaagcaacctctaccacatttccgtgttcttcaaacaaagggcgaatctgacagaaataagcacacattgtaagaaggtgaaaaaacccacatcagtgatatcaccaaacaaactcttcaacaatatataacaaaaaaaaatatatatttcaagctagtcttgctttgaacaagcataacttattcaaacaaaataaaatcattcaaatctggataacctttacttacatcttcctcggtggcggtcctcggaactgacccaacaaagagtttagcataattgcctttatcagatccttctgagaaaataaatagcagcattaatcataactataatgtttaggatcattacatgaaaatatttcaaaaatattcaaacttgttgaactagacattaaacattaccaggagaaccttcacggacagaaaaaggaaaccctcttttctgtccagaaagaggcggcggaccctggtaactcgaagaaaaccctccaccaccacccccaaatcctccatcccctcccaccgggcggaaccctccaccggcgccaggaaaagaacggtgcggagggctatcaaaattacggtgtgtgggaccccgaaaattgttggggctacggcgaggattatggttatgattataatgattcataggaccgtctgagaagcgagaaggagctcttgagttacgaacaccaccatagtaagagtgagattcttggtcatcgatgtcgttatctccataacggtctcccctgtgcctctccagctttacaaatagttacaaaaaaccctaaattcaacgtttcaattcctctccaccacaaaagacaaagaacactccaacagtgtgtctctaaatttttccagaaactcagaagcttaattgtttggtttcataactacgctaaaaacgaaaaataaaaattctcagaattacaaaaaaaacaagaccataatgagcttaatccaaagctatcacattcacaaaccaaaaacaataataatccatagagaattaacttaaaaagtaatgaattcgaattgaactaaccttgttaatcaacttatcgaactcaaatcccaactaagctcattgcaattcaaaaccaaaaaaaaaaaaaatcaatgattggtttgcaaatagaacaattggaaatctaccgagtaacaacatcaacataatgtagaatttctgtattacatactggtttttagggcacagaagaagaagaataccttgattatgaatttctggagaggagaatcgcttgcagaagaagatgaattccaaggttcgacctttgtgattaggttttttctatttttatttattaatttataaataaattgaaattatttacttatattattgaaaagaaatatctttaaaaatgtatgggctggacaaatctattcatcgagtttgggcccaagaaacaaaggattatttcaaaaatatataaaaataacaaaaaaaaaaatacgaaatatacggttgtacggaattttaaat

SEQ ID NO: 163063 - DNA, 4299 bp, Cannabis sativa
tatagctttgaaaaggtgagtcatttatagctggcaactgtcggtgcttggcgtgtctttaacacttatttttcgttttccctttttgccctcactccctttcacaccttgctcttccatttataccatatggttagagaatagatgccatttataaacatagctctactactctactttccaattcttaatcttcttcaatccaactaatcttgggtcttcattccattttcatacttgggtatgatttagttttttgtttatatatatgtcattttcatacagttaattgattgtcatgaatttctatacatactttcttctgttgttatgatttggtggatagatattgcagtgtgtaataaattcatattttgaattgttgcagtgtgttgactctgtggaacttttgatttatactctttcaattggattagttagaatcagttcaaacaagtggttgtttgaacttgaaggagtgttagtgttggatctcattttggattgtgtgactaagaagttctttgatctctgaatgttctagtcaaagtagaagaaaaatgtctaggggaagagctgatgggagccaaaataaaaggctaattggctcaatcttagttttggtgttaatttgtggtctgttgtatgtgtattctgggaggagtggttcatctgcattggaatatggtggtaagtcattaagaaaatttagctcttatttgggttctgaagaagatgttgaggagtcttccccgattctcggtgaagatggagatgtcggttttgtaccaaagagctttcctgtgagttctcattccatacacttttaacaaatgttgttgctttgttctttgactcacattaatgtttgtgttgtgttgaaggtttgtgatgatcgccattcagagttgattccttgcttagatagaaaccttatttaccaatcgaggttgaagctggatctttctttgatggaacattatgaaagacattgtccacttcccgaaaggcgattcaattgtttaatccctccaccaccgggatataaggtgagcgttttttagtttgtaacaatcgcgaaaatgagtgaacttgctgttgttgttgtggtgttgttgaatactgattgagctagtgttggaattggaaataggttcctgttaagtggcctaaaagccgagatgaggtatggaaagcgaatattccacatactcatcttgcaaccgagaagtctgatcagaactggatggttgtgaaaggcgagaagattgttttccccggtggaggaactcacttccactatggagctgacaagtacattgcatcaattgctaatgtaagtagaatggttttttaaataggggttggtaggatccaaactaatttgatcacaccgaactaatccaatccaaaataaaactctaattcttgtattgaaatccaatttaaaaaaccgatacaatccaatcactaatttggttggatttttttttatgcttgtttagattgtattggatcggattagaagaaaaatattggattagatcggatgtttacccttatttttaatacagatggcaaaaagagaactttctaatgtagatgattcagttttttttttcttttttctttttgtcatgactgttttatgacttgttggccttgcagatgcttaactttcccaataataacattaacaatggaggaaagattcgaacggtccttgatgttggttgtggagtagctagttttggagcataccttctttcttcggatgttattgccatgtccttagcacccaatgatgttcaccaaaaccagattcagtttgccttagagagaggtattccagcatatctcggtgtcttagggacaaagagactcccttacccgagtagatctttcgagtttgcacattgttctcgttgtaggattgattggcttcaaagggatggcatccttctccttgaactagatagggtactaaagccgggaggttattttgtctactcatctcccgaagcctatgcacaggacgaagaagatctaagaatatggaaagagatgagcaccctcgtggagcgcatgtgttggaaaatagcttcgaaaaaaaaccaaactgttatttgggaaaagcctttgactaatgattgttacaaggaaagaaagcccggtactcttccaccactatgcaagtcaaccgacgatcctgatgctgtctggggtgtgaatatggaggcttgcatcaccccatactccgaacgtaagcaaccttctgtccactttgttttcttgttaatttgaatgagtagcattagataaagttagaacactataaccgaaaaatcttcctaatttacagaaatcgatagagcaggaggaagtggtttggctccatggcccgccagactgaccactccacctccccgcctagctgattttggctactcgagccatatgtttgaaaaggactcggtaattactcatcttaacaacttgtctggcattataatacttccatgttttactaaaacttagctaatgacaatctaatgtggtacacaggaagtttggcaacaaagagttgaggattactggaatctattgaagccaaaaattgagtccaataccttaaggaacatcatggatatgaaggcacacatcggttctttcgctgcagctttgaaagacaaagatgtgtgggtcatgaatgttgttcccgaggaaggaccgaacaaactcaaaattatatacgaccgaggtcttataggcaccgttcacagctggtatgttcgaaaaaacttctgtttagagcaatacttttcgagtttttacactagagatttgtcaaatgatgatgaagtaaaagtagagatttttaaaaccgataagctataatatacatgcccttttgatccctaaaagcgaatttggctcgggagaagaagaaagcattatttgattttttttcttctttgtgtttgttgtaaatatggcaggtgtgaagccttctcaacctacccaagaacatatgatttgcttcatgcttggactgtcttttccgacatggaaaggaagaaatgcagtgctgtggatctgatgatcgaaatggacaggattctaaggccgaaaggcttcatcatcattcgtgataaaccgaggattgtggagtttgtcaagacctacttgaaaacactacattgggaaatagtagctacagctgaagcatcacaagactcggaacaacaaggcgaagatgaaacggtagttgtcattcaaaagaagatgtggcgcacgagcgagagcgtgagggactccgaatagagagaagcaaagcaaagtgttcccttttaagggatcccttaaaatgatttgtttaggtggttattttatatgatatgattttgtagcattttggctctcttttagttaatttttttggctttatttatttgagtctctcaacaaagagctcacccaaatagcttattcaaatttcaatgtgttcattattgatttggtaactgtaagaaaatcactttatacctcatattggcataaagtagaacatgttccaaataaggatatttttggcaatatgatttatatttcaaagggatattctcttgttctaaacttggttcatagttaaattgacatacaagtctatctattttgtcaaatgttgtttcacaattttctttacggtttatgttttggttaaaacactattccaacaatgacggtagagacttgtttgggaggaatccttggacaaatttattcattaattagaatctgctagtttaatctacatagtttgtgaaaattggttaaaataaacctctaaactcgttaaatagatgctattatagaatattgtattgatgctctcgagtatcatcccaaactcactaaaacaaccttggatatcatttttgtcgacctcgggaggttttcgacaaaaatgcagcgggtgggtgagtcgagctccagcaagatttgtaataaaagtaaaacattgtttaaaatttattacaacaaaaaaaacaaacaataaaaaatagagaaattaagaaagaaatatataatggaagatagggtaaataaaacatgttttacttttaggttccatctcaaaaccaattagtaatgagtagagagttcttatataatttatatggttcaatactctttcatttattcctttcatttattccatgtgggacaatgtccaaaataagagaacaataataattattagacaataaatgtttttatatgtgtgtatatatatat

SEQ ID NO: 163064 - DNA, 1386 bp, Cannabis sativa
ttttcctttcccatgaggtctccaaatcaaggccacgactatcttaccaaggcaggtgattctactactaccttgaaaaggcaccaagagcgagagcaagtgattcttcaaaaaggggctactcggctgtcctccatcaagaaaatagagattgtagaaggggtttgtcaaacttcgtcacctagcctagtattggacattgccacgctgagtcagaccctggtatactaagttggcagagctgtagctccgtatattgtagagattttggacaccctgggccttaacatgagtgagctcacgtctgaaaaatgaattttaagcaaaaatcttaacccgtacactgtattggtggccaccaaacaacaagcggcatgggtaagtcttagccttccaaaaaaaaaaaagtcttttcttggtaaagctttacaattattgaaggttgtatgactgtctattttagccagattgctttgtttgcagagaggactgctaaagagttgggcaatatgaccatcaaattgagccaacgtcatgccaaaagtcaatccttgacaactaaaaatgggaccttatgcgctgaaacaaacgagttaaatcccaggctgccctcaatgtccaaaaagccctggaaaaatgtgatgccaagctggcggttaaggagaaagagatagactcaaagtactagaaactgtgcaagtcccacaaggcccaagctgagaaagagattgaggaaactatgcgctcccttcaggaggacttaagcgaggtgaatatactaaagaaaagagactgaaagagtcttggatgacaagcacgacaatctgaacctgcttcttcaagcgacctgtaataataataacattcgttaggagaccattaacagatttcaaggggaagccaaccgaagcctagtgaatggtgtgaaggcatatattgccttggctgccatgcaaaggatgagagagacttccccccggaccattcaggacattctccttaaagaggctaaggcagagggataccgccttcattccctagagatggattatggcaccagcatctgtaggtcccactcatcccatgattacaagggccaaagcaggcatatttaaacccaaagtctacatgggtcacaacagattcagacatgaccaactcatccttgcttcagttgtttatgcaattcagcatgaggggtggaactcgaccatgtctgatgagttttatgctcttaaaagacagaaaacatggacactttttcctaagtcccactactacaaattaggctgttagtgacactatatagtgacacgcataaaagtgtgggtcactaaaaaattaagagtaagttttagtgacacacactattagactctaaatatt

SEQ ID NO: 163065 - DNA, 861 bp, Cannabis sativa
cacgtacgactcttatttcattaaaatcagagagtagcactatgaacaagctcgtcaagtctggctctcctctagatgtgatgaagaagggcttcagcgagattgttggggtaagtgtcttccacggtctacatattctgccttgattttttagctagttgactaactcttcatcttgttgtatgcaggcttgtgttagctttccttatgtcatggatagggaacataagactgttgctaaacttcgggagtaggtaaagactttcgatgagaaagttgaggctgctgtcaagagagccaccattgatgagggcaaggtcactattctggaagcattctccacagaataggaacacaagcttactaattctcaaaaacttgttgaaaggcttcaggttcctaaggaaagcctcaagaatgacattgcgctttccaagaagaaaatgcacaacactcaagctgtaaataagcatgcaatgagtctgaagaatacctccattgctaaactggaggatagagttcagagattagaagccaagcttgtggccaaagatgcacaagtagttcaagacatagccagttatcaagggatgatttttgctagttcagaaatttactcattttttatttacttaactgcgtggtttgtgacttttcataaagtcgtgtttaagaaaagtaacatttgttgatacaaatacattgctgtcttgacagctataaaagtatgcacctcgaatttcttttgaatatcccacaaacatacacgcttcagttctgggagcaagtttcccagtcttgggtttaagaacatgagcaggacaaccctaaatatgaaaatgtttcaaactgggttttatc

SEQ ID NO: 163066 - DNA, 2826 bp, Cannabis sativa
gtttgtaatcatgtaaatacaaagtgggtacagattttttcctttaaaaagttaatataataaataaataaataactaaatgaaaaatgtcactcagaaaagttaataacaaatagttaaataaagttgtttctaaatcacaaacaaacatgtcgttgtagtatagtggtaagtattcccgcctgtcacgcgggtgacccgggttcgatccccggcaacggcgattttgcttcttttccaattttgtatttgtgattaaaaagttaaagaaccaaataggtctacatttattatagtttttttattcatcatttttatattaactaacacctacctacaaccctgttttccttcttccataaattagataagtaaatttattaaaacataaatgtgtctgtatagtgtgcaagtgtctagttagaactatttgaatcatgttggggtgtgttttaacattcaaaccagtaaagtttcataccaacttgaagaatgcccacaattttaatgagtattaatttatgcaaatcttgggattttatgattcttgttttcatcaaatctaatttcaaatagtaaaacaaagtgaagaaagtaccaaaacaataacagctccgcagcttatttgatttcttgtatacttaataattgagaaacaaattcaataagagaaataataataaaaataatcataattagtagtacgagttactagttactgattaccataggttctagctctagtaactctttcgcccaatgactttctttcacaacaaaccccatttcataggataaaaaatgcactaatcctactcaaggttataagtgcattaaatataaaagaattaacagagtctagaagtacaatattagaccaaacaagagtacctaacaatttgtaccaagaatttacaaagaggaccaaacaaaaccaaacatgtttgttgggaaaaaaaaaaaaaaaacagagcattttttgtacctaataaacacttgcagaagaaaggaccaaagaaaccaaatgtgttggaggaaaacaaacaattatgaaaaatacaacaatactcaaaagggttaaaacagacagagaaaatatttttatttcattgagaatgctcaaaacaagatcaactcatcataaagtataagaattttttttgcaagatttgacttaagctgtagtatagtgaactaactccaccaaaacaatttgaacatatacataccaaagtagagcagcagcactaattattattgtactaataaaatattaaatgatatcaattttgcctataagcaatataattagccaaagcaattaaaggagcagcctttatgggatcaaaaccagaaagatgctgtttggcttctgtgttcaattgctcagcaaattctcttgatttgtcaatacccattagccttggataagtaaccttatcagccaccaaatctttcccagcagttttacccaattcttgagaagatttagtcacatcaagaatgtcatcaacaacctgaaaaagcaagccaatacacctagcaaagctcctaagtttttcaacttcttcatctgtaccaccaccaagaatagcccccaaaacaacagaagcttctagaagagccccagtcttatggagatgaatgaactcaagttgttcaagcccaacattagccaaaccctctgaatcaatatcaaccacttgaccagccactaatccttctgacccaattgacttagcaagctcaccaatcgccctgacaatcttggctgccggaacaccaacggtagagaccgccatgtgctcaaaagcaaaggctaaaagtgcatcgccggctaaaacggccacgtcttctccgaagactttgtggtttgtgggctttccacggcggaggtcatcgttgtccatacaagggaggtcgtcgtggattagagacatggtgtggatcatttcgacggcgcaggcagccggcatggctacggattcttttccgcctacgagttcacaggctgagagacagagcatgggtctgactcgttttcctccggcgaggagtgagtaacgcatggactcgtgtatcataatgggatctctgagcaaaacggctgagtctaaagcttggttgactgagttggctttttggaccatgtaagacttgaaattgaagatggatttttcttcatcgccttctttaacggcttcttgctcggttagaacagctgagattgatgaaaatggtgaagtgggtcgtttttgttttggggtttggattgaaaagggtgtttttttcaaagggtggtagagattgagattgaaagttgataaggatctggatctacctccttggttgaacatggaacaggtttgaacccatgtgagatttacagtgctcatcttcttagtcttgacaaagattgaagctttttgattttgtgaaaatgaacaaagcaaagacactctgtgctaacagatttaaaagcttgtaaaggttgaatttttaaataagaatctattgcattctcattctgtgaatctgcacaattgagaaaaattttcagaatgggaaagagggagggagtgtggatacaaggaaggtacaaaatggggtctttaaaagtaatgagagcaatataggaagaccaaccaaacaagaaaaaacataggacaaggataggatattaggattggatggcgttatatatctagaatctctttgttttaaaaaattaaaaaaaaaaaaaaaaaaacatttatcacaaataatttttctgtgtatcactccatccttaactggaaaaaataaataaatacataaataaaaaaa

SEQ ID NO: 163067 - DNA, 4039 bp, Cannabis sativa
agcgtggcggcacgccaccgccgagagaggataagcgagaggatccgaatcctccagcgcctcgtccccggcggcaccaagatggacaccgccaccatgctcgacgaggccattcgctacgtcaagttcttaaagaggcaaatccgtcttctccaagcaagtgatgaccatgaccttcaacgacaggaactggtgcaaactaattccagtacttctactcataataacaatactaatgatagtactactacaccaactcagccatgtttaagctcccctaataatattaattggggcactactaccattaatactactgctgttcaagccccatatggctcccttattaccacagctccaccaataagctacggtgtcttcggccgcgttggcagcagcttaattaatggagaaaccttattttataacactactacggggtttaatcattctgatgatcatgatcaggtaattagtgataagtaattaacattcattaattaatgacaagtaattaattagtacttatattattacaaaatagtcatgtgaccattattattatattattattattattattaaatttgaagtcgatatgtttattattatctttattaatcacgattttaattattattattattattactttagtgtgcgtacgaaaatagaattggtgtatttttgtgtaatttttttggagagatgtaggaggatatgatcttggaaaaagtagaggtgaaaaaaggtagcagctagctgttaggatattgttgactaaagcggctggagaataatcataacggttgggttggattacgtagtagtacttatatataaatatataaagaagatatagtaaataaaaactatatattataatctgcccggaaagtttgtttggccgtctcctcttcttggttaataaaacagtgacgtctttgagatttaaagttatattcaatatatcttatgattacattatacataaaaaatatatatttatattcatgtatttatgtattatatatacccgctttttcctttttctctttctctctctctagctatgtgtattcacatcatatctatatatagcataagtgcatgtgtgcgcatgtgtatgttgacttatgctgcgtcctaatgatgagtttggattacagggtaatttcagaatgttacggttttataatatccagaagtactctgatatatagcatttaagcataccctaatgacaataaaaactataacagtcatacaagtatattaatttaatggagtcagactgcttacatttaatccagttattgaagagtagccatagtaatatatctctcccttaggagcttatgttgatcaccttaatcggacattgtctctcaattccccaatgttttgctggagcatatattcagaagtgctaacgttgcagcacatatataacctggcgaaaatatgctatatattgggctagatggtgttgtaacctggttagctgatgatcctttccttatgactttgtaatcaatcttcattaatggaaggcatcgttactctcaaaacatataatttatatatgtacatagttatatatatatatataggattaatgctcaccatcatttaagtgaactatttcactatagttaaaatggagaacaatattcatgtatagatcgcaatttatgaggatcgtacaatataaatatggattaatttgagggctaggaatattaagttcaaattggattagagtaataaatttaacaaactaataattaactaaatgtcatattacacccccacaaatattcactcatggaatgatatgacagagacaaaattaagaaaatcttagaagtgagctagtgtaattattagcatgcttggttgtatttgtctacgtcccttgtgttcaaaaagtgactatgagatagtcctccatggtgtggtgatttattatgccttcaagacatgcggcaaccttattttttttctcttgaaagatgacatgccgcaacttaaaattaggattaattcttattaggattgttaatccttctattcataattgcaagaaaattagatgcaacaatggaggaaagcaaagagaagaaggagaagagaaagagaaagaaatttattgttctattattatgtttgttacaatgtaaagagtacaagaatcaggacaaaacagagagaaatagaataacagtaagagagtcacacacgaactaactcacaacaaccttttatccactttaactaactctgaacaaggagcccctaataccttcccacaaactcataattgaaaggacttgcaattgtgagcttggatcgaaacagaggaaaactatggcttgagacaggtttggtgagaccatctacaagctgatcagtggcaggaacatgcttgacttgcacctgttgacaaagaaacttttcacgaacagaataaagatcaagctcaatatgttttgtttgagcgtgtaagaaaagattagcagcgagaagcagagtgctaaggttgtcacaccaaacaataggaggcttagactgaggaatttgaagttcagtaaataaagagtgaagccaggtgacttcagataccacattagctaagcttcgatattctgcttctgtactcgatcaactaatggtttgttgctttttacattgccaagtgattaagtttccacctaagaagatggcaaagcctgaggtagagcgcttgtcatcgggattaaaagcccaatcagcatcacaaaaagcaacaagctcagttgagggtgatttgtgaatgtttaagccatagtctatagtgccactgaggtatcaaagaatctgtttaacagccttccggtgtggttgtaaggagattttcatgaactgacaaaccttgttgacactgaaagcaagctcaggcagagtgattaacagatattgtaaggctcccacaatcaatctgtaaagttgagaattgtcaaatggttcatggccatgagtagacagctttaagccactcgccatgggagttggaagaggtttagcatcttccatttgagctttgaggagaagatctctgacgtactatgactaaaatagatgaagccccatgtggagtagactgaacttcaatgccaagaaaatatcctaagtccccaagatccttgagagaaaaataagaatttagtgttttaataatgttggcaatgaatttagaatcacttcatgtgatgattatattatctacatagaccaagataagtgtagtggatgaagatatgtgtagaatgaacagagatctatcagattttgatgaatagaatatccaagtgcaatgaggctggtgtgcaacttattaaaccaggcccgaggggcctgtttgaggccatataaaactttgtgtagcttacacactagatgaggggctgagggaaggacaaaagcatggggttgttgcatatatacttcctcttgtaaatcaccatcaagaaatgcattgttcacatccaattgctttacgtcccaaccccttgatatggctaaagagagatcaactctaatggtgactagtttgcccactagactaaaggtttcactgaagtcaaatccaggttgttgatgaaatccttttgcaacaagtcgagctttaaactttgacatctttccatcagggttctctttctttctataaacccacttacaaccaatggtttctcttccttctggtaagacaacatatgtccaagtttttttttctttaaagcaaccatttcgtcagacatggcacgattccaatgagcactttgcaaggcttgtttcacacttgttggctctttaaaagccaaatatactttaagctttcttataccaaacttggcacgagtcttcattttgtgtgaatttacttgagcagttgctggtagtggggacatcagccacattaggatgagtttgttgtgttttatgccctaaataaaactcatttcaatataatatgatttacttattaatatagatc

SEQ ID NO: 163068 - DNA, 1030 bp, Cannabis sativa
gttgttacaatctccctcttagataagttatgatcattattaatgaaccaaaacaacaaaaaatatgataattaagaacataaaaaggaaaaacaacctaacaaaattaaccatgcttaaagattgaacattaccgaactaaacaagataaaatagaaggcacttactctccccttcaatgatcataatgaattaatagccaactatatatctaaaccaaacatttaaaactagctaggctatctctccacctaatgagcatatataatatcaatgccaaatcaacatgtacctaaaccaaatacaacattttcttaaatgctcccctagagaaaattaaaagattaacaaaaaattctccttcaattataagtaacagtaaatgcaacattaactcctcattgtaaaagaaaataccaaaccaacacaacaagagacccacaacatatgtgtattagatataaaaaaaatgagaaagattgaccatacaaattaaaactacggtctaaaatattagctctgcaatttgagatgtgttcaaacagtaacaaaaaatgatatttatattttgttaaatgaaatccgaaatggatagttttatccaatcggacaactataataattcgaaatatcttttttgacatgtacacaacttattgtgctcaaataaaataacgaacaactaaaatgcaactgagaaaaattaatattgattaatttgttatatgttacacacgctatacgcaattttggaacataattttctacgtacaaaaataatgacggttaaaaaaacaaaaatatgtatgtatgtgtaacgtccacggaatatattaaaaaacatattaaaaaaatatgtgtaacgtcttcggaattatagctcttatacacgagtttgttactctggctgcttcatggactgacgactggccagggtcgcgagcgatcatggaaagtggtggtcgcgactactgaagcaaaatttgacagcttcaacatctttcagtaaaatgtgcataactttcacata

SEQ ID NO: 163069 - DNA, 1098 bp, Cannabis sativa
  modified_base (1037)..(1039): a, c, t, g, unknown or other
tttttttttttttgaaatctattcctttccttttctggatgcccacttttccttttttttttcttgtttcctttcttactttttaatttactttaccattttacaatttatattataaatacacgtcttttttttttttttaaatggaacaacagttcaataatatataaatactcattttgttactttttctttttcccactaattatcatcacataattccttttacctttttccctactctttttcatatgtttttttttacaaacatctcattgcaatggaaataaatttttttagaacattattatgtctgtgtttcgattgaccattagtaattaataccacgtgtatcaataaaatgcaaaactaattaattaataatttaccagaaaccatacatgtatataaatatcacaatggtacatgatatatattatatcaaataatattaaaataggctagcttagattgctattttgtgtgaaattttacatatatttatttctttttcaattattatgatcatattgtgaagtcaactatgaccgaattgctgctgtcagaaatgtgttaattaattcattaatatattgttacggtctaacttagacaaactatatacattaaatattaaataaagaataataattaacattgttaaaaaaaataggtagctatagatgccgccggcgtaactatttcttttactaaaaaacaagaagaagaaaacaaaacaatacatatataaactttatttaattaatgattgtgacaagtgtggaatgaaatttaatgacaattgcttgatccaattacaagtaaccattaaatatggatatttaattgtgattggattagaatgaatattatttttaaatactcaattgaattcggaagttagatgtggtgtccaaataatctaatatatccaactaaagcatcatatttacacctgaaaacccatccatcgagcaaacctgtaacgtccccgctttaagcttctattggattcttacacccacggaataatggcnnntatacacgagtacatcactctggctgctttatggactgacaactgaccctacagaccaa

SEQ ID NO: 163070 - DNA, 1232 bp, Cannabis sativa
ctattaagaatggcttacaactagcggctgctttgaatttgaggaatgctcaggtatatagcctaggactgtttgaatgctgtgaactctatcaagaggaaagtaataggttgtagatgttgatggcatatgtgatcatattttgtacctttgtatagttttgagctatcagttgatgtttgtttcgagggtagagatcctaacctcctcgctcttttttgtagctaagcatgttttagttaaaacatttgatagttggaatgagaatttgcccctatgttattgtctctataacatggatttgtctttcctttctaatttttcttaactttcaatcggatcttttaacaatataaaaacttatagtacattgctttgatacacttgctatttatcaatattttttcaatctaaattttttttcttttcataatttttactttgtatttactcaaggctttcggtgaattttcaagttcgagtgacacccataccgcctgtactatttaaaaatataattttatttgattttcctataaaaataaaatataaattagtgactaagaaattaaaaattaaaaccgtaaactaaatttagtcatctctcttttctctcatttatttctctctttttcacaaactctctctttcttttattcctgctaagcaggcagcacccaattgcaggccccgacccaaacttggcatcggaccccgaacccaaaacccgaacccagaccccagaccaggaccaggaacccgaccctggattctggaccctagacccacacccgaactcagacccgaaccccgaaccctgacttagacctagacccaaacccagacctagacccgaactcgaacttcgggccctagacacggatacgaccctagacccgaacctagcccccacccagacttggacccaaacccgaacacggaccctgaacccaaatttaacccgaatcgaacttggaccttgaccccaacctcaaaccccgacctaacccagactaggacccaaaccccaattcctgacccgaacctcgaaaccagactcgaatattggcccgggtctgagactggggccgggtttggtcccgggtctgggttccgggtctggagtccaaatctgggtttggatttgtgtaatacccggaattaagaaatggattagcaaaaatcctaactagataattatgtataattgaggaaattatattattatataa

SEQ ID NO: 163071 - DNA, 1912 bp, Cannabis sativa
ttcttttttctctctttctctatctttctcctctctcaactatacaccatatcccactttctcttttctctctctttctctctctttgcgacacaccaggggactgtgattttatctgaacctatacctgtctgtacagttttctggtcatatgaagataaaagatgagatttttaagtcattaagggagaaaagttgaagctgattatgttcccaactttttttaggggtgaaattcatcccccaatgattttaagttttgagggttaatcttctcttagactagtggcaacaaagatgggccctttgagaaggagagagagaaatagatgagctagctagaagaagagtgagtgacgaggaatggttcatgtagtaagggatacaacaaatacatggcctaaataaactatagccacaacttttatttccaaagatttttcattattttattattttattttttttccttatctcaaagcgaaaaattataacactaaaaattgtaaatcccacttatctctctcactctctaggcccttccttaatcaactcagcttgatagagtggaatatttataaagatgacaaatttctttaaattcatcattatctttatcacttttgaggttaaagttaaaagtagttcattttttgttactaaaaaagtgttttataatttataatatctaaatacatttttttgtacgtatatagataactgctgtgtatattcttacataagttaacaaatttagaataaaaaaataagagaaaaataagataagtatgtgatgtgcatgtgcaccaccgtttagtaattaatttattattgttatgagtattggattaaggatgaggttgggtagaaacgaatctgattctaattctgattctcttggtatttggtattatggctagtagtagtgtcatattattgggactttggtattggttttaaacggcatgaatgaggaagaagaagttagtaagttgagttagatatctcagttgttaactttagaattgggattgcaaattaagctgaggtgaggggacaagcagcatggggaagataggaacgatgactaaatggtttttggcattttgctcaggtgggcctttctttcttacaaatttttctcaacccctcctccaattctcttccaaaatcaaatctcagattccatttttgggtcactgttcaatgtgatttatgatgtggctctctctctctctctctcttctagttctacttttgttttgaaaagataaaaaaggtggtatgtaaaaatattacctgctgtgctgcctaaacaaatatgaaacacctcctctctctctttctctcttcctccataccccaactcccaaggccacaaataaaagaatttgcgtaatttagatgctgacatcagcttaaaattcctttcatttattgaattttaaagttgtacaacaaaacccaacctttttttaccccatttgtcaagatgaaagaaacaatgctttccactttccactttccactttccacccccaagttatattttggaccttttttacgttcatatgatgtagacatagaaaagaaattaacaaggtacgagtagtagggtgtttttattaccaaaaataggagtaacaacagatggacacacataaaggcgagcagggacaacagtccttaaaaaaatattagaatacgtacattttaattagttataacatatatttataataaaaaatttatcttttagacataatatttactttgcataatagtcaagttagattacacatatcttagagattaatggcgcgtttactaaactgtaattggaatcagaataatcaataagagaaatatatcggtttaaaatagaaaataatcggaaacaatattttattat

SEQ ID NO: 163072 - DNA, 1159 bp, Cannabis sativa
atgcagataatcgagaagtaacccgaaaacatccaatcctttgcattggattattataacttaatccatcaattttatctgttctgatttatttatgcacataaagtttttttttttttactcttttttgttatggaattaagagtagaatgcctaatcgtaatggcatgactcatgcaagtcacaaaaattaaatagaacacttccatctaaaaaatcagaatagagtggacatgaagtaaacacaatttagattcttaaaaactccaataaaattaagttgtatataacacagtttgatctatttacatagttataaattggttgaacataatgctcttcaaaaatataaactgaagaatagcatgatcctctttcaaatccaaaagcataaaatcaattgcaatactaaaatcccttgataaatggaagctgatcttttctcagcaaccaaacaaattatctatatcaacccatcatcaactatgacaaaaagtgcccataattgacatcgaggatagttctgaaatggactttagcttttgagggaaacccacattctcaacaaagaaaagaggttcgtgtacacaaatataaacacaaaagtcaaaatctaaaatatttcttaagaataaaaacaacaatatatctaaagcggatacaatactgaattatactgaattatggaaaattaattaattacagagacaaaaatagatctaaataactgttgacaaaaatatgagagatgaaaaaattacatgtggtaaattcataaacatgaatagggtggagctttacagattttcactagggatgaaaattagatggataataaacaggtaatgcatcttccaatctcggtccctgcttcccatttatgctcccatccccaccctcaccctacttaatctctgatgggttcagggtaagggaatccccattaggtatggggacccattgaatacccattaagattaaaacaataataataagaagaaaataatgtattgtaattcaaaatgaaaataaaaaaaaaaagattgattttaaaataaataaacattctacctattaaaaaatctttattacaaagtttaatcaagcaattgatttattcacataatgtgggtcttgttggtctcctcgagacaagagt

SEQ ID NO: 163073 - DNA, 1171 bp, Cannabis sativa
aagtcatatatataaattgagaagtgctaaaggacacccgtggtgcttaacaccctcttttgtgtcaatatcgctattggtctaattaagtatcgggtcccatataatttaatataataaattttaaggagtgtcgttagccaatcgcaacgcgacatatcgagaaggtgctagacactactggtgcctaatagcaatgctcatataaattagatgtaaattttaacattaatttatatatattacatctactagattataatagtatacatgcttccatcttcatcttaattagtttaattctatttatttatatcattaactctataattaacatttcttaattaattattaggtacgcatttcagaaagatcatctatttatatatagtcgatcccataggtattcttactactgcgttcatagaataactggtagcgatactttcattaaaaaaaaaatagtagacacttaattgatcaatgttaatgtaatggatacgtcaaaaaaaaaatgtttatgtaatggacacttccaataaagatcctaaaacttaataaaaataaatacttacacacatttttcatacacagttaaggaatagattaataagtatgtttttttttaaaactttttacgttatcgatcaagtgttcttaatactttttaaaatataactttgataataatgtaattcttccatcactttatttaattttatcatgaatgagtgatgcattggacaataattgataaatagatacaaattaaataatatttttaccaatttcacaataatgattagaaaaaaccaaagtataatatttattattattttttaaaaaaaaattcttttattctattaattattcattagcataaaaaattaaaccattaatcaattatcatctatcatgttactcattaatttcacaataaaattaaagttgagacagaattactgtcaaaattatacttctggaggtattatatttacaagtggtatatcataagagtctcaatctgataatgtaaaacatttaggagaaaaaatactaattactctaagggaaattatattaaatgacctcaaattatagaattatgttagtaaatatttctatttcaaaatttgtagtaaaatgtctatttttttaaattatttattat

SEQ ID NO: 163074 - DNA, 2437 bp, Cannabis sativa
tagaatatatatgactatatgagaaatggtaagagtattttaatggtgtcaaacactataaaaaatgacatgtcgttattggtatataaattaatatcgaattttctatataatctataataaataatataagaaacttatgatgtgggatggtacctattagcaatactttttatatatataaggagtattaattatttattactttgtggagatctctatgaatgagattcctggcggaatgtgaatgaatgccttgaagtctgtaattgagatctcccaaccaaacagtaatctgggtgggtctctcataagggttccatatttttgagaagagcgagtgtgatatgtgcctgcattcccagtttctttcttccactttcttagtatgagctgaattaataatcaaattaatttacttaaaataattatgaaaaattaaaagtaatatatatttttgtgttatatatatatatatatatatattaattaccggagagatgacaagaaacgaacatcatttgtgtagatttgtagttgaggcgtatggccactgcacctttcttcctcccaattactcctccgcagcccctaacagcatacttatctaccttcaattctgaaacacatatatatgtatatgcatatagatattatttatccaatattaataattaaaaatcaaaactatatagatcataatcaatagtactgcactatacctttggtgaacgaatctgatccctttggcccaaaaacgtataactgcaaagactgcatgatggcttctcctaataaccttcattaatttaatccatagaattagtttattatatttaagagagttaataataagaattaatatttaaaaagtaggtggtgtgtggttgaggtacgtacatgtaagattgaagtagagttgcctgtaaaagttgggaaacgtttaggcgaggcacttcttgcagacctacgactagaagatcaaattgcctcctgttcctgttcctgttccccactatctctaccaaatcttcttcacatacctatatatataattaatattattttatatatataacaacaacacaacaaaattttgtccataacataataattatattaatatgtgtgtaattaactcaccttgccattcatgttccaagtgactacgcaaatgcatatatcatcggatgatgatgagtcatcagtagtggtacgtaactcatcatcattgcaaaagtttctgggctttatggtcttaattccaccatggctttgtagtctactactactactacttttgttattaggcttgtccttgttcgaaagtacctttgagtttttcttccacgttctccatctttcattgcgatatctaacaaaaacccaataattaataatttgtgaaattagcacaatttaatcatatatattgattaacattctcattttcacagcttaattaatgaagggagatggatatggtatatataccctttaccagcatgatcactactggaggagctgatcaaatttcccatttttagtttcctgcgcttctttgattcgacaaagttgtggtagtactgcttgataattaatgtattattatatctattaattaaaagaaattaaaaatggaaaataatattggatagataagagataaaagagagatggagaaatggcatggattattttgatttgtaaacaatgactcttacattacattatatattatatattatataattaattgtgatctttaggcggtgaaacgaaggaataagtcaaaaagttgtaaaatgagtccgatatgtatatattatacgttactacaattaattaatatcaagatatatatatatatatatgtggaaatatatatagttgaaataatacttgttttcttccacgagttaggtttgtatgttattgacaaaacgagagaagttaaatcaaagatgaaaacaacaatctctgattcttcaaaacatgtaactgatcaatatacaataataactaggtcttcttgaatttacttaacgttatatgtggacttggattcaaatggcccaaaagtcacagtaaccaaaactaataaaattaaaaattatattgtatacctactttattttatttatttttatttttatttttatacttattttcatagataatgttctcattatattttttaggtcaattggttaactcattcacaaaagttatattttaataaaatataatatgagtgtattttaattaatggataaaaaacgagatattattcaacttatcccaaaccaatttaccagttgttaggcaataggagcttgaggttttagcagaaaccaaaccaaagtagtccaactccaacggactggcccaggtccaaataattactgctacctccaaataataggactatatccaa

SEQ ID NO: 163075 - DNA, 2170 bp, Cannabis sativa
cgcatcagggaataggattcgccactccgtggaagccaaactacggtcgagtctagctctcttcaatctcatccctacagaagattgtttgttgctctttgaccatggaaaaggagggccaatgaatcccagatcaatcaatccagctcgatccaccatacgccgaaagtcgaaggcataccttgctgaattaccttgtctgaagtagttaatacattcagaatcaaggagggttccattcatacccccaattagaagtaaagggctggtggtggatagagccaagtcgccaatttcattccagaattctccttatccttctcatgcggagggccatataccccaataaattgccaagtcacacctggggggtccgaagaaatatcacccatgattccatacttgtgattagagttgatattgcatttgactcctttaatccaacagagtcccaacccgcccgaaagaccaacatgagggacatacataacttcttggaagtgtagtcttctgcagattattttgaacttctctaagggtattcttgcctcagctaacagtaacatctcgggtttgtggtgacagattaaagccgccaactgtcgaactgtcgtggagctcccaagaccacgacagttccaagctaggattttcatggcgactgtggagacctttttgggcaagtctctgaggccccaaagcaaaattccacaccattgttctcagttggttgtgtagtcgtccgaatttcatcttcctctatttcttgtaatcgacaggaagttggtactgagtgagttttctcaattaccacaaagtggttgtcaaggtcaattttcaaatcaatggttttgccctcccagtgatgcttgattgtagaagtgtagccacttttcgatttggacggttttgtccatttgaattgcttcgaattagccgttaggcctgagtgggttttgggcggtcttcctcttcgtttcaaaggttgcccgttatcattactaccttgtatattctttttcagtcttcctctgcgtttgggagtggctccttcattgtcatgtccagttacaaacggggcaagggatgatgagttcagtgattcactcgcagacggtgactcttcactcgcaggtggtggagtttcaggaactgggatataacagagaggaccacttgaattgggttctttcttttcgaattcttgtttcatttgtgatgtggattttggtgatgggctaaaaattaagccatcagaagcctttctcttgcgtgggccatttaagtgttcatccactctaaaatcctcaatactaagtaatgggttgaaaagagttgattccctatggaacttatccacagtaagagagcccataaacaattcacgggcctttggttaggcccagcactctttagaaggccagttgagatattgggtttgggagcccataggagaggccctatacgaaggatttgagtaacttccttcatatgagtcgatctgagaattgtccttgttggtgcgatcgtgactcttcgaatctggtgtggtatggcctgaaacctccccagaagcaggcatgccttttgagaggggttatacagaggctcttttcctgtgtacttcttggattctcctgaagaggtaatttttgttgctacattttgaattttgggaccgttatgctgtgatcgttgggctttgcagactgttgtattgctccgcgtgctgttgtccttggaattggacggttcagctgcatcaattaggtcctggatgactacctttttgttgttattaccataaggggaaaattcgccaatgcccggtaggtaaacaaaagggagttgggtaataacctgggttcccctccgtcgcgagcttcatcttcgtcgtcggagacgattctacgtttagtaggaagttgaagtctgcattccctcatctcatcattttcaccattcctaatggcattctgaacctttagttggttgcgaagcatcagatctttacctagctgtttttggaacacccagtcttggaaccatttagcaaggggagcagagaacgtggatttatcttgagaatcattctttaaccaagtcccgtataacggatagaaattccccaggcacttcaggtgacggctcagttaaaacaaacaaggca

SEQ ID NO: 163076 - DNA, 584 bp, Cannabis sativa
gagagagagagagagagagttatgttttagcttgattttctaacttgaaaaaatgaaaataacctaagttaattgttttattcttttaattaaaatcagccaagatattattagaataaaacctaattcaaactaatggactaaaccaaccaataggaagaattactattttacccttacttaccccttaaaaatctttaggcttaagggtaaaatggtcaaaatttacaaccctgcctaaacccaatatctcaaatatcaatactacttgccctgctaaataaagattctaaaccaaacccatgtgactcaatggccaaaccgtcgcatttctaccattaccgagcaataatcaccaaaatattaaacttcactcttatcaaatataatagaactagagtttaataaaatttatagaattgaaaaattataactcaaatgcctatttattgaaaataggatccacatcatataatatattaattaattaagggaaatttgacattttatgctaaaaaaatgcacgtggtgttattttatacacagaaaatatacatttgataattattcttaactttcaattt

SEQ ID NO: 163077 - DNA, 1741 bp, Cannabis sativa
acatacttcagttatgttccaatagaattctggttaccgagttatttatagaaaacctttatcacagaaaataaagtttatgtacaaaattaatcttattagcaattttttctttcactttcttatttgcattttttttttcaaattcttacctctatacttcttccagattaataatataatttttcttccatcttatttgttaccttgctctaaatttttcatctttctttttattatgcaggcaaacaaaatgcttaagccacaaaggtggcatgcagcctttgacagtgatggaaagattttttgttttcagaaggcacttaaacggattattcttggggtacgtaacacgatgtaaaagtgaaagatttttaagaatcattagtatttatttaggtcctgtcttttaatgtcactacgtaccttctcatttatattttaccaaggcattttgttcaagtgttgaaggatcatgataacatgtaactgtgccatgtgcatcatgtatattgagtttttcatgtattggatattgcctattaaattttttattactaaaattacgaatgatagttagggaaagaggggtttcggatataaacttctttttttttccttaaaaaaaatcaatgttgtttgatattgtcgtctggaaaagttatgatgtattcttgttcattatcaataaataagtaatcaaagaattctaacttctaacttgctgtatgatagggtgtagatccatcaatcaggccagaagtttgggaatttctacttggttgctatactctaggtagcacagcagattatcgaagacaattaagggcagcacgaaggttttgtatttgcttctgtttactcatatatttattccagctgctcattctgttcttgttcagcccatattattgtctaggaatgatactgggtgcaccccttagcttcaaccttagttgccatcatactcacatgttgttttaatgacatgtcttccttttctatttcttaaatggtcatcttatttttcttaaatatataaataagagcatagttcagaattgtcattatatagtttgctacatagtcttcaatcaaaaacttataaaaaactttgttaagcaagaattacactaaagtgaggtagaagatggactaacaagagcattgggcagattaacattcatgcttgaatgggataatgtgcgatgttctttaataaagtattttctatgaaaatgacttatgaggaatgcaaatttactttagtgcaaagtttctcttatttattgattagttaattctatcaggtgagtgttcctttattttatagtattgtcaaggggcaccataatgctgaacaccacttgatgtggcatatggtgattggtacaatttaatattttgcctacatattttaatttaaaatagaatatgtggaacctagtatttaattgcaccattccgcatcaaatcgtgttggatatgatatttcatagaaagactctttattctaacttaaggttttgctccataatgaatataattgttcaaatgttgacaagagttcatcatgctttggtactttagatttggaccttcaaaagtggctaaacatagttttagttaagagtaatttgtggcataaatacctaagtttaactccaagttgcaagtaaatacataagtttaatttttggcggtaataatacctaatttatatttttggaactctgtaggt

SEQ ID NO: 163078 - DNA, 1614 bp, Cannabis sativa
tcagcatcatcccaggtttaacaggcaacttcccacctcaacgccgaatgacttcttcagagtggcttcggcaatatagagaaaattgcaacattgagagcagttacaaccatgtcaggcccttgtcttcctacttcaatgctcctggaaatctaggaaacatccataatgatcataattcttccagccctgatctcttggatcaatggggatatcctttggcttctaatccaacaatgaaaacagtccccggaaatccatttttgtatccagcttatcctctagattatagcgctatggattttcaaagaagggagaagctcttgtatggttaccaaaggccaagcccatatgtgtgtggagctgtgacagacaaggtaaatgaaccacagccacttcagcagtacctgaaggagaaaaaaatgcaactccagcgagatccaacggtcatgagaggtcctacgtatatgggaaactaagatttttgaacagtagtataaaaaactatagcattagcatgattctgcttcgtgcagacaaatttcacgtgtttagttttgtataaatatatgcttaagtagaccttctaacacgttttgagtttgaaagggtgtaggaaaatcctgcacatcatcgttcgtataaatatgtgcgaactttataaagaatgctgcaaacaataacatttatgcttgtgaatcaaaaataaaattatgtatatataaatatttcattaaaatttaaattgcaacataaaaatattaggcatcgtgtgtttttagtatggattccttttaggtacgagaagcaccatcaccaagaaattatttatagaaatattcatcgtattcttatatcttactattataaaagtgtcttacaattttgccttttataaaaatagatattaacaatttttcccttttgttgacgggtcataactcaggttttaactcttcctttttcttctctgtgattattcctcctaactctctttctatctaaccacgctcgggatctcctccttctctttctcttcaaccatactactaacatcagattgatctctctctttttttctctctggtttttcataatatataaactaataaataaagtgtatttattttgtctttgtttatggctcgtggaattgacttaaatgtatgtttatataaatctatagtttcgacatgcacacctctgggattgacttagatgtattatataaatccacagcttcgacatgcacatctctcatctttctcatcagtagcaggtatgtttattaatttcaaaatcccagattcctttaccttttttctttctatttgtacatataacatgatcgaacttatcaaataaatagctctaagaagtgaaactttgctgtagaatggtgattggtttatgctcctaactgcttctctgatttaacttcttcaattatgagattccattagcgtgcatccagtataaattaaacctacgaattcgccaattatgagttgggcgctttaaccattcagccatggatgcttagcggggatcctcgtacatggtgaataaccaaattccaattgaaatgaaatctttagggtaaatcaatgcaat

SEQ ID NO: 163079 - DNA, 1400 bp, Cannabis sativa
  modified_base (1331)..(1336): a, c, t, g, unknown or other
tagagcccattctggtaagttgtatgcaacaaagttaaatttttaggatttaatctggagaatcgtgaacaagttagctaattaaccaattgacaatcactccacacaaccagacaccaccttagttttacatattagtgagtcttaaataaaatttgaagttaagaaaaatcattaagaaacaacaaacaaactaatataataaagaaaatcttctttctccaaatctgatacataaacttacatcaaataaacaaaatatataaagaagaagaaaaaaaactcacttgttaaagaggtcccaattaggctaaaacaccatcaataaaagaatacacattctccaattccccaatctcaataactcacaatacattatatatatatatatatatatgtgcgtatgtatatatagtgtcaaacgttggatgcgaagccctctttgtaatgaggcggaggagacggagaagggtaagaattagtggcggcggcaccaggcggcggggtggggatgccatagatctgagggttggtccgtacgtcttgtcttcctctgtatcgtccgaagaagtagcaaccgaaacctaagagtaagcagaagaaaatcaaaggaagagaaatcaccactaccattcccatttctaaaaatatatttattattctcctctgtgtttttgggatctgctaaaggctcttaatttgatcaaagcgagaatagaaagagagagatagtctgatagagagaagaggtgtgaatgtggaagaagattagagaaggtggatatttatatagaaaggaaggagacgaagtatggagaaataggattcgttccaggagagcaaaatgtgataagtgttatagtacagagagagaacggtaggcttaacgttcaagattctaacggttacttttttttctttttggcgaataggaataaataagttggctttgttttttctttccaactgtccatcaatgaaagttttttttaaaaaaaaaaaaaatgcttaaagttttggagcacttggtattggagattaattttatccaaattaagaatgaatttcaattgtttctccaaaaaaaattgttattatgattatggattatatagttattattattaggactcaatagattttttgttagagatattgtatagatttcttttagggacgcaggaatgaactagattgtagtagaaagaagtggattgtattgaattaattatgctacatctaattcgtattgcaagtaataacaatgtataataacatgactaatacgaacaatctttataattagttgacttcaattcgtatcattctcnnnnnngaatgatgaacaataaatacatgcctcatgtattaaaataacattagtcatgctcattgttatt

SEQ ID NO: 163080 - DNA, 3844 bp, Cannabis sativa
ttcctgctgaaccgctcttccgatctcccctctctctcctacacactattcatagtgtgtgcaagattaaaatcctgatctcattaatgtgtctcatgagttgagtatacactgtaatatctaaatttgttcatcctataagatataatagcccactctattcctaagtattgaggctgacttgtaagatcaatgtgtgaattcctcaatcaaattcttagattggatgttcgattgttatacgaaaaagaatcaaagatatcctgataggcatcaagaggtaattgaatttcttgcagtagattagatttaatctatattcattatgttgagatccttggccttgtggttcatattaaatataaattattttagtaaaattctgtttctatttttatgactctgatatggaccataaaaaccaacactatactctaaacttattattttttttattattttgatttaatgtacacacatctggggatccattgagatatggtatgatgataatcagataatacaaaactctttcgctgcaaacctaatttagtaccataaaactaataattccaagaataaaaggacccagaatattttgtatcttccattttacaagcctccacacattatttgaagtcattcaaacctcttatcttagtattatttactattccctcctctagatggagatttttttcgaagtctacaagcattacccatggttcattaattccttcaactatctctcttaactctttccacaacataacccttccttattcatcattgaatccatacacaaaggtgacctagaacttttattttcctgaaattgtacacaactccagatgaattatttggctagagcacctcaaaatgttaactataaacattagcgaatttcaactaacaatagtttggcctcctacatgccaagcattattcgaagtaaaacaccatcctccaaatatatttacatacaaggcccccaaattggacacttttactctcgtctcgagtaaaccaaccagcactgtcctcattttagagattaaaagtttaacctccatttatttcttaagattgttgatccctcgggcgttccaactcataatcatacccattcaaagtaggaggctctccccctcctcgtgtactagtagcctcttctccaccttttgaacatgctccaatatcacctactgcctgaaaagcattttatgtaatagtaggttgattcacagtgataatttgtttaccacactttttgactttctaaaacccatctgaatctatcactgtcactggcaccacaatcgattcttccacactcactttctttttctcaacccacaccttcttttgcttcttcccaatcggatcatccttctctttgtagaattccactatgtgcccataagccttacaatgattgcatactataggaacccattcatacttcacctgtaattaaatttcttgatgaatttcattggtaaaggaaatcacattagggaagtcttgatgcatttgaacttcaataagaattcttgggaaattaagtttttctttattcttagtaatctcatcaagcataataggagtccctagctacccccacaatcttgaataaaacctttctccccaatacttcagctctaacccatgtggttggatccaagttggaaccaaactaacatccttttgtggaaatctgtttatgaatcccaaggcttcattatgacatgtttcttatcaaaaaacatgtatctaccatctagaatttcatctcgaaataaattgaaatcgcattataaacactcctgatttaagaaccccactttatcaattcttttaccccctccacattattctaacaaagccttgaaaaggacctagaggtgggtttactcccaaaaaaataacaaacaaaagcaaccttccagtatcgaacctcttcttcaatatccaccatatcaatcttaatccctgactttttttttcgaattcaattcatcaagattaccagtattcacaaaacatattctcaaattttttaaacaaattttgaataacagatgcaaagagtaaaagaggttgagagtgaagaataggaggagttttacccttacctgacttgacttcagcctcacaccgtttcatagcatcaagaaagctaatgaagtcactatggacctgatactccagtacacttcacgtatcacagctctcggtgataacacataagttacttgttcaagtttagagatctcgattctgttctaatagcatcaactcttcttgctcttctttcgattcttcatcaaacaaagaaattaagcacatcaatttgcaatacttcagccatagattttaatcatcaaatttgaattcaatgggccctgctttttcttcccctgaatctttcgtttactagcttccttcctctgagacaacgagttcttccttggtcggcccccaacctgctataacactcagttgacgactgaaaaaagagctctacctgagcttttctctcaaagggtttttaaacaatctaatatcatcattattagtataataaaattttattaattcaaaacactttaaaatctataatttataaaacactcaattaagtttttttttttcttacaattctgctgcaattattttttctcacagcacgactagctacactattttttctcacaacataattgtactaaattagcctataatgctcccgaaaggctaacgatatatgtatgatattttttacccaattctctttttcttttttgaagaaagaattttaattattctttcattcttttttcaaaataattatatcctttaattatatttatgaatcaactataatacttaacaaaagaaaaattcttaaatattattaatgcatctactactactatgaaataattaattatttttatgaaattctatatattttaatttattccttattttgaaaaactacaaatctttagcaaagcaataccatgaagaggaaatgttggatccaccctcctagttgtagatgtctatgtttctttttatgctacaataatgggtgagataattgttggagctattgtatttcgcaacttaaggagaatcattgtggaggttattatttcacaatatcgggtgagataactctagcttttgctcatgccgtttatctgggtttgtcccaaagatgggaaaatgttatgggtaagttgaaaaatatattttttttatttattaataaaaaatactcttatattatattttattaaaatatatctattttttttaagtggattgctcaatataccttcactctctacttaagtcaaataaataatttttattaacccaagtagtataatgaagtcatcatctataaaagtaaatatattttaaaggatataaaaatgaaggtaaaaatcaaacaagtaaagtaaaatgggcatacaatgtaatttcctcgaatcttattctcttctctgattagtactttatattcaggcttaaattcgtactttaattttttatatattttttttttataattagtaaattatatgtatattttgaaccttcatttatatttatataacttttgaacaatatttacacataatcaaaaaaaaaaaaaattagaataattaataattttaccccctgaatattcaacaatactaattttgctcgttaaaatatacggcttgttaagaattttgttgtcctcaaaagtgagtgttttaatatttatactcggaagtgcacgaatcgtttcggaatataatgttcatgtaagtgcaaggtcgaa

SEQ ID NO: 163081 - DNA, 688 bp, Cannabis sativa
  modified_base (654)..(663): a, c, t, g, unknown or other
ttacagtcttgattagttcaatgtgtttgtgaaggaattcaagatcgaattccagaataaagtaattttgcatttttcttttctttcatttttatagtttatataaaagagttaagtgtttggtgtcataaatgatttctaatgtatataattaatattaaagaaaatataatttgaaaaatcaacatacattcattcaaacctcatattttattttgtgatgattaaatattcttctttatttggcaaatataggcactttggatgagtattattaagaaaattaggtttttatatttaatttgtctatttaattaaaaaattctcgtttttacattatgagtttaagttgttttattagctaaaagaaatatgaaaaaaagtttttggcattaaataaaattaaaaataattaaatttgacttaaatatttttataaaatatatttttgatatagtgtaatttttttttgatatattttttttaaattaagtcactaaattacacataaaaattcactaaatttctcgttgattattcactgtttaaataatttaatatttttatgcttaatttgaattttctaaggcgagtggcgtgctcttctaataggggtgttcacaaagtatctgatccaatccaatccgcacgatnnnnnnnnnnccaatccgcaaaatgcggatatccg

SEQ ID NO: 163082 - DNA, 2672 bp, Cannabis sativa
tcatttccttattccattacttctcccacatgcctgaccactcgagtcagctacccctattgggtttttatcttatgtgtccataaaattcctactttttctttcaagccaaaaggcccaacaagcagctagttagtgtagctacatattataacttttcattctgactatcattccttattttcttttcacctgctattctccgtattagctttcgacttccattcatactcttctatgtgaatgaatacctagaagaggttgaaacttgtcctaataactggaagtaaagaaaggttaggaaaagtacctctgtcatgactgcaacagatgtgggatcatgaccacgccaaacgtagtctcttactttcattccctcagcagctgcacctttcttgacagcttggatagcaacaataagagaagcacctgagaaatggatgcaaacatttagaaaggggaaatataaaacatgaaaatggacagctaatcatttaaaataatgaattataccttcaataataaaagaaccagcaatcactagagctgcgtacttaatgtttccagggggctgatgacatccatagagataagaaattaaaatattgtggatacaaatatattggacaagaaagaagaatttacaaacacgagaatgagtgaaaacgttacatgtgaagtccacaagttctgaaatccgtgaacaatagtagccccagaaccaagacaaaatatgccaacagccgatatcaaagaccaaacaaatctttccttggaatagccataactgtacaatgccaaaagtgtcaattcagcatgtcactaaaataaaagaaatatatatgtcgtcctaaatctaaactgggactgatttcttaaatgctcttgggtgctcactacccatgttgaaaaatcaatagaactcaagagataattttacgagtacaattagtcaattactaataatttcacctatagtttacaaactcatccctcataaaattctcttttgaacataaatacaattcaaattctaacaaatataaccaacttgatacaccataacaataagaaaatactacatttgtaaaaaaaagaaggtatttcatgatatgaaccacttacggatggatagcatctggtgcacgcctcgagctactcagaccataagcaaggagtgcctacaatgtcaacgcaaattagtttctccacatttaatcccattaagttcaactaatataaaataaacacaattaagagaaaatacctgatttgcaaaatctgcaactgagtgaattacttcagccaacataacatgacttgaggtagctaaccagaccccaaacttgagtgaaaacacaagaaagttgcaccacaaggcagttgtgactgccctttgactggtacatattagatacaacccacataaccaacaaaaaattagaaatgtggaaaaaatccaacctcaaattggtcaacaatccaagcacttatcaaatttctgcctaccaaaaatcaaaacggtaaatcaacattactctcagcaaaattggcttcttttttatttaattattcaattctcagcaccaatattcactcaacaaatgccaaagctaacaaatttgtacctgtgttgatcattgaattcaatcctctgaacttgtttagctctggtgaaaaaatctacaaaacacaaaaatatcaattcttttcatcaaacaaataaacaaaagagaacaatgagataaaacctactgcgatgaaaagagagatgatgccgatgccgttgccgttggttatgggagtaaccattagaggaaagaaattcaagcaaaaggaagcgtcttgaacaatcaacagaagcaaacgaggccggtgcctgtggaggtcctttctggcgatctcgcgacggagtatggtggtcggagaaatggaagagtaggattgggcgagaagaatgaatgagagaagaaaagcggtggtggcgataagtcggagccggagccggagtccgggagaggaaaggaagaagaatgcggtgggtggctttcctctgcatagtagcaaatgctatgattgtattgtattattccatttgggttcttctgtgtgtgaatttggggattagggtttggagattgaagaagaaggaagaagaagaaggcattaaccattaaaacaaacaaacactcttttttgagtcttgcattgccactgcaaaaggaagaagctctaatgagaatgggccctctttttacttaattgggcccactacttttctgttaagcccatttattgaaggtccaattatccatcattttctcaaattacaatttcacccctaccaaaatagaccaaaagttaattaagatggtcataaagaataaacaagtaatattaattataaataagtcgagtttgaatttaacatttagttagagcatttctaattatgttgtctaagcacaatcagttagttaaaatagttaaaaaatagtgtacaattccttttttttttttttaatttttttaataatattttaattaaaagtaatattcttttttcattattttatgaattaatttatatttgataaatttaaactataaatatattaataatcaaacattaactatattagagagtatggttggagcaataataataaaaa

SEQ ID NO: 163083 - DNA, 1579 bp, Cannabis sativa
aaatagaaattaattagaaagcttaattgatgatcatcacctttcaaaatacgattgagctacttaattatattacatatattatatggaatcattgatcatttgtaatctatagctttctaactcttatataaaattaagactcttctctctacagcatacttttgtttaagacactatatcataattgttctctactttttatctacctaccatcactagatcaaattaattcgactattattaaattattattactaagtattattaattaagtatacatatattattaatacaaaagccacctattaaggtgaagtacgtaagactaaaacacaaaatatgttaatgaatagataatcaaacttattagttttgtattagctttgggataagtattgatgatgaacaatacacattaaccacttcattcaactttaaaaaaaaacaataaatatatatttctttattaaacaacagaaaaaaaaaaaaaaaaacaaacaaaaacaaacaaaatagctatatgttattttcttaacagaatataggtatatgttatatatggccacgcacatacataattatgatatacacgtcagctagtttaaaattagagacacacgtagatgatacgagccatagtaaaattaacaagaaattaatgttatttaatatagtcatagcctatatatgttttgtcttatataaattgtttcctcttaagactgacgaccaacaatattttcttgcattaacattttgaccctcgcgtaaccggcaagtaatgaaaaatttattaatttttaacatttcatttttgttgcatattaacattttatttttaacactactataacctagcatatttttttttttatgaggtggcctaatatttatatggtcattggcaacaaacgtctatgtatatactgtatatataatatatataaacaaacaagtaatattattaattaatttgtagtataactaaggacacataaaaattaaaagaagaaataattaaatattaattaggtacatatatacctgtgagagccaatgcaaggaaaaagccgagtagaaaacgtcaatggatttggctggaaagagtcttttgtaaaaagagccaggaacaccggctgcgaagtaggagcggtgggtatcagcggcgaggcactcctccatgctaccaccgtcgttggctaaaggaggaagaagctgaaagagggtgttgaaatcgttgcttggaagatcagagaagaaagccgaaaactctggtggtggatgatgatgatccaacgcctcataacgtttgatcatgtgctttatgatcacatcaacgatgtagatggtgttgttcccacacgagcatcctaggtctgccaccacaaatggtacctctgctgagtttagttgaactccatctagggtttcttcaagcaggtggagcattgatttagcatgcagtgcctgcatacatacatacatatttaatttcttcttgttattgatattttcttcattttttattatttttttgaaaaattattacctccttctagaattcaaacaaattaaa

SEQ ID NO: 163084 - DNA, 1740 bp, Cannabis sativa
gatgcggagtcgtcgagtttatgcttggcatggttagagaagcagccacgtggcagcgtgttgttcgtttcgtttggcagcggtgggacccactcgttggagcagattaaagagattgctcttgggttggaaatgagtgggcaaagattcttatgggttgtgaggaagccgttccaggtcaagaaagaagacggtaccacttactttgaccgaaacgaaaagccgtcgtttgatttcttgcctgatggttttttggataggacgaaagaggttgggatggttatgcacccttgggcccctcaggcccaaatcttggcccacccttcgacagctggtttcatgagctattgcggttggaactcgtcgctggagagcgtggtgaatggggtgccagtcgttgcttggccactgtatgctgagcagaaaatgaatgctattgttttgagtgaagagatgaaagtggcgcttagacctaaggctagggaaaacggtttcgttgagaaggaggagattgccaaagtggtgaaatctcttataaagggtgaagaagggaaggagctcagaaatcgaattgggaaactgaaagaagctgcggcaaagactttgagccctcatggtgcttctactaaagcatttttggaggttgttgccaaatggaagaaccagtaattcagtttattgatgatttataaaagttaataatttgtatgggttgtgtgactcatagtttgctttgctgataagagacggttacaggacactttcaaatcacttacctttatctaatcttttcttaattttctcattttttaatcttttatttgatgaaaaatacttaattattcatatatgccaaaaaattctttctccaattatttatatccattaaaaaaatatacactataaatttttaaaaaatatcttataaacaactaatatatgaaaatcatctataccaaatataactatatgtaatgtatatataattaaatataaaaaattttaccgtaatttaaacaaaaaatatatatacacataattttataaacctaaaccctaagtttaaactatatttttatagcttttttttttttttatttctctcaatgcactttttttttcttctttattttattttaaattaataaaaaataaacaatatattttataatatatttattggtacattacaaattattatcaatattctctttacttcttctttttctatttctttctttatatatagatatataaatagatttttaatctttctctctcacacacatcaaaatattttttaaaaatttagagacatacaaattttcttttgataaccgacgacttcaccattgtcgatgacatagattttctattggaatttttttctctctctatatatatatatatatatattttataatatattttggtacattacaaattattttcaatattctctttacttcttctttttttatttttttttatttatatatatagatatataaatagattctcaatctttctctcacacacattaaaatatttttttaataatttggagacctccaaacttttttttgataatcgacgacttcatgttgatcatgttcagtggtctaaacttggcacgaacaattcatgtttatggaatttgttgggcatgacccttgataactctataaaaatagagttatttacatctttctaggcattaaattagctttgttctcaagt

SEQ ID NO: 163085 - DNA, 3653 bp, Cannabis sativa
  modified_base (3625)..(3627): a, c, t, g, unknown or other
ttatttattttttattatttttttgattaatttttaaaaaatatatctgtgcttaaatcttcgtgttcatgtatagatatagcttttaatatttatatttataggaatattgagatgctcgacatttataattgtatgtatatagagaaatattagtgttctatatacacataatatgtagaccaataagaaattgcaaaccaagttttgtatatgacggtttgcattaggtattctgccgggaaatttaagtaaattaaggcggcaaaaatataatttaaatagttaattgtatattttattttataattatgcaagtgattattttaaactttatttttttacagaaaattatttaaaaaaaataaaaataattactataattatagtgtatacggtcatatattttctcttggtgctaaaaaaatgaaacgctcctacggtaaatgcaaaataataccttacctaagaaactatatgcttactaaataaatttaacaattcattaatttttgaaatattaaaatctaatatctaatattgaataataaaagtaaattttgaatttctaagtttactttagctattattttttttttgaatttctatgtttactttaactatttaagagcatctacaatgatactctctatttttttttatctaaattttaattaaaatagctaaaaagttagaatagagaatcattttttattattcttactctaactatgttttctactttagttagcatttgatttttttaataatactttaaggtaatagttttctattaaaataatattaaaaaaatttagcgaaaaaatagggagctccctacatttagaaaactccctatccagctattcttttaatgttggagctcattttttttagaattcactccctattttatttaaagaatatgtttagagagtatgattagagatgctttaatcaaaagaaaaattacactggatattactattaatggttactacaaaaataacaataaatattaatttcaaaaatgttaaaccattaaattttagtccaatggccttatatatagacatacatggacacaatttgagttcaggtgtattaatcttgaatttgacttgattttattcttaaacatgaaacgatgacaggaagcattgggaaaattaggattttactctggtgaagaagaaattgaattttcaagcttttcaactggaactgaacgagctgtgaagacttggcaagtaagtatcaagtttcttatatgtggctactttttgaacaccttgaagtagtgataataaatctaatcttaataaaaaagaagctatggaatagctccaatgtagatgaaatgggcattaatcagttcattcgtgcttttgcgtgacagtccacttttggtgctcctgaagatgggattatgactgaagaacttcttgagagactttatgaggagataattcaaggtcctcttgagtcaaacatttatgctctaccaaaggtctgtttccataacattgtctccaaaaggtacaaatgtgtacttaaagtaaacacactctaagcttcttgaaaggacatggtcatagatgctaagctttaatttcaacatctcaaaaacactggtatgtagaagtagaacaataatttctcggaaaactgtatccaatacaaacccacatataaaaatcacaattgaagctactctgcagtttgataagacactgtttcgatcaaccaaaccagtagcaaaacacacacagacacaacagtagaacagtagccaaactaatgggagcccttaggcctctcccactccattctcttactcacctaaatatagtaattcctcacttaaaactaccctcctaacaaagactcatttaccctttttattcactatattctagtacaccatattattctagggcctaacagttttacacagtgttcttgtgtgactttccaacctgatattgataagaatagactagttccatcattgtttttgaagttttaaatatacccttatcgttgtttgccttaatgcctaatataagccttgctttaacaacactatagtgtcagccttcattattagtttcaaggggagcaatagaattctattaaactcctaactggattttttttttcatacacattctaggaaggtgaaaatggagctccagtttcatctgtaacagaagtttcaaacattcagcaaacagtagtgaaagaagaaggcattagcaaagcaggcttatccaaacaccgagtttttcttcttggagaaaaccgttgggaagattcttctagacttgttggcattaataaaaagggtgatgagagcaagacaaaggaagcaacaacaacaacaacaaccaagtgtctcacttgccgtggggaaggtcgtttattgtgtttaggtacatatttcttgttttccctttgtctttataaaacctttatcaacttataatgatatcagtatatatcaatgttatggggataaaaacttagaactagctttctcgtattgttgcagaatgtgatggaacaggggagccaaatattgaacctcaggtgagaattctatgagatatataaataaatctgctaaataacagtataagtactcaatatttataaaattgtaattttctttcagttttgtcggtaaatttcgttttgaatttattaaaagaacatttgaaagtaactgatactatatatttttgtctaaaactcaataatctacaatctgagttttatatgtgtcctgtttaaaataataaatttatactaacgaaattagaaaaaaattacagtggtacttatgttgttatttatctaaataaattcaacttttgtctgggatacatgtaatgttttgatttgactatgcagttcttggaatgggtgggtgaggaggatgcaaaatgtccatattgtgatgggcttgggtattcaatttgcgatgtatgcgacggaaagacagtggtataataaggtattaataactgtgttgtatatttcactgcatactaatcagaacatagattacttcttaatatccttaatcagatgagattggtcatgtcactgagtgttttggtacatattttgtgtcacatatcatttagtctttttttgaaataaaattgtcgagtgtttttctttttttctttgatagaactggacaaacagaaatatacgaaacaatgatgtgtatatctttgacgtgagcatattacgaggattattactcataatgcaattaagccatcagtaactctgagtaaggtagtgaaggtgatcttcttctttataattgttctttaatttttcagaaataaaagaaaaaataaccatgcattttggtttaaattatcgtagtgtaatgcttagaaaaacacaaaaattgagatgtactttttaattagttattatatatatatatatatttatatatgtttcttagtgagagttccatccatccatcgtatatttgtgtagatgtagggtgaaaaatattgttttattcagattaagggcagacacttgtatgtgttgagatgggttccatctcaaaaccaattggcaatgagtggagtannncatgttcttatatatggctcaattct

SEQ ID NO: 163086 - DNA, 939 bp, Cannabis sativa
  modified_base (889)..(914): a, c, t, g, unknown or other
taaaaaaaaagtattattgcttaacgaaatgttaaaatggaatctgtgaaacaagtttccgttattcaacttcgattgtgacacataatgacaactaactatatagattttccacaaggaccacaactaaactaatgaaattaattaatttttatatattatatttttctttgaacaaataagcatataaatatataatttttaatttttacatgcacgtacgtcggtaggtcatcatccaaatatgtatgagtgctatcttaatctaggagtactaaagtacatattatcaattttcgtttcttaatcaaaattataatgtgatagatatgtggttagacctaattttgaccatgtttgtagctaatatcgaatgacctataatcatatatataaagggaccattgaaaatggcctaaaaattagttgaacgtcaccaattaacaaagagtacactttttgttgatcaaagtcagacttatgtttttcagtacgtgaatttttttatttgttagatagaaggaggttgataattatgtcactaatcgaatcgattatttttcatcttcaacgaaattttaattttattaattaaagcaaatattccaatgggaaggcttgtagtgtagaattgttttttatttggaagtggttaatattgttagttaatttaattctgtggtggattaatactggtgaagtggagtaatcaatacggtgaaacggatcaacaagtgagcagaaaaatttgtaacgggctaccaatgcatatatgaaccacaactaattaatatgtaagctgcatgtgtttaaattttaataatgtttgatgttataataatgtattatattttatatattattttacatgttataaaataatataaannnnnnnnnnnnnnnnnnnnnnnnnnaagaagaagatgaagagagaaagag

SEQ ID NO: 163087 - DNA, 860 bp, Cannabis sativa
tgtgttgtgaatgagtatgaagaattgggtttcattgatcttcgaatttcgggtggcggtattaggtggagctcaagaagtaggctaatgaaggggaaaatgcctgatgagccttgttatccaaaacttgctttacatgaaggtcaactcttctcttccatggatgattgtatctcagtattttgtggtcctgattgggttttaacttctaggcttagaaatagctatggtggttcaatttgtgatttttccattggtggggatcgtctctttgctctccacagtgaagaaaatgtgtttgatatatgggaaactccacctccaccagtcatatgactttggtttttttcttttcttctggtttaattttttatattctttttgagtgtttttgtttttccttttgtttatctttgacatacatagttgtgccatattgtgagttagagtaatacaaaccatattgtaggtttagaaatacttgaagatatgtataggaaacagagagagtgaaagtgatggcttaactgtaatgtaacttaatcagacttctattattctctacactgtcaaaagactgtattatgagatttgtcattcatgaaaagaaaaagttacaaaatttattactcaaacttgaagaagaagaaaaaaaattgtttcaaattctgttatcctcttattggcatctttgaacaattgcttttcattggtttgctgataagagataagaaagagctcttttaatttttcacttttggactgaaactcagagaacagagaacctagttcactttccttcttttgacctcggctttaccaaagttaatctctctctctctctctctcctgttgttgac

SEQ ID NO: 163088 - DNA, 1771 bp, Cannabis sativa
taagttaaatgaattcatgtgacatcttttaactcttagtcgatttgaaaattgaaaaggccaacttaatccataacagtcacactcaagaatattatttctcaaaaataataaaaatacttttaatttttgagataccacttgttctttatttatattcttcttcttgtaaataatttcattttctctctctctttttttttcactttattttaaagcatactcgtataggaagtttatacgaggcattatttatatagttaaaggtttattatgtatatttttagtttttgccatcattggaacaaaattgtctttaatttacccttatgggaagggaagagcaaagcaaaatcaaccaacgaacccaatgaattttgttttgttgtagtctaagagtaggtgtaagcattaaccaaccaaaccaacctaactgaatattggtttgttttagttttagggtaaaaatatacttggcatagttaacagaaattaattgaagtatataagaatattataattgctgtaaaacacacaatgatttgattgataggggataatcttaaatgcaaagcaaggcctatttgataaatcaactcacctggcaaggcagctaagagctaggccaattttgctgtctttatccaatagtgatgcctcaccaatacaacgtgttcttgaccaagaattttagccaaaaatgacattgacaaactttcatttcacctttcaacgtgagtttttttaaccctttttttgagttctgtggaaaatttggttttgacttttgagttttaagtaaaattaaggagaagacaaaataataagtttcataatatagaatgtttatatatatattataatgtgtatataatgttagtggggaagcattaatagatggcttataatttcacctaaccttttaatgtttttataaatggtaatgattagaagcatgcatggtgagccaccctcaaattttcagtttctatggatatttagaaggattgaatttcatgccaaagtaataataaaggttaataaaaacataaggagtactcaacaaaagtggtcaaattttttcacagtttcagaattttatgggactgaaaaaaaaaaacgtgacttccccttttaatttgagggtggtgtatatatagtaatgtttatgaaacaaataaaaagagtagattaaagtaaatatttggacaattgaaagagtgagaaaagggtgtcacctggctttctcttattggttaatgcaattgatattttatgtttatagtagttttatataagcttttaatttttagctttactaccatcatctctaatggattgttataaaaatagtgttattattttgttttgaacagattccaacaaaattatactccaatacaaatataaaaatgtgtaaaatttgatatatactaaaaattgttataaattttttaccacaaaaataaatattgcgttatggggagactatctgcaatatctttcgggggtatataatcaagaggactttgagctcttcatctgtctgttatggggtatttggacaaacataaacaaagtgtttcatggtgggaaatcacgccttagctcctccataataacctataccactgggttttaccatgatttcagccgagccaaatcatcctccaaaccagtagctgttgcagaaccggtacttactgttaggttttatgccttaaataaaactccatttcaatgtaatctattttattcaacatcaataaag

SEQ ID NO: 163089 - DNA, 3990 bp, Cannabis sativa
aaacagaatttttacatgataataatgaaatatgaagaaaaaagtgtcagaagtgggatttgaacccacgccctctttcgaagaccagaacttgagtctggcgccttagaccactcggccatcctgactttttcttgtcatttgcgtaattatttggtatatatattctcaatttcacgaacagtttttcactagcacggccgtagatcaactttgattaattgattccaatcatgtttagaatacactagagattccttggatgtaatttctactaagtggaagcccatgttagtttctgactaccaacattacgaaacattagtggctgtagagagttgtctatggaaattggttttgggatttagtaatttaggctttttagaaaaataaattgctatattatattattatgcatatataactattatatgtgttcatttttaaagggtaaaattaaaaaatttgagtttttatgcttagttttttaagctaattaaaaaaagggtgtatacatatttggtaccctatgtttaatctaaacacaaatttagtaccctatatttttaataatacttattttgtaccctgtattttaaaaacatacacatttggtaccctaaactcaaaattcttttataaaattttatcaatacaattaaactgtcttcaattttacaaattttagattcaaatttaattatttaattacatataactgagaatcgtttggtcaaattaataaaattatattgattaaattttattttagggtatcaaatatgtattatttcaaaatataaggtactaaataagtattattgataacacaaggtaccaaatgtgttttaagagaaaagatagggtactaaatgagtatattcccttaaaaaaattgagtaatttgtagcataaatactaaagtttaactatcagttataaataaatacttaagtttaattttttgtagtaataatacttaaattatattttaggaactctgtatatacctaacagttaaatgttaagtcattatatccacgtgtcattttcttattagtatatttgaactattttttttaaataataaaaatttaataactttgaccaattaggtattgtcacgtagcaatttatttaaccaggtacctacagaagtttcaaaattataacttaggtattattaccgcaaaaaattaaatttaagtatttatttgcaactgggagttaaacttaggtatttatgccgcaaataactcaaaaaaaattttatatcatatattatgagtttgttccattggctaaaaaaaagtttttcaacaaaataataataataagaagaaaaaattgagtttgacttaaatatttagtgtaaaaagataaatttattttattgtgatgtcttaactatcagtttcgatgtagaaagtgcccaagtggggttatgctctgttgcggttattgtccagtttctctcagtcttcttcctcgtccctttgttttttgcttctctaactactatgctcttcccatgatctcttttaactgcctacctccaattctttctctccatgatctcctttttttcttgtcttctcctatcaacattgtgcctagttatatccagaaccaaagcatctttgctttattcctccatttcttattttctttcttcgattctctgttttccatggattcaatcatcaaggatatgcactcacatttacccttatatgagaaggagagagtggtccacaccctcacttaggctgatcttagtcattcgcatcacgccacaaaattttttattgttgcccgttgtatctcaaatgctattaatcctaaatcctttattaagaaaatggaagaattcaagactaacaaataccgatttaatgttcttattctgaatttcactctgaaatgttcttgttaactcttggttgtgcaggtgataagcatcagattcttgaaggtgaaccatggaacttcaacaacaacctaattattttacactcaccatctgctctacacaatgtctctaaggaagacccgcataaagtccaattctgggtgtaaactcataaactacccttcctcagcaaatctcgtgttctttctaaaaaggttggagaatgggttggtgattatattgatgttcatgaggactctcttcatgagggatggggaccttttatccgaactaaagtttggactgagattcatcaatctcttatgaggggcaaattggttaaccttccacaaattcgagatgaacattggctagagtttcggtatgaaaaattgcccatattttgcttcaggtgtggattattggggcacccttttgaacgttgtgcctctatccttgaattggttgatgatggcattgaccttgaccttccttatggacccgaaatgattggggacaaattaccaaaaatagggtataatcgatatagacatgatttttccaaagtcaatgcctaccctttcttaacccgtctagctgggaaatccatatgctctacctttcctctccttccacgtcccatacacacctcactccttactagtcacgaagataacctacctcaaactcttgagacaccacttaaagaacaaatccgtgaatttccttcaccctttccctcatattaccaatcaaatataccttcatgtgttgctaattttcttccctttacaactataaacacctcttctacaccagactgatccactcatgctgctcccaccactgtcacgacaaactttattgctacttatccaccaactgaccgtcctattggcatctccatttctccttgactggtttccactgctgccattccctctgctgttcacacaactcttatacacaagggtaaatctattgatattaatatttcaacctcttttgctactagttttgaggcagtcattacttcaacaatagccaaaggcaaagctatttaagatgttgattcttatctgcattttgggacaaataataagactttcaaaaggcaagttgacccatataacttttagaaattgttgaaaagatgcagaagtaatattcccagtcgttcaattattgatggtactgtttcttagtgtttctactttagctatggagtctactgagttgttgccatcttctacagcgggtgttgctgatttgcaactctgctcacaaccatgaatatcataagttagaatgctcggggtttggataacccgagggtatttcgctgcttgcgtttgcttgttcgtgagcaaactccccatttgttatttcttatggaaactaaagttgctactggttctctcactagattcaaacattccttacattttagtaatagcttagaggttcctgttgtgggtttaaaaggtggaattatgttgttatggcaagacaatattgatgtatctttgctttctatgaatacaaattattttgattgtatgtgtcctttaataatggccctcggtggcatttcttggttgtctgtggttttcctgagatggttaataagaaacttacttgggccttgattaatagccttgctgatgtttctccgttggacccttggatgttcgttggtgacttgaatgaaatttttctgacactcataagaatggtggacctcttagacaagataatcatatggatgctttttgctccactcttgataaatgtttattatctgagtcccctatactggagatgattttacttgggctaaaaataaaaataatgctaatgctttgaaaaaagactagactagtgcttcactaatcaagtttggtctgatagtctcttactcccatcactcattcaccttgactattatggttcagactactgtgccctcttaatcaatgtctacttcacattgcaactcgatcctattgttagacgcaggtttcgtttttgatttgaaaagatgtggctcaatgactcttgtgttgggttttatgccc

SEQ ID NO: 163090 - DNA, 1291 bp, Cannabis sativa
  modified_base (1236)..(1266): a, c, t, g, unknown or other
ctttggtttggaatataagaaaaacaaaaaaaaatatatggtatgatattgtcaactttgagctaagttctcacgaatttgtttttggttacattttcaaaatgtctgataccaataaaaatattgtccatactataatctttccaatttctagccagtgtagaattttagttgcacacctcaatatctactagaaaaaaaaaagtgtcattttttgttgttaagtatcaaatggatttgccacgttgtaaagaaatgtacacgtggtaaattttattggtccacataatattaataatttgaatactaaaaaaataaatttaaaaaaaaaataaaaaaataattatttttttattttcctttcttctttaacttctttcttatttttttcctttttcttattctcttcttccttctaaaggttgagggtctcattctgtaaaaccctagccaccaccaacccccatcctccttccactttgcagagcctttccgatcaactgccaccatcgatccttcatagccatagtcgatggccatcaaactagataacactacacttgctgccattaaagctcctcctccgtttttgccattaaggcttaaatggccattaagacaaactcatggggtttcaggacatgacaagagatgaggaacttggggttttgggagtctctgagtcttgtggtgagtgcagcaaggattttttaggagatatgaccatgcctgaacaatgaaaaagaagaaaatgggttagggtttggtgtttcagaagaaaaaggggttgggctgatgaggagaaatcatatgcctagacaatattattgtcttgatatatgtgtgtgttattgtcttgaatatatttagtctgacaagagaaatgctcctacttaactaacattctttggttgaataaggacttattttttctttctctcctgtgaagttttgaatatcaagaaataagcttttgatactgagaattagtatggaagggttacagatttgagcttttatttctatgatatgtattgtaattctcgtgtatgttgttgtaaggtagctttgttcaacattattacaagaaatcaatatgtattgaatatatatgtgtttattttttgaatttgatttggtttttgtttattattattagttttttttttttttttgtgatttggatttgaaaactaagctgttacgtgttcgaatatgttttaccatgatctagannnnnnnnnnnnnnnnnnnnnnnnnnnnnnnaatatgaatttctaaaacaatgtta

SEQ ID NO: 163091 - DNA, 1780 bp, Cannabis sativa
aacctggtcttcagtaagtcgacaaagtgcctcagtcgagttaaccttggcctccaaccctttgatgatatcgatcttgtcttaagagctcttgaagtttgatggacatttggttctcaagggcctccttggctcccttggcttccttaagcttctgggcaagggtagagttggaagcttctagcttagctccctgagtcttgaatttctcctccattttcttctcaaaggtcgctttatattcattgtacttttccaagtacttcctatcggccttggcataagcttcagcgcagtattgcttggcctcttggatattcttatcaatcttctccatggcctccttcttgatatccttaatttgggcctctagatttcatcaggtggccaaggaaaggtcccgttggactgccatagagctgacttctctgcaggtctattccgccagaaatgccatctgacataagaggggaagagttagaaagggagcaataacttacaacaagcaaaaaagaaaagtcaattcagaggtaaagataccccagtagcctgttgcatcgaggagttggccagaagtatggaattagtgttgctacctattactcgctttttagtggtcaattcgcacacactgactgttaagtcctccaacaagtcagcgttgaatggtgtcagttccctacccaggcagggcacaagctgttactaagggcaaggaaatccatgattagagtagagtgccttgggttacggatcccctcaattatttcagcccttttcacatctgacagtcggccagtccttgattggacgatgttgcactcctcagtgagatgacattttaaatagatgtccgctttgcgcacttgctccaagatgttggcctctatgtttgtaggtttgagtggaaatttaaatggtagtggaaaaatcttgggcaaacaagtttgggtctctcggatttgttttcccttagcaaggctggccgaagaagtcgaagctaaaattatttgattacttgggttttgttttggtggtttgggttggctaagtttctagcctggttggatttgtgctaaggggttggtggtcacgagaactatctgcttaaaaaatgtggaaatatataatttaaaaagtagtgtgtatggatagaagtataagtttctatctcaaaattaattgaataattggagtagtctataatatcattaagggaacatttgacacgttttgtatttatagtatattgtactatatggttattgtgcaatggtattgtattagttttataaataatatatatatttttaatcatatcatatgtgttactaatctcgatcccacattcctccaactcgaccatgactcttaatcctctctaacccaagacatcagcacagatctaaacctgaacaaaaatcttgacacctggacctagactcggacattgatttcaatcctagtatgatcctttaccacatattttgaccctgacctttgcctcgcacccccacccccacatttccaccctagaccctggaccttaaactcgaactttaactctaacatcaatcttgactcaatcttgactttactacaagacaacatgagttcataaatattacaatataaactacaaaatatttattatatatttaatagtacaatttaatttaataaaatttgtgattgaatatctaatacaatacagaatttaatccaaacatattaatctacttatttaatacaatacaaacataccaaatgtaacttattt

SEQ ID NO: 163092 - DNA, 1958 bp, Cannabis sativa
  modified_base (817)..(831): a, c, t, g, unknown or other
agagagagagagagagagaagtgcggggagagagagaaagagagagaaagcggggagaagaaagagaaagggatgggtgtattttttttttcattttatctctttgtgcacttttattagtgcaatttgagacttttccctcatttaattatgtgatttttaaaaaatatgcttagtaaatttttagaatcaataatatgtaatatttaaatatatatatagatgttggtatatacatatgggttcacggatgggtatgagttaattttaaacctataagacataaaacgtaacttgttacgcttgtttaagatgaaaggtgtaaacccaactcgttactttttacaaatattgattgtaccaggtcttacaagtccgggtctcgcgggtcttggctcaacccttttaaaatgttcagctctatttatggtaaaaatagtataattttacacaacttattaatacaatttaatactaaatatagtattctctaacacgttattgtacaaacgatgtcatttggaaaatatataaaaaaattgttgataataattaagaaaataataaatcaattttcgaagtttgatatgaaaattcttgttaaattttgtgttgttctatgtagtttctttcataccaaatatgagactatttattatttttatttttatttttttcctatatttttcataatttttcttttctcactaaaatctaacttccaaacatagtttaaatataggataaataccattttagaccatgtgttttgcaaaagttataaattggaccctatgttttattaaatgacaaaatnnnnnnnnnnnnnnntaaaatagtacaaataggaccctcaattgattttttgtcaaaataaaatataattataattcgatttaaaagttggttatattaaaaaattgtcaaaaattaagcacagggtcctatttttaccattttgaaaaatacaagatccattttgtcatttaacaaaacagagggtccaatcgacaacttttgcaaaacacaaagtggaaaatagtattacccttaaatatattaagggagattatattcatacccataaaaattataaatacaccccattactaaatttaccccattaaatattcttttttataatcacaccccattttatttaccaaaagggtattgtttagtacaccccgaatattttttatctttcaaattattaaaaataaaacaatccctcaaagaacaggaagacttcgtcctcttagttttccaaatcgttctcctcccccgagtcaagacctcacactagtttgtcgatccaccaccccttctctctactctgccatccctaaccaccactgcctgcaatttatccgagatcaaattaagtttcagtcatcttcttcgcatggtttgaatatgattatgattaagaatggcaaacttttattaaccatatgccgtggtagctagttattagaaattattatataacgttgttgagtaaattccacttataaccagtcccttatacacataaatatccacatcagcctttacaacagaaacaaaacaagttggactcaatcctaggtggcttcgcctctagtggatcaagaaataggagttagttacaactgttattgtaactaactcctagatctatgatcaaccgactctacactaatataaaaagcgggaaatcaaagcaaaacaaagatagattacacagaacacagattagaaatacagagagaagagttagaagatataaaccctagtttgaaggcttctgcaccaagatccagagatgagaaaccagttctcatggtgaggagatagaaggaggaagtacatgcccaaggaaacaaagaaaagagttagatcgagagcaaatcaagtgaaagaacaaaacataaagtgtaaaagaaagaaatcgagcttacctgatcgatttctgt

SEQ ID NO: 163093 - DNA, 1365 bp, Cannabis sativa
atatatatatatacatgcactccaacacatgattatgctcctcgacctaatttaagcttgtcactacagtactacggtatataaataacattattatgttcaaagaaaaaaaaaagtgaatagcttttcctaattgaaactattaattaacaataaaggtacatatatttgttatattgtcaattcataaaaaagaaattatatatagatgggaccaatttggttggactgtgtctcctttttctctcttttatataattgtggttggagagtttaatcaaacataaatataatacacaagaattctaatttaatttgtttaattgaattaataataataataataaaaaaagagtagaaatgggatttgaattttcaaagatggagacaaattaaagggatatatatgttgtacaaaagcaaagagtagagtatgacagtggtaaaatttaagagagagagagagggagtccgtacaagagttggttgtatatagtggaatgcagcgaaaaatgagcatatttaggcagaggggggcagagagtgagaactgcatgtctgcaaaaaatacagaatgtcaaattatttattcatcattacactatcattcattttttctcggtccacgatctttccacgtgtacacatctggtaccatcgatgtgagcgctacagagggcttgtcagccgtcagatctgtgcccccttgttggggggagggctgtgaaggttgaagggaaagcgacgcgtgagagggttacgctgcttttgttttgacaccccacttttatcttgttttcaccgaaaactctctctctctctcttcacactcgtttttttagctcgagatggttttccacaaaagaaagaaaaaaaattctaaagtgaaaattgtacgagttgggcttgtggggggccagcccaaaacaccaagcagttaccaccttttacaaatttttacatctttacaaaatcttttatttggttttctattaacttcattattattttacgaaacctcacaatcaatctatctatatacttatacaaaggagaatatttacaagatattgtggcatcttctatcagttttgttcattgttatttatcttttaaatttttaaattttatttgatttttaattggatttttacatagtatactattttttttatatatattttgttatttttatactactacatagaatttattattttgtttactgtacactttttacactgtaccgtatgaaacttgcatgtatccttgtattgacacctatttaattttatgtcatcttttatatttttttaattaaatttttttttttaaaaaaagttttttatgtgatgttgcttgtca

SEQ ID NO: 163094 - DNA, 1707 bp, Cannabis sativa
tgctattggagattttaatgaaattttttctaacaatgacaaattgggggaagcttgaggcgtgaatcccaaatggaagcctttagaacaacatcggataaatatttcctgcaagaggtgcctttcaatggtgatcctttcacctggactaaaaatcgtactgctctgcagacacttaaagaacgccttaattggtgttttatcaacaaccaatggatgtctcattttctcacgccaactgttgaacatcttgactactaccactcagaccatagagccattgctgttagtttttcctgtaattctctggttgataatccaacaaagagtagaagaagattttgatttgaaaaactatggcttgctaaccctgaaaatgttgaaataatctcaaaaagctggaaccttcattcagatgctgacccgattactgctaaatttgcaaagttggcatattggaaagtatggtaaaatgaagaaaaatataagtactctgcaatcaaaggtggctgatttgaacaactctacttctcgcaccagtgaacacttctaagaattacaaagtacagaagctactcttgaagatttattggagcaagaagaggtatattggcaacaacgatcaagggttgattggctctcttgtggggatcgaaacacaaaaaaatttcatgctaaagcatcatcacagaaatccaacaacaaaatcaagttccaatacaatacttcgggtcaaaaagtacactccaaggaagaaattgtagctattgtccaggcttacttcgctgaaattttcatagccacatccattgacgaagaggcccttaataccactctctcatgcattcctgccatgattagtgaggacttgaatgaatcacttgttaagccgttcacacaggatgaagtttacatagctttacactccataggacctgacaaaagccggagattgatggcatgtcagccatattttattaaaagaattggactgtcgttggtgaactagttacaaaagtagtactaagcatcctcaatgataatgttgatcgttcagctttgaacaagacgatcatcactctgattcccaaggttaagaaacctcaatgtatgcaagaatatcgtccaattagcctctgcaatgtcatatcaaaacttgtcacaaaggtgctagtctcacggttcaatcttgccctccctttggtaatttatgaagcccaaagtgtatttttgccgaaccgcttgatcacacataatgtcttggtggcttttgagttagtacatgctatcaaaaataaaatggcaggacgtaatggtgttgcctccttcaagcttaacatgagtaaagccttcgacagggtagagtggatgttcattgaaaaagttatgagaaaaatggggtttgttgaacgatggatctttttaatcatgtgctgtcttactactaataatttctccttcctcattaacgaagaagttatcggagccttgacaccaacccgaggtcttcggcaaggctgtcctttatccccatatttgttcttgattttctctgagggtctctcaagattgctacaacatgaatagaatacccgcaacctaatgggcttcaaactaacacgtcatgatccaccaatcactcatttgtttttttgttgatgatagccttcttttctgtcaagcaaatgagagtccgtgtcttgctat

SEQ ID NO: 163095 - DNA, 1323 bp, Cannabis sativa
  modified_base (1256)..(1281): a, c, t, g, unknown or other
catgccaagcagaaactcgacgactccgcatcattctttcttgggctcatattcaccatcggcccaactggataaatcggcggctcggggtttcgtagaagagcctcgatggctccgggctccaactccttaaacgagttaagaatgattccctcagcttcacggaatcttttggcgttaccgagaacgagcttgtaagcgtcgttggttcgatcctggagtggatcgaaaagctccgtgcccggaatcggaacacagccgggaagcctgaccggctcggtcagatgtcggtactcacccgacaccgtttcgtcgaggtgaggcatgtggagaaacaaagacaagtccattgcggtggaagtgtagaagatgtagggtgccacgttgaactctcgtgcggcgtggaaggcttcagtgccgaacaggtcgacgaggagtgtgacgcggctgaaacgagagaccaaagactttaaaatggtgcgaagggaggggagtgagcgagtgacggcgagggttaggaaggtgacgaacttggtgtcttttgggagatcgtccatgttgacaggtggcaagtagatgtggtcgacggagtcggaaggaagggactcgagtatggatttctcggtctgagtgggcggtacgtctgttgggatgagaaacgtgacggagaagttgtggtcggtgaccagtcgtctagcgaaatctacaagcgggtttagatgaccaagccctggagatggaagaatcgctatgtgagcctgaggtggatccatatcaattacttattcgtttaattattctacaatgtactactactatattactatactcttaattaatactttgcgatttctgtatcttacttccttctctagatctctatgtatagatatatatatatagagagagagagagagagagaaaacttataatgaaatgtaggtggtttatgtggccaaggttattttacttcatcattgatatatatctctttttgggtcaccgacaagaaatcttcttactacaacgatgatatacaacaaaagaatatgggtccaaattaatgcttatatttaatatatttcaactacttcgtcccctataattaatgaattggcagaagttttaactacaaaagataggaaaatttctcaaataaataagagaactttttttcttgtccacatatttcaactatgtactacagctagctttttcatttagcaaaaacaactacagtagaacctctatttaannnnnnnnnnnnnnnnnnnnnnnnnnaatttgttataaaaaaattaagtcccgatttgggccagttat

SEQ ID NO: 163096 - DNA, 1609 bp, Cannabis sativa
gaaatttgaattggtggggacaatggagtaatgataaaattggacatgttccacattggcattgcaattattgggcattaaaattcgaccgtaaaatatatgaagtaattcttctaaaataggagaacatagatacaatattttgttataagaaaataaaaaccaggcatataaattatgtaagaataattttttgtttatttgtttcgaagttatcatcaaaatatattatatatattttccaaaccgatcaaaatattttattaggtaacatgtaacaggttaagtaacatgttgaacgatgatttattcctctctcttcgggggataattgctttgattttgtttaaaataaagattttcaaagttataaaactctaaatcatgacatcttgaatattgggtatagattctatttctaatatactttatgataggataagataaacatttataaatttgtttattgtatattgtttaataatggagaatggaagcaactacaaacaaccacaaaaagactttccattatgtataacactttttatatcaattaaaccaagtttttcagtcgctgtcaaatgattaaccaaggaatgctataattttggtaaatgtcttaaaaagtgtttgaggatatggacatattcaatattttttaataaatgtttactattagagcgaaaataaatgtaagtaaaattgcctttaagtgttatctttgctatctttactttcattttatcattattattttttatagagtaaataaatttaattatttaaaatatatcaaataataatataatattattttaataatttttagaagtatttgctattagaatattattagaataaaaagtaaaaaaaaataatgtaaaagaaaaataaaatagaataaagtttttagcggttaaacatttcttactatcatcacacttgcacttaattctccaattctaaaagtattaaaatcttccacattactgctagtaaatttaacgtgtcatctatttaatttagttaacagccaacatagacagcttatgtgtacactcttgtacgcgtagtacatttatataggtacaccttctatagttatttaaaaattataaaaaatcatttcaaaacttattttaaaattaaaaaaataatttaaagttataaaattattaaaagataaaaaaaaataataataaaagtaaaaaaactaataattttttttctattctttcttttcttttccatgttgttcttcttaaaactttttttaggttctatatgttacttgattattcgtcattttcataataccaccaccatcaccactcaccaccacacattaccactgccatctatctacatcgaaaccatcactatcgaccaccatgacaacctatttttcacatccaatcacaccaaaataaataaaaaactaaaacaaaaattaaaatccaaaactcatatcaccaaactattaaagcaaattcctcacattattcttagctacttgttgattaataacgcatagtcaaataaatgataatataaatatctatctatatataaatataaaggaatgcacaaagcattctaggtggcatct

SEQ ID NO: 163097 - DNA, 1134 bp, Cannabis sativa
tttttttttcttgggttggggggggggggagtatacatagatagcacctcattgcttttgtttgttatattagagttatttcaatattcttctttgggggctttatgatttaacaaccttcctaccatgaacttacttttctttctttcttcaatgttatttactctttctttcgctcatgcggtcttggtcaataataatggattatattagcttgctagttgcttaacctataacaatttaactagtgctatttccttttaaatccatttcactgctaaaattattacataagctttattttagagaagttttatttgataaaaactaatttcatacaaatacaattttttgtgaattggttaagagcaactccaataagacttcaaatttgaggttgtagtagaaatatcactccaacgtagcatcatttcatcattatatattttatatgcagttttagttacagtagctgcatttttttattgatattttttagttgatttgtatatatattattcaatgttaaaatatattatattatattaatataataataaaatatattttttagtgtaaatttcagtgttatggttgaagtggaaagagtttttgacatcaaatttggtgatagtgtgacaccaaatttagtgtataggttggagatacactagattatgcactaaattggtgtgcaccaaatttcatttattaagagtatctccattggtataccgtttcaccaaatttgtatagaattttcacacgatttcactctatttctacatcattaatggtgttaaattttgcatttacaccaatttggtgttaaacttttttttttttttgcattctagtacatattttaatttattttcaaaatcaatattacaatttaatccttaaattaaaatttatcacaaaagtaataattgatttaaaacactaatgttatctgcatttccggcattggacacgtggactccaggtcagcatccaagacccatcagtgagaccctcagcaaagataaagtggaccaagccaaccttgatattgttgggatttcatgccctagaacccatttcaatctaatcggatttattatcaataaaagattagaagtcatttatgtt

SEQ ID NO: 163098 - DNA, 1355 bp, Cannabis sativa
  modified_base (1267)..(1277): a, c, t, g, unknown or other
acttgccaaaaaaaggattttacacgatctattggagtggacatcgattgcagcatccttagtcaattttgagaggccgggggaggagggatccagtaatatagagccttcctggtgccttgatcatttgttatagagatcaaatcctccaatttggcatctttatattcctgaatcaaatagcagcatgtttccatgagattttggtgttgggaagcaatgcttttttgagtgaatttattcctatgaagccaaactaaccaacacaaataaacaaacaacacaaaatcttcttttgttaatatagtggcaatatgaagagcgactaaatcaaaaattttaacatgagcagaatctttaagaaaggagtataagggtatacctttccaaatcttccagacacagttgtatggtcaatgttttctaacctgtcattgcactacaagccaataggaaaaaaatattttatgaaaattataaaaagtggggaacgtattctttgagacacaataagcaaagaatttcatctcagtaggaaagttgagcgtccaaactgttttccaccaagcaggaggccaggaaggtgatggttcatgacgataggaatctaaggcaaaactaaggtggaaccacacttggcagtataagacccagaggggtatgctaccaaatgagggactcctcaaacggaaacaaaggaagagggatagtaagaatatcattcaccacatccctggagaaataatgggaaagagaggaaaggttccaggtcatgttattgttgataaagtaagcaacctggtttgggaggttacgcatggtggtcacaaacctagtgttaagtatccaataatcattgacatggtcagttttttggccatttcaatcttggatttaagaccatgttttaacagcccctttccccaattaatactttgccactctaaagaaggggcacgcctgacattgctgtccaggaaagaaaagcaaggatgatacctagctgtaaaaaccttgcaacaagggagtttgggtttatgaagagtctctaggctttcttagcaagcataccttgataaaagtgagtgagtgatctgaattttagatcaccatctcgtttggacttacatgttggaattattttaacaggatctagatttactaacaagtatatttttaaaaatcctaatataaatttctaaaacaatgaaaataaacacataataggtatgagaacccttgcagtggttgcagcggaattaaatgnnnnnnnnnnntcagatctctaacccttgtattttctgtagcggagtatcaccaagatctgagctggattctccttcttgttgattgga

SEQ ID NO: 163099 - DNA, 2046 bp, Cannabis sativa
  modified_base (1985)..(1985): a, c, t, g, unknown or other
aaaaaaaaaagctgatgatgctaactttttaagaggttgcattcactgcaaaaaaaaatatgataaggaagttaagtgcacaaggtgggttaggttgagaatttttgctgcaaatacgcaatttttgtttcttttttggtaattacaaagtcaattttgaattatactaaaacatgagatcaaaaatggtaattagctaagacgataaaatgacataaatcctaaattatgtaaaagatacacaaaaaaaaaacaaaaaaaaaaggtaccttcaattgttttgatattgattcatctaaaataatgcatcgggtcaacacaatggaagcaccaaatttctcaatgatagagattggcttagaatgacaaggcattcttaccataatcttcgtgaagaaaaaaaatggatattagttatgtccaaaaattaacaaaataaaaatgaagcataactaatggaaataagaaagctaacctccaaatcatttattttgatctcaaagtgttcattgaaatcttgaacttggaagcatgcagaaaaatcagagctgagagatgaatttgatcttcccagagcatacaattgtttagcatcctctaagacaggattttctgaatcatttctagtcaaaaatattacagatccgacatcaagtacctgaaagtttacagttaaataataaaatacaaagtactaataattaatgttaaaatgaatggaaattgtaaacaaagagtaattggagaagcacatctaattctctttcccaaaacttgtttaatggttgcactcatataaaaaaaaaaaaaaaactagaatattcaaattgtcctagagaaataatggtacacaaaaaccatcattaagcaaaacaaccaaattgaaatcagggataaaagaaatgattagctaccaaaggatcaaagaaatcaccaagttatactgctcacttgctccattttcccaaggaacgtttatgagaatattgttgacagaaatatcccatgagaccttcttatgacttgacaaaatgtagctgcgagagatgaatagcaacgtgccaatatagacaatacaagttaaatttaattgaaggatgatagtattgtcactcaaattatcttaatgataataagctttagagaatcttgagtcttcatataacaatttacaagaacacttactcagctttcgattgcagacgactgtcagcatcttttatcccattcagtgatgacagcacctgtggtagataatgtttacgtatataggaaaagctcatggtcaggaaggtcatgcaaaagcttattatggtgggaaggagatattgacaagtaattatagtttgtcacaagaaattttttggagaaaatcaaaacatatactctttgacaacaatgcaaagagtataattaataaatagaaaaagttcatccaaaagccaaaaactgaatcatctcccaaagaaaacaaaacatccttatagaggaaatttctaataaagcttaccctttcataatgagattcgaaggaattgaatacgtcaaaaaattccataaagtttataagggattctgcatcacaagtaacttcaactggttgaagcaagccctgagttaaaaagtagtaagaataaaacaatcataagcatatgagaccatctccaatggatggtgcatatattttgagttaaatttggcctaaaatatactataaaactatatttgactcaatttttgtatttgtgctccaatgcacaatgtgcaaattagctataaaagtcaatattaccattaatactcattaaaaatatactaaacaattaattttatttatattattttaagatcttataaaaataaaaacttctttcattaatgaatagtattaataagtggcaaagaggtaattaaaaaaagtggtatttattgtgggctaaaatttggcccagccaaatttgacataaattttttttttttttttntgaaaaagagaagagatcctcttgtcttagacaggatcttccccattatatatttgtcaca

SEQ ID NO: 163100 - DNA, 1077 bp, Cannabis sativa
aatttaattaaaaaattctcttacatgctgaaataaataaaacttttactgaaattttgttaagagtgcattgtaaactcattcgtaaatttttacttccttatctaaaaagacaaacacacattttaatgaaagaagtaaaatttgacaaaacaagagaaagtaaacaacacccttttcttttgtttttgtaaatttgtaccctcatcattttgatattgatatttgtttaaatgaaatttttattggggaaaatgaaagattttgtatgtcgatgctataaactattgagaaagaatgaagcttgaatgaaatgtttttgagtttaacaaagttgtataaagtttacttctttatctcatttttggtcatttctaaaaagataaacacacattttaatgtaaatgaactaaaatttgacaaatcaagagaaagtagaaataatagacatagacacaaagaccggcaattaaggtgataaaagtgaggggctttgttattgaatttgccagctgggttttgcatgttgcttcgacagtgtcccatgttagtgggtcagacattatatatttatttatcaaaatgacagatcttccaagttgaaatgttttgtggctaactatgagctcaaagagaataaaagacaaaacaaggccatacttgagcatgtatgttttagtttctcaatgtacacacttgaaaagaaaacaaagaaaagtgaaggaaattataactttcccaatagcataataatatgagtatgagtgagtaaataccattggaaattaggcatgtcaaaaagatccatttagttggagcgggttggagctccgactcgacgaatcatctctgatccgaaacattcggatacttattggatcttggatcagatccgctccgccccgccttatttttttctgaatcggatctgatccgactcgatttcaattaatttaaaaaaaaaaagaaaaaaacttaatttaagactcggatcccttgggacctggactcggactcggacccagactcgaagctacacccggaccgggacccgagacccagacccgaacccggacc

SEQ ID NO: 163101 - DNA, 1737 bp, Cannabis sativa
gaaaacaaattacaactctaccttagttcttagagtagttctggccaccattttcagaatctctctatcagggtcatcacccatcaccacaggagtcttaaatttctctaggaattgcagagttgcttttttggcaatctcaaaaccatcaacaagaactcggggatgcatccctgttagaaggataagaaaaatctatctcaaaccactagagtaaaatgacaaccttaaataacacaagaatatataatataaaaagtctttcgccacaaaattgacactctagcgagaagcaaagacagtagtaggagtatctctttttccctttttggggggagagcggtggtggtgattattacaataagcaataaagcttcaactctccgtatctccgtttctttaagcgcataaccaaaccaaacggtaactaacaccagccattatgtttcaggtgaaaatagtttcactaaccttcatctatataacgctctgattgtttcataagctccccaatgaagatcacagtagaagtggtgccatctccgctaatatcatcttgagcaacggctgtccttgcaatcattattgctgtaggattttgaatttgctgcaacaatgttacaaataaaactatgttattagattgtcaaagccacagaatcaacaaaatactaaccaaacataagtaaagcaaccagcgcgatcatacaaaaactagagcacattaagtgttataaagctcaaactttcgagaaaaaaaaaaataacactatactgaatcgttattgtaaatctgaaagcaatttaccattacaactataaggtactcaatcaggaaaactcggacataagaagttatccagtgataatttactaaaatgtcatttcacagttcgatctaacgaagaatacaaacactagaacacaaaaaacagcctaaagctcaaccgcttaaaagatctaaagctttgcgggtgaaaaaagtggaaaaaattaccatttctttgagcaaagtgttaccatctttggtgagcttgatatcaccggctccaccaacaagcctggaaattatattttacaaatatgaatatcagatgcggaagggaatggaaactagggaagaaaaagaaaaaatatatagagaacaaaactgttttacatcttgatggtgcctttgggaccaagattgctcttgagaacgtcctgtaaacccttggcggcattgatgttcatgtgaagcgccgccgatttgttgaggacctctgcatttgggttaagcacccgaagcgacatcttcgatgggttcgactaagcacggagttagaggagtgaagtgagtgagtgagtgagttttcagagttagaaatgagacagagagctgtcttctctaacttaggaagtgagtttcgacacagagggttttagggctttcctgaacttctcacttttttggttatattactctcgcatttttcctccgtttttgcgcctttctcttccttcctttcgcttaaacgcagcgtttcgatattcaaaatagatctttgttggatggacccggtggtcctcttcctacgcttcaagcccattttatatttgggcttttttttatatataaatgtggaagcttttagggttatttttaaaaagggtttattttataaatatggcttttttgtaagtggtttagaaatatatggagaaataaagaaattttataaaaactggaaaaatgaa

SEQ ID NO: 163102 - DNA, 1980 bp, Cannabis sativa
tggtttagccgccaatatcccgagttattggttaaaggtagtgcatggaggatcgggccatagattctctgcgagtgaaactataagctttggaggcatctataaatgaaaaaaaaacatagttagcacgaaaaactatcgaaaaaatatggacaaaccattgataattaaacaaattatcaaatgcaaaaaagccaaaacaaaaaaaaaaacatcgataaacaaactatcaataacttattgataaataccaaaatgataaaaatgtattaaccatcaataaattatcgataccctattgataaataccaaaatgacaaaataattctgacaaaccaaactccatcgataaaacatagacaacgtgttgataaacctatcgataaagaccaaaataacaaaaaaaaaagtgacaaatcaaaaactgttgatgatatattgacaaagtatggagaaactatcgataactaccaaattgacaaaacctatcgataaatactaaattgacaaagtaattgagacaaagcagaaactattgataaccatagatattgtatcgataaattaacaaaaatgtaccacagaagaccatcgataatatattggcaaagtatcgagaacctatcgataactactaaatttacaaaatagtggtaaataaataaaaatcattgataaactatcaataaagtttcaacatcctatcaataaataccaaattgacaaaataattgaggcaaaccagaaaccatcaataactcatagatattatgtcgataacctatcgataaatacgttttggctagaaaacaccataaccacctccatctaaggtctcaaacaaagacataatccaaaaaaactaaaaatctcacaaaaacgatcacaaatccacatccaaaatcacaagtaatcaaaaggaagttgttcattgttcgttaaaatcattgaagaaaatggtacctttctatttgggctttcggtggtggtgacgctcaaagacgaaggatttgggtcctttggggttttagggcttctgtggtttcttcaccactgagattgaagggaagggggcttccgttagtggcttcgagcaaacagtgagaaagagagggaaaagcgagggagatagagagttctgatttttaatttaaagaggtagaatagggaggggaaataaaattaggcatatattggtataaaattattaggagtctaaagtttgatattgggtaaagttttaagcatcatttatgaaatttccctttgcaaactgatctaatcaaatcgaattgagtcaaccgatccgatctgattcggtggatgcattggattagatcggttccaaccattgaatgccttaactggatttcgatgcgatttgattggatccatccaatcttttttaattttacaattatttaagctgactttcattaatatatatttatattaaacataatttaaaaattctcaaagtaataaaatacaaatctaacatacataataaatattaattaatttagtctaacctaatttttatgatgtcataattcaacaatcgattagatccaactgaatttttaaaattttcatcttatctgatccaattataattggatattggatcggtcggttgtaattagatcagatgactttttgcacactcctactgaatgagtatccagttagttaaataataataataattgttaaagttagcaaaataaaatcttgaacaaagaatctgttttgcaattctgctttctttagggtaaatactattttcgaccctctgttttattaaatgataaaatagaccctgtatttttcaaaattgtacaaataagaccatgaactaattttttatcaaaataaaacttaataataatctgataacgagatgttatgacaaaattagttacattgtttgtatctgttcgtattaaaaattgccttaaagtttgttatattaaaaaa

SEQ ID NO: 163103 - DNA, 1574 bp, Cannabis sativa
ggattttaccatatgattactgttccaaacaaacttaatcaaaatagctattatagaatctcaattcaattgaaagaaactccttgaatctgagattgttcaattcaaatcttatatttcaaacttcacaaaagattaactcaaacctaaagcttaacaagaaatgagagcaaaacagattcaaagaaatgtttttgaaactctaattcaacatatggaacaaaggtctcaatctcagacattggaacaaataattgaatcaatatttgaagctaaacaaatcaaacccattaatcattgaaacaatacactgcaaatttaaagccttaaacaaaaagaacaaaatgcattataactgattaagaacataaacccattaattatcgttgagctaattgatataaaaataactcgaaattatctaatttaccttcaaaaaagtgattaaaaatcatctttaaggagagaaagttctgagaaacgagcataattaatttaaacaaaacccaatgtatctaaatcaaaaaaaaggattaacccaaataaggttttttttagcttaaacagagaaaaaaagaaactcagcttaatcctgtggaatttcaacatctccatctgaaatctcctcctgtaaatccttcgggtcctttccatcaacagagcaaccaacagatacacacgtgccgagaatttccttgacagtaccagcaagttccttagcaatagacctaggcctcatgattttggcgatctcaatcacatcatcgagagaaatgttaccgttatgcttgatgttcttaaccttcttcctgtcacgttcaggctcctttagggctttgatgaccagagcagccgccgacggtacaaccgagaccttagcttgacgattctgaacagtcagtttgactgtgactcttagacccttccagtccttggctgtctccttggctatgtcttctccgatcttctttggggacagacccaaaggaccgatcttgggagcgagagaacttgccgcaccaacctctcctccggtgactctgacgtaaacgtcaaccacctgagaaggatcgaacttgggcggcattttttacgagagagaaagagaaagaaaaagctctgtagattggtatggaggaagggagctagggtttcgaagaagcaaaactatgggaacgaaaatgatagttttatggtagggttttgcagggtatgagtttgtcaaattactattttacccccgttatgttagagggcttttagactgagacgtgtggcttttgggaaattaaatgtaaatgacgaaaatgtacgtgttgttagagatgttaagaaaggaaatgtaggggtgttgttgggctgtaatgttttggattaaagcgtcattttgtatttgtgtggcccaatcttttgctcgttttagaatttaaggcccaataaagaagatttgggcgatctcaaacaatcgttttcattttagggttttttcttgaaattatttcaaaaaaacacaaaagggctatttacaaaaatatgggaaaataaagataagttttgatatatatggcataaaa

SEQ ID NO: 163104 - DNA, 1540 bp, Cannabis sativa
ttttttttgtaaaaaatcggcaaaacgatttatgggcaaggaggaaagagagggaatgagtggtaagggaatgcacgactaagctgtcaattttaattaggtcatagccatcggtttgagctttcgttttctagttcgcgaccttgcatttgagcaaagaggggtatgcgtgcctattttgtgtctcttgattcggttgaatttgcacacctcaatctctaatgcacgcaaaaatgataggggaaaagaaaaggttgagagagaaatgagttaaagggaagaagaatgttttcaataatacggacaatttcgaaatcaatgcaaaaataggcataaattagttagagtatccaattttgagtcacatttaaattaacacccacttttaatcataattatctaaatttacatcttaaatatttatccatattaattaatatgtggtaaattccaaattatacaatttaatgtatatatagaggtttcaataataacaatatataattattttttaggttatagaatgttatttcgtaccattgtttttaattatgttttatgaagttttggattttaagcaatcatcatatatttgacacgtctctttattatggtagttccaattacaataactctaaaaacattgtatttctttaggggagccactataaacctacaatggctttcaataagtcatcatgaaatcccttataattaagtattttaagtagtaacttttataggtattttaaggaaaaaaaaactttaataattgttattgttattaatctaaatccttatcttttggcaggagccaacactttcgttactacaaaattaatatttttggttggtttaaaattttcttattatttatatattttcgtcggttcaaaaaattatttgctatatgaacaccataaaaatacaaaaaatttcaaatgacaatttataaccgacaaaaaataccattttaattaaatgacagttaggcataaatttgttagggtatcgatctaactttgagtcaatatttaatcaacacccacttttaagcataactatccaaatttacatcttaattatttatccatactaattaatatggggtcgtgagatcaaatcatacactacaaaaaacagctacttttactaataatttttcagtcataacataaactttttgtaactaaatatgaattttaatcacaacaaaaagttataaaacatagtatttagattaaattatcactaatttaattttagtcacaataagtatagtgactaaaaacatatttaattacaacaagttgtataattttagtgattaatacaatttagtcacggaccttttagtcataacataagacgattgatatttataattagtcacaattattttacttttaatcacaagtttttttttaatcacgaagaagatacttcattaatcaacaagcaaatacaccctcaaacctcactagaacaaaactgccctcaagccaaaaacaaagagacaaattaattacattgtattcta

SEQ ID NO: 163105 - DNA, 2115 bp, Cannabis sativa
cactatgtatgacttacatttcaaatgtcattttgacaggagttgcaacctgcagattcaaaagactattactaaaaaagacatgaatatgtaatcactaatgtattataagcctttttcagaaagaaaacattatgaatgaccatgccataccttgaacacacggacaagaaaaaatgccactgctccagaaaatcccatgtgaatcatggtaagtgttataggaagtggaaaattgaaatactttggggagagaacccactgcaaagaaattcattcaagtaaagtcttaacaaacataaataaattggtaaaaacacacaaaggtgattgagaaagagagcattaccttgttgtataatataactccagaggaaagcagaatgtagataaataggtaaagataagtcagcagaagcggtttgttgatcatcttggacattctttgctttcacaaactgaccacaaagtattgactcctacccactaaatcaccatttaaggcacatatatataggttccaccctaaagctaagaactaaccaggaatcttgtgttcttatcacttatcgaaatggggaaaaagggagaccatcacctcaataattgacaaatcatcaaatgttgcaatgtctgctccagttcagacatctagaacaggaaaaagtaaaaaaagctgagaatgaaaacgaaattagcaatataaagtgccctaagaagaagcaaagaataacccatatgattcgtcgaaactaatcggcattgttaatgaagttttgacgaattaaccaaatgggtcgttccaagaaacgatttttattagaaaaaaacacaaatttagcaagtgggcagctgagtaaaatcgatctagacaaatatgaatgaaaacccaaatcttgaagaaaaattaagaaagagtaaggaaccgaaccaccaacctcaagctcaagggagatgaatgaatgaagtggttgaaggtcgaatctgagagtgaagaaatagaggaaccgagatccccagcaaagaagactgacacagagagagaaaggtcaaatgagtataggcatgtcatacaatgtaataaatataaatatagtaatttaaatgagattgtgcccttgtgtgggggctatcttttttaattatatatggatggattaagattaagcagagagtaacgtgaggcttggaagaagaaaaagtaagttacttcttaccactgatgaatgatgatgatgatggtgagatcagattcatcagagattaaaggtgtgtattagtgtgtgtaccttctttgtttgtttgttttgttttgttttcattaaagttaaagaaagaaaacgatatacaataaataaaaatagaatcttttacttttaagtttctatttgtgtatgtaaaactctcatctttgcttgttttacttctcttacaatttcttatcctttggcagttggcagttggcaaaaacacttgtttcacattttcctttattattattgttattattggtattattatgggtgattttatagttgggaaagtttatagaacaccctctaatggtgtgttttaatgtttttttttattattatttcaatatttagaggagcttttaatctaataatttttttatgatggcgtttttttttttttgaataattttatgatcgtgtaattatttagagttaaatgtaaatttttagaaattttgaatccaaaaataaatattgtgttgcacttgtgattaattttttatacgcgtggtagcaattggtaactgtttgaactttatttcagtacagtaaattatttataattttctaaaaatttacgaatagtcatatataattataatgtacataataaaaagatgaattaaaaaagttaacctaaatgtcgaaacacccctttgagcaaagagctcaaaaaggaaggatttagagtagaactcgagaaatgagaggataagcgcttaaggagtgttgaaagcaaaaggctgagaacgcacgtagtatagagaggaactaatccacgtgaaccatctgaacagaggagcaacgaaggactaacggtcgttcctacctataaatagaagaccccatcattaaaaaa

SEQ ID NO: 163106 - DNA, 3448 bp, Cannabis sativa
aaagacgagtttagattaggaaacacggcggtgataaccacgctccgccctagatgtgggttagttggattaaataagtaggcacttgaattttacagaaagaaatgtcagagtgtcataattatgtgtctggaacgcttgtgcgtgacagcaattactgcagtcaattacttaaaataaataaataaataaacacagcttaatcaagtaagaaagtaattaataattaactgttcttttttatttatgagtttggagttttaaattaattaattaaattacaaaatgttggatctgcagagtggagcagagaagatggtgggagggcttgcattgggatggggatttttggctttgatcctctagagatgagagaaaagacagtgctcattattgtcgtttattattttaatcttttcttttttcttccccatgttcctcgctcactacttatttattcatacttgatttaatttaccattttggtttataaaatggtgggtttgattcgttttgggatttgtcacattcctaatattaaaattacacttgtattctttgtacaagagagagagagagagacagggagagagagagagagtgaggatgaggaggaagaaggagacttcttttttcttagttttgtactattcacttttattgttactatttttcttcttggattattattattattattggtacagttagctgtcttcttttatatttgttcttttgtagcctttggtctcaattaagggtcttataattaatacacttgcttttaccacattaaaaaaagtaaatgttttacatttgattcgcttgtaaataaattatacaagagctttaatcagcaaataatatggttacttcagtattgggggcgtaccataaaacattgttatttgagaaatgttagaagagacattagtgttttgcaaaacaccatttgaagcaattaagtaccaagctaaaaaaataatgatgataattaaagcgacataactaactactgtgccaagctcaatttatcatgaggtttctcttttaaaaaaactaatgtgccaagctaaataaatgtgccaagggagatagttgggttgggttgggttactaattttcaagtgtatttttatttcttttaaaagtaaagcatttattaacaaaaatggctaccggtgtgaattcatttcattgcttccttgagagggaccataaatatggattgaaatggttatttatttaccttttacaaagagcatttgctgtataatttgatattaataacaatatcacagatttttagtagtataaaaacaccactaatacttcccaacaagtttcgttctcaaattacaaatttaatagtacaaatttgaaatagcaaaatatgtaggtcaatttaaagagggataacttgaaaatacttattttttttgtgtaagttaaccaaaattacaggcaattataactacttttataaggagattgctcaaatatcttgcagcttaaaggtcttgggatcgcacccatgatctctcccttttcccatccctccctcaccactaagttagctttagttagtggcttcccccacattaatattaaagattgaaaattaagtcctacgattgaagaaatgatattatagggacatcaactataaatataagtagaaaagataaaatattaaaaagagagtaaaaattaaaatggctaacttaaagtgggtaccccacgtaatttcctcattattaaagattaattgacaaatgccaatcatttagttacttcaaaaataaatgaaatatctaacgaattagtagcaataatgtatcataaattcaatactatagaagctttaaatatgggcatgagatagatgccatatatgcgcacaaaatgttcaaaaaaaaaaaaaaaacaaacaactggtgaatgtgctaaaaatactaaaagtatgattaaaagcaaccattattgatgatgttattttttttatttctttattaaaataccacaattattgtcttttgagttttaaatagtaatattgtatattgttaactgatgtgatttctctattagttgttattgatggctgtttttgctatatcgtcaatatgcttctattacaaattttgtaagaaaatataattacacaaatgcttattattcactatttttatatcttcctataacagttagactttttatttattgaatttctcattaaaaaaaaaaagcattacccaacaaatttcatatataaactaaaatatttgtacagatgagcattttaaataaaaaatggtaataagttgctaaacttgctattcatgtaacatgttccttttaagtagcgagaattatacttatatatataagaaaaagaattacctaaagccaaacaagaattacctagtcacttctacatgcccttcagttagagaatcatttatcttcgaataaaatctaaattaaattgaagaaactaatttactattatatcattttttttcttctttcattctaaaattccaaactaaaaaagctcactatcttgtgagcatatagtataaaataaataggaatcttgagccatatgagtcacactttatgtaaataaatatataaaaaaaaacagcaaaagccactaagaatatgtttggcttgtatgtacaagtcattctctaccttaagaattttatcatagtcataaaattcataactctctgaaagatagattaaaggtgctaaagcaattgtatccgaaagcattaatttttcttttggctggaaagcattaattttaattgcttttgcctcaagtttctctccttcagtactgtttttctttactctgatagtgataataaggtgtcgcttaagtagaaaaatattaaacatacttggtgtaaaagaacaataagatccatatttgcttttgcttttccttattattatttttttcttacatatacatttatatagcctgtatccttctttttatgaaaagtgaaaaacatatgcaatattttttttttcgattaattatgattgtttattcagcacaattaacaaaataaaataaacataatagtttgataagaattggaaaagcacttggtgttggtgagtcattcattaatcattaataacagatatggatgatacatttataattgctataaaatttgtcggagttagtagatattcctttatttttataattaagtattgagaagctgaatttaatagccattactgatttacctaataaatcagctttttttttgttttgcgaggataataaatcagcttgtacaaccgaggaaatatacattatctattctatataaagtgtgcttatataacagaattcttagttttatgagaaatttatggatgactttttatttatattaaaaataaaataatttat

SEQ ID NO: 163107 - DNA, 2004 bp, Cannabis sativa
aaaaaaaaaaaagaagaagataatggagtccaaacgtgaggggacaaaaggaacacaatccaacacataataagtaaaattgatcaaaacaacgtgttttaagggatgaaaagagctttgggctttgaactttttcaacttagcccaatgttattatttaatttaatttttattttagagtttttttgagtaaagcgaatctttccgcacccacttcccatttcaattttcaactatacacccaaaacgacacaataataaaatacaacccactcttttttgttctaacttctaagctctttccccatctcttaccaaattttcatgctacttttctaatatatacaaaaattatatacaatacatttatgtgagttttcaacaactacgaagtttgggtccacatatgctaaatttggccaagttcatccacatgggtgagatttggggaaaaactatagaaagtaaataagtaatagacgataaagtcattaaaagaagtaaaaaaaagtgacaccaacaaaaatatttaccctttttcatctttataaactcaaaagacacttcctttccctaactaagttcacatgaaaaatacattgaccgaaaaaaaagaatacttatgccaaaaacgaacgttttaatacacagttctcagctttctataacccaaaagaagattctgcttcactaatctctgtaatttatttattttggggttacattttgttcttgataagaacaaatgctgcctaaatcattgccaatttgaatttcttttttttaaaaaaaaaaaaaattaatttcagctttcgagtttccaagttcaaacatgctaaaaatcttgatagctagacttaacagccgaatttaccaatataccctggcaatcacatgacctgcttgttaccccgattgagacattttactccaaagactcgcgaaagtaaattaactgccgacgaagcagaagggcattttagtaatttcacggtaaacaggccatcttctcttctattatctgttaataatacccataaacgatgagaacaacattgtgtcgctttcttcggccgcgaaagtgaattgtgaaaggaggactgatccgtcatttcgctttctgattctctaggccccaattttatgggtccactccactccacaacagtactctcgtctcggtggtgggttagaaaaatggggaccatctcactgagccctcctcctcttagcccccccacccgtactaggctcagaaatttatcactttgctggagggtataatagtaatttcattacatgggccaattaagtaagtaagtaataataatcaacaatgatagtttttctcgtataaaagaaaagataagattaatgagagaggaataaacgggcaagcggcgaggtctctactcgtgtgtgagtcccctctgtgtcagtcaactttgcttgaccagctttatccaaagtaaccaaattattactatttaataataattacttattatcatcataatttgttttccttacttttttttttatttatttactgaagcataaaaggtttggtttcgaagcaatgggacccaaacattgtgatcccatttatttgtctcttaataattccatagtaaaatgtgggtcccaaaaatttcccactcagaagaatatttttcaccgtctgattatcattaataaaaaaagtgagaattgtagtaccaaaagagatatacttttcttaagaaaaaaattgacacgttttattgtgtttttgtctttcgcgtaattatgttacacaaaatttaaatgaatgatattggttgcttcttacagtacacctatcttcgcggtgctggtggtgcgatttttgactatttttttaaatcaattcacacgtacggtttttcaaatttctcaaatcgtacccgcatcacgaaattaaaaacccgcaaaaaatagtacggtgcggtacggtctttgtggtttatgcggtttggactatca

SEQ ID NO: 163108 - DNA, 2045 bp, Cannabis sativa
atttgatagtgagagcgatattttatctgcttcgcatatatcaaagataagtttggttttgtaaaataatattttaaaatatgtttcaatatatagatgaaatttttcattttaatttaatattaagttgtgtattaattaaatttcatatatttacatttttattgaactcatttgataataaacaataaaagtgtgttttttaatgagttaggggtgaaaggatattacagttttattgtctaatttttaagagcaaatttttgcatctcatgatttgacacagtatgtccttcgattaaacgataagttatcctagtttgagaaagtggggccgccaattataaattactacatctacattattatttggggcaattagtttctctattaccatacaagcacattgtattgacttagaagttgactaagaaagataaataactcccattgtgagtaaaagttaagaaattcatctttataaaaaaaaaatattattcataatcattgtgcttaatcaaagatatatttaggatcaaaacaaaaaagaagtaactaataaaaattacaagttactatttaataactttacttgctttgaaaactttggattcaagagtaactcattccttgaaattatatgttttagatcatctttctcaatgtatagtaatgctttaagcccttctcctgcaataacatttacaagtcaccaaatcaaaaaagaaaaataaatgaataattacaacaaaaaattacatgaaatgacaattactgtagaaattagaaactaaaaatatagacctgaattatctctgactttttgattctcttgctttggattccttagcattgttgagtaaacctaattgaaattgaagcatgaaatttttataagaaaatcttggaacttgatctatgattttggcagtctcaattgtccctattcacaatttaaatagatatattcttcaccttgggcttatataaatatatatgtatgcattgaattaatgagtttctccatgaattggaatagccaaacttggaatttgaagattcaatttaatttcacttattattaacataacattattattattattattgacaaattctaagagtcattttataatatcatctaaagattgacggttcctatttctttttttttttttgttggtaatcgagaaaaagtatataatacagagatgatttattgttgattttttttttctttttttgataaaggatttattgttgaattattaagtgtttaaaaaaaattgttatagtggaatgggtaaagggaattagggaagaacaacctatcgccgacatctactacgttacagagttgaatggttaagaaattgacaggtggcaaaagattaaaagtcccttgttataaataaataaataattattaatgaagaccgacttttggttagtttcagattttaatgtctctcacccaagcaacaaactaactttacttcattattactgaaatacccttggtagactgtattattcatgaatcataactatgaagaaaataagttaataaaaaaaaatggaagaaaatgaaaaatttgacaatgcatgcttaggctatgtttggtgggagggagggagggagagtaggatggatggagaggttaaagaggatggagagtaagagggatagagaggattgttaatcttccttgtattgtttggtattaagtgagagtgtgaggtgggaatgatggagaaaaaaattgattattaaaattacaaaattgtcattttaaaaatataattttattatttttttaaggatagttgttgtattttggaaaatgtatttttgtcttttcctacaatcctttcaaatttggagggattaaattttgaaggtttaaagggagaatgcatccctccatcttagggtcggcaaaacggatcagacatgatgacacgactcgaaactcgcacgagagttagcgggtttgggttgctttaaatgggttcgggtcgtgttcgggttgactcgtctaacc

SEQ ID NO: 163109 - DNA, 3093 bp, Cannabis sativa
tttttttttttttaaattttcattacattaaaattatttaagatattgtatactaggttgaatgcctcgtttttgcccttgaattaattatgattgtcattacacactagaggttttgaaatgttaggactaattgataggatttccctgtcaaactggttagaacagtagcaattaagagaataaaatggctgaaaatgtattgatagctaggaattcgagagcttagttctctcccacaaagggttacaaccctaccaaattctccacaccaaacttacactacactccttctatttattctaattccctactgctggtgtatcacttaacatacaccttactaacactcaaacccctccctaaactaaccagctgacttggcaaatacctgttactaatctttattgagaatctagagcaattacaaggtgtaccaaattttctagacacatcttcacagttcacactctaaaaaacaatacaaataatctgatgccctgaaatgaggctactgagatttatttatcctcagccattgcccacgactaactgctctctaaggctacttacaacactgcaacaaataaactaacaaatgtgtaattacatttctatgacatctagaatatgttagcctaataggtggcctaacaggtttgttgaaggaaattgctactttcaactgcatttcgtgcttgagatgactatcattgttcattatgtcatctttcactcgattgttatagttcttaggcatctatttgtgttttttttttcctttcccaagttacctttatattatttgctcccagtttatgttactgtaatttgttaggcaaaattaacaggacacgtgcaacacacacagaggttagagcctgtttggcaactttaattatgtgttctaatggtgacaagttatttatgtaggtttgaattctatgggtcataattagaagtgaagtgcaagttttgaattgagttgtcaagctatcaagttatgtaattgatctgtagaaccgctcggcggtcttgcatttataaaaaacactctactactgatctatctttaaaaactgtataattaatttattataaattagagctactggcaagcgctagccttgtttttctaactaggttatgaatattgattttttttgtttgccgtaatttcatatctttacaaaaagtatattttattagttagtgaggctatgctgtcttgattggaatgtaatgatcattgtattttgttaaaccaccgtgtaggatatttatagaccatgtaaagggaatcaaggtgacttaacaactattattgcagttatatgcactttctcatgtttttgaatgaaacaggaatctgggaaggatagtcaagagaagaaaaagaaccgtatcaaggcacttcttgttgctgccactgattgtgaacctctatatttgatccgattgcttcaggtttccaacttatattatgctgagttttgttgttagttgcttttagtcgttaataagctttaacaaaatttctctgtaggcaaagttgcgaattgggttggcagagcagacacttttagctgctttaggacaagctgcagtatatagtaaacaacactctactccaaaaaatatacattctcctttagaggaggtaagatcatgttattattattattattttttttgtgtaggatcatgttaattatagtcaactgcaccaatgctaacaagaatacactcaaaaatatttttttgttcttttcttttgtttaagttctttataattgtgtgtttatcaggctataaagattgttaaacaagtgtactctgtacttcctgtttatgataaaattattcctgcccttttgggtgatggtgtatggaatcttccaaagacttgtaactttactcctggtattccagttggccctatgttagctaaaccaactaaaggggtttctgagatagtacaaaaatttcagaacacagaatatacatgcgagtacaagtatgatggagaacgagcacaggtgaaactatcaaatacaattggtgattgcacatgctagttataccccatgggcctcatttttcccttttccaaacagatacattacttggaggatggttcggttgagatatatagtcgaaatgcagaacggaatactggaaaatttcctgatgttgttgtcgcagtttcaaggtagaccaatctaatagttttttttagcatgttattatagccaaaactccaactcagttattgaaagaattcaagattagtatcttgatattgatcaattatgtgccaaaactgcatccttttggtacactattggagcacattttttgctaggtgagctatatttgagctttgtatcacttattggtgatgctcatggagttttatattttgcatcatttatgttctatgtaacacttgtaactaggtcttgcctcagttcgtcatttgctaatattttctgtcagcttgcaggttaaagaagtcatctgtaaaatcatttgttttggattgtgaactggttgcttatgaccgtgaaaaacagaaaatacttccctttcaggtttattatctctccatctatctcaaactttctaggaattatgctctgcaagtgtggcagaaatggaagaatgtagtgtgattttctgtttgtaggctaatttatatttcgtcttctttacagaagtatcaatttacagatttttggttttgattattataaatataaaaataaaacaggcgattgtaagttattaattatgataaatatcctttctgcagttgcttcagtgttgtcttgggaggaaataaaagagtgtgttaggatatttgttcaagctaccatgtatttctagtttgctttcaggttttcttgtccaaatataattttttttattgtatgcaagaggtctaatttaacaaagactaattaagattttttcctctgaaccatgacatgtaccaaatcatgctctcgaacttttcaggtcgttaaaaatttcctccgaactattgagattattgaattcaaggatttatgtccaattccgttcaatttt

SEQ ID NO: 163110 - DNA, 1623 bp, Cannabis sativa
  modified_base (322)..(323): a, c, t, g, unknown or other
gatttgaagttctgaatggttttcttgaccaagcttttgcttctatggatggtttcttctaacagcatttgtggctctagtttgatagctaaaagctttgtttctttttgtgttttcagtcttcaagaagggacaaagctctaagctgcttatcttttttgtttcttcaatcttcactcagtgtcgtttccaatatgcagaaaagagagagattgagacagttcaagtttcataagcttacctcacgacaaaggcagtggaaactgtagagaaaaatctctcttctattttggcctcacttcctcctctctctctctctctnnctctctctctctctctcttgtcttcactatggttcttgctatctccctctttagtctcttaaactgaggatggcggtttattatgatatgagagagaggagaaggataaggctttgcttttatgattttgttcaatttgtctaccaaagcagtgaatgtaaaaagaggtaagttcagataatattctgctcgtgcaaaagacatttaagaagagattattgagaatgaaaacctgggaccaaatgtgcatacatgatttgtttttgactatatgctgtataaagtgatgaagcattgattaagatgcaaagctaaaggtaccatgttaataatatttggtttaaaggttgtgaaagcataatattatagtcacctttgtgttcaaccataattcagattttattacccgttttattctgaactgtgggacccaagggccctatccctttgttaaagagctctgtcttacagttgttatgaggaagagagctctatctaaccatgtgaagtataaggtcaatgagaagggttaaaactactttttaataccttataatcatatcatggttaagtactggacaatctctcatctgtgaactaagataaaaaaaaaaaaaaaatctgggaagctgcctgtcaaagcaatcaagtaagccacatgggaattataaggtcaacatcatatggcaacactccagtttctcagtgtttttgtaatatcaaagtcaatcaatatatctcgtgaaaacaatgatcttgtttagtgaaaagaggaaaagaggaaaagttaagagtgaagtaagaagcttggtgcatttataagaattaacaacatggtccccgaagtgggaagaggtaggtaccagagctttgttgattggcacaataaagcccaatcagatttatgaacatttaagtcactttcgaatagtagctgtgttaaaagtttctgaactactcaaatgttatttacttgaaaatgtaaatcaattgcaaatttcagagcaaaggcaaataatgtttttgcctctttgaataactgatgggaccagatagtgacttcaaatccccatgttaggaatcctcattcatgatcacgagcataattaaaggactggatttagccttggaaactcccaaacctcatgccaaattccaatgttaggccccccactaaatcaaataagacaagggtttgatcactgcattattgcatgtaggatatgccactctcaactttgtaaggcatttgttcacattaaaaaaaaaaaaaaaaaaaaaaaaaaaactttttaaaact

SEQ ID NO: 163111 - DNA, 3697 bp, Cannabis sativa
gcaggctgagtatgagctatctgaaggaggcagttccagaaacaaactgaacatggataatgagtaagcttgagattctttattgctgatgcatttgctttagtacttcaacagttgatttagttttaattgattgcatgttcatatgagatgttgaatccagctgcattcttcgaagggaagctttgattcattagtttgtttttcattaactagcgagatcactttgaagttggaagtgggactgtgggaggttcctaaatcacacaagttaggagtgaaatatgcaattatagttgatgctcattagtttttgtttttttttctaaaagagcttttatttttatttggttaaagacatgattaagttctccttttcagaaattggtttgttgtatctgctggttcaatctaatagaacataatgttagcattctagttgaggaaaaaaaaacttatctttgattttgatgcttatctttggtccagacattgttgattattgtttaaatattgttcatgctttggactgggttgtccttgttatcttatgtgttttattttatcagccttcccttttcctactagtggagctgttttgttttctttcatgttattaatatttttcattcaaagtttgaagaataatattttcttatgaaatttagtgtaaatcttgtgaaaaattgtgttgtggaaggatcaatctggaaggacatcgacctagagttaggcggtatgcacatggattgaaaaagctgataagaatcgggcaaggtccagatgcacttttgcgtcagtcctcacacttggctgctagtgctgggacagatggattctttgacagggaggtcggtgacgtgatcgaggcacatgaatggaaatgtgttcgcacagttaatggtatcatttcttagccttttaaagcatacatgatagaccaagcctagataaagggttgatggatttttgttctcttgattggtggctgtcttttagattacctacaggttgccaagcttactgctcattgataataatgagagcattaaggttgttaaaagttgttcctatcttgtaacctcaattttgtagctaaaattattttatggaattgtaaagatagggagcaggataaatggtcaaaaataaaggtttactatttttgtgatgcaattaatgtcctgaattttactgagattcatctttctcttgctgaaagtagcatgcagaaaaggtactaggacgtgtgcttgaaacttgaagcttttttttttggtgttattggggtttcattttgggaaacacagattatatatatatatatatatttttttttataataacctcaaaaatctagaagaatcattacaatagcatgatcgagggtattttaaaagagaagtattaagtacttttgatcatcaagttgctttatctttttgagtctcaaacaatgaagatgctttctgcaatttaatattactttgagttacttggccttattgataattttcttcttacttccaggtgtaagaatttttgaagatgttgctgtctcccaggtatcatctctcatgttattctttacattcaacggagctgcttgaaccctagatccatgttcttcttacttataattttgtaaattaaaagaagtcaacattgtgtgcctgtttgtagaatgagaaaaatgttcttgtgaagtctgctgctgttttagatgctagtgcagacactgcttttgaagtgattttaaaccttgaccgacaccagagatatgagtaagttgatttgattactggatgcttgataaaattaacttcacctaataatttcatatttacaggtgggatatgctgacaggagatttggagctgatcgattcttttgatggacacattgatgttgtgtatggaacatatgatccgaaatatctgacacggtaatgttgataaatatgatcatggtttctgtatacttattgattggctgatcagttagatggttgttttgaccggtggatacattggcctctgttccttttgttttgtttttacaacataaattaacttctatttgattattccacaggtggcattctaaaagagactttgttttctctaggcaatggtttcgtggacaagatggaacatatagtaaggggatttgactatcatgaatattttagcttgaatggtttcttgtattttctttcttttctaaaaaaaagtaattaacatttaattggccactctattgatgtcaagcacttgcaggccaccatttaagaattcattaagtttctcaatcggggtattatattcaatttggcaagtttccccttagaatatagggattttgtgggtcctctagtttcaaactgaataatttgagaaattaaattttgacaaccattgatattgtatttgaaatgtaaggcttactttgggaacagattctttctgcctatgctattgcattcttctaggaagaaatatgaaatggaaaatgaagaaaaattaatgtaattgaaactataggtttgtaaaggaacctaggtgacatgattcaaaagttaaattacttttaatggcttcaaaaactgtattgttcagttcaatggcatgtttgatgacttaatgccaatatcaattggaaaatgcattaacatatggtaatacctgacattggtgaatggaaagatcctgacgttggtaattcctgacattggtgcattaacatatagtattctttttatatctgtgtagagagtggacaacacttctttagacatttttatcatttcaggtgctgttttattagcccctaaggagaattttttatcggtatttttctttttgcttttcctttttgaacaccacggttttcttctgccacaagtgagggtttctatacataacggggggaggtcagtctaagacaaaggcctctttctcttttcaaaaaaaaaaaaaaatggaaagaatctcttttactgtatttcatcataacagaggatgttgtttggaagccttcatatttggctgatatatgttaccatactttaatgcagcaatcttacaagtacctgctgtaaataagaagaagcctcccaaatctggatatcgtcgcacaaaaattaatcgtaagatatttgatttttctctattgggaaccttagtagtatacaatttctcaaccaaaaaaaatgacttattattgttttctattggttactactaacatgcctgcctttttatccttttactactatattatactttggctatagcatcaacttgggagattagagacttgaacacatcaatgggttcaaatgctcctaaatgtcttgtgactcaaatgttagagataccttcagctggctggttcaaatggaagaaaagtcacttctcaaagtttgaaaaaagtgtgccttatgcattactaggccaattggcaggttagagatgttatttatattaactgaaccaattttcctttaatttttctgcacattatagttatcaaatgtttagcatagcatgaccttaatcagaaattcaaaatccagtacagaactcatttattttcccaccattgatcctaggggtgttcacggagtggtttggtccgaattttcattatttttgaaccaaaccagtataacagtttttcgaatattagaaaccaa

SEQ ID NO: 163112 - DNA, 1600 bp, Cannabis sativa
ttttataatttttcagattttattcgtagaaattactgtttttttatgtttttatgttatttttatttttttatttttgttattttatatattattttgatgttgattgaatgttattttttttattacttttatgtgatttttttgttgttttcgtaatgtttttaatgaactccataaaaatgtaaaaaaaatatttgattgtaaaagagtaaaatttttgtaaactcctcaatctgagtatttcacttaaaccaaattgaaaaacttgaccaaaatttaatcattgtcaatgaactcgaactaatccaactactgaagaattgacatgtgacatcttaacgagcaactaatggagtaactagagtgtgtaacaataaaactatttatttttaaaatttatgtatttatatcgttatttttaattttgatatttattagtaactaatctaacaatttaagtatttatcttgcaaaattctcgtcattttgatgtaaaagttttctttaatttatttgattcaaaattcaatgtgattgatgatctgtgttcagtcaaatttaatgctttattaaaatgaattgcaacaaatgttaataatacttttttttttttatatatatatatactttctccaatggatgaatgatgtgtgtatttttatcaataatttatagtataaataattatataatatagacgtgaccacatgccattcatggacgaaaaatagtgttaaagaaagagcattgttattggacagatttataagtattaatttttgattagtcaacgatattctttaaaagttatttttttaaattatataaaacatactatttaattacaccaataacaatataacagtaaaaaaaaatattagacaccaatagtacctttagcgattttcttaaagaaagtataatatgaaaatttcattagcctctgaaaaagtttcaagtgctattatcctcttaaaaagtttcaatgatacaaatattattaataatgccaaaatggaaaattagataataaaacttacattacttaatcggagattgttctattatattatctattgaaagtggatagttgtctactttatagaactaattaattaggttggaatttgggatgataagataaagatggaattaatataggtttagcctttaggtggtcatagagatgttacggtagtgcttagagtagagaataataataataataataattgaagaagtgaaaccaaatatcttaatagatatatcatgtcggcaaacatttgaccgtacacgtgtcactccattattcatggaaagcacacatatatagaatagattttattatgtattatgaggaccacattttcttgaatcacacgccttaaaaggaaagatatttgcaaattaattttgagaaaattacattgtatatctatttatattctttgagatatatttatttttgtagatgttatctctatcatatcccttaagttaatgaaaattaggtgttagagttaagtgaaaggtgagggtatattaggcaacccactcacaaaaatagatatattttaatggaatataatatgaagat

SEQ ID NO: 163113 - DNA, 3824 bp, Cannabis sativa
atatttattattactaaaacaagtatatttgcgttggcgaatgtttagtgcagatattacactaataatagtgcactagtagcagccatgtccaagagcaaaaatctgcatcctgccattaagtttttaagttaacacacttgcttccacaaagaggagaacaatatgaatcttattaaaactaaagactacacaaacttcagttcatcgttctaactctatgatttaattttaagattggtacttctatgttatgtatgattggaaaagaaatgaaagccggaggtgtacaaaaaaatgaaggtacaaataaatgttatgtaagagagccgccagcacagacataccagaacaaatataagccatttgaagcaaatgaatcaggctccaacttgatataaaggagaaaattttcgatcttcatctgatttgttctcttcaatctttgaattgcataggtctagataaaccttgaatcttcatcatacaattatactttgtaggcgcaattataccagtctttgtgcatagatcaacaacagccggggcatgtccataaaaatcgctgccttcatttaaaagcacaggaggatcctgaggccttcgccgccacacaatttttggaggcactaaatcatttacttctgctttcttccagatatgtgttcctcgccaactttcatacttaaacactccacaattcctagccaaatgaccagatggcccaatatgtacttcagaacaatgtttgcagactttagctggatagaccaacaacaacctctgtacaccttctctaagagtttcccatgcatgcaaagtagttttagctattgatttcagttcttgaatagacatatactcaactccatcagcatctgcaacacaagagttaccatttgaatcaggagtgttggtcagtgagcattgatgatttgggtcggctcctgcttgccagcataactcaacaactgcaggaacacgttcaaggtcgaacctttcactgtgtttaacaatactctggaacatgtgttgtaagtgaaatgcctctactgtaacgagaatatctttcagaccaccaactatccattcatgaacttgttttttgccaaaacgtttaggaccacagcaggtctggattaagtggcctacctcaccaatatagacctcaggacaaaacctgccagcgttcaattaacaaagtaaaaattagaactcaggacttgtttcatatgaaaactggaacatattcaagctttcatttccataacatcttcaaaataagcaaacacaagccaatataatttgcaagaggagttttagacaagttcaatcaagaatatacaaaatgtggtatctaaggatgtgatcaaatgtgcaaaatgatgatgtgtgaaattagtaagaaaagaaaataaaaatctaaaacaagtaatattcaatcaaatagagaataaaaggaaaacaaatgggtccatttagattgaaaacgttgagcataataaggttgtgttaaatacttgcaggaaacaattgggatcactttgagaagagcagagacaccctgaataaggaccctcctggagttgaggacctcctctgccactggaatcattccccggatcgggtaatccttagcccggctttcgattctcttctgtatcatgggtcggatatccactaaattcttctttgcggtattgtaagacctccattgaaactcctcccacaataatatattgattttgctacacacattcgaactcaaaaccttcctcagcgccataaatagaaaaaatggccaaatatcgcttaggttcttcaagattaaccgatcagtaatacttcaaatccttttaatacacttctgtcagtagccgtaaagataatcacacggagagcacataatccattttctcacctaaaacacttctttaacaaagcttccctggaaatgataactcaatattcagattggagcagactgtaaaaccctaatccataaccctcttcaaataagccacgaaaattccaaaagaaaaaaatgaaatcagtgaagcgcatctcactgggaaccttatcagcatcaattgggatctcaaaaagaaggaaaaaacaaccctgagtttcgcttcattttgtgagcaaccagcgataagattaacacgcaaaaacactagaaatttgatagaatcgaagccactttaccatatagaaaagagatgaaggtcggagcaagcacctgtaaccctagagaagaagtagaggcaaagtacaccgccaaatccccttcccctatagacgatggaagaatgaaaaataaatttaatttaacattctacataatcattccctatgttaaaccatctctcggtaaaaaaaaacactataaatttagcacagcaaaattactaaataacataagaatgagaatttactccacatactaatttcttaattttttttttcaaatttacagtttcgatttttaaagtagcttctacagtagtttctatgtaaagtactatacgatttttagttgtaatttaggttactccgttagttgcaataggaatttttatatagaattccgtaaaagaaaaactattttaaaatgtaaaaatgaaaaagtcccaaaaaattatgttccaatatataataaataataatacaaattaacataaacaataatgatcaacaatgataattgttgttgacagtaagaactcgtcaactaacttgttggtcgaaaaattaaattatgcttcaagcttagatctaagatgaaaagaaagatgaaatataaattcaaattgctattttaaaatgaagagaaaatgataaaatttctattactttcaaagtcaagttacaagaatgatgttccaaccccttctcacaccttaaaaagggatatttataggctctaatggcctaaaatacaaggtggtcccaaagggacagtgtgtcgcttttaggatgcatgtcgcatgtgcatgagatgatcgtgcaccttgtatcgttctctggtgtcaggtggtccccatatgcaaaggtggtccccgaatgcaaaggtggttcctggtgcagaggtggtccacggttgcagaggtaatggctgcagtgtacctttagtcagttccacaaatcttgctaatgcactccctccactactcatacctccttactctcaaagcttgcaggtggcgtggtggtacgtttgtctcttgcacgccttatcctttgatccccattcaacgacattctcgtcagcatgcatttggatgaatgtcaacatccatgacacatgcacgttacgctactcactcgttgtaacacaactcacatccgtgcataccacggctcgcatgcgagccccccacttacacaacacacacacacacatgcatgcactctacatcactgctcgcatgtgagcccccgaagctcacaacatgcacacacgcatgcactcaacatgctcacgcacacaacaccacggctcgcatgtgagcccccacatgggctcccatgtgagcccccgaggctcataacacacgcacccgcaacacaacacacacatgcccagcttgcatgcgagccccccttcggaatacacgcacaccgcacacacacacacaccatgcaatagctcacatgtgagcccccacatgggctcgcatgaaagttcctaacctaggcatgcacacaagacgttcatattagaatatattttaccagtacctagatttactaacaagtatgtttttaacatcctaaatatgaatctctaaaacgatcaaaattaaacacatataaagtat

SEQ ID NO: 163114 - DNA, 1544 bp, Cannabis sativa
tggtacttcgatagtggagcatccaatcatgtgacttctgattcctccaatctgcaacaacaagctccctacaaaggtaaagagcaactgattgtaggtaatggctcatctcactctattaaaaatgttggttctagttctatagcagctagtaaacccctctatctcaaaaatatattacattttccctcttaatctcatcagcatatcaaaatttactcgtgataatgatgttagtgtagagtttaactctgattgttgttgtgttaaggacaatcaatccaagatccctcttctttagggaacaattaacaatggcctttacaaggtgcccactaatgttgctccttaagaattcaagcacttagttgtgaatcccacctccacggcatttcagtgtcaaaccagtgacaactctcatgccttttctcataccagaataaatgtttataataaaaatacttctcttgtaaacttgtggcactaaagattgggccacccttctcaacatgttatgaataaagttttgaattcaatacatatatctcctacatctattaatgtgtgtcattcttgtcaatatggtaaattgcattaatttactttcttatcttcactacacaagactacttccccatttgaaatcattcatgccgatatatggggtccttccccttatcccactagtgaagattttaagtactacatatgcttcatagatgattatacaaaatatacttggagttttcctcttaaatccaaatctgacacaacctcaaccttcttgcaatttaatgcctatgttgaaagaaatttttctaccaaaataaagagtgttcaatcagattgggggggagagtttagacctttagcccctattcttgccaaattaggcatcattttttagacacccttgtcctcatactcaccaacaacaaggtagagctgaaagaaaacaccgacatgtcactgaaatggttctcacccttcttgcacaagccaaaatgccacttaaccattggtgggatgcctttgtctcagccacatacctcataaataggctacctattcaaaaaaataaatatatctctccctttgaaagcttgctaaacaaaacacctgattacacttttttaaaagtgtttgggtgtgcttgcttcccttttcttagaccttacagcaaacacaagttcaatttcaagactactatgtgtgtctttcttggctatagtccatctcacaaaggatataggtgtctccatccttcgagaagaatttatattattcgaagtgttaattttgatgaaagtatttttccatataattcattgttcccttatgttccctctgtccaacattctacaccatctatcacggctgtcccatttcctgacttaaacccgaaccccattaccccatataacaccactaccacaaacattacaacacctccaataacccaatcaggaaccaggtcctcaggctattggaattattttaccaggatctagatttaataccaagtatgtttgattaacatccta

SEQ ID NO: 163115 - DNA, 2640 bp, Cannabis sativa
  modified_base (2586)..(2590): a, c, t, g, unknown or other
gagagagagagagagaatgtttggaatgttgggaatgtttggaatttttggtttttagaccattttacctctacgtttgtagtttacttcatggtgaagtaagcataaataagtcatttaccctttcctctctctcttgttcggccaccttctagagcaaaaggggattagattttctcatcaaattcaaggggtttagctaggaaaattcatagattttagaagattaagctcaaggtaagcttcctcttcttcatctctttgaatttcaagttttgggattaggtttttccatgcaatttctggagtttagttgttgtatgtttttaggatgctcagagtgtttttttgaagttatgtttgaatttattaggttgtttggtggctgttttgatggttgtagttgagtttgagctaagtttgagattttgagctcaaacttaggtcgttaatgatgaattttgtttcaggggcctagacctgtttttattgcttgatttatctttgttgtgactcaactagatattttagagcttgtggtaaagtttggggttgatttggagtggttataagagtctttatttttctacagtgaaaaacgacaggtcgtttttgaagaaacggcctgccatttattggtgaaaaacccagaaaaaatggcacgtcatttttatagaaacgacttaccgtttttcagtcagtttctctatttagttgcttttctcgtgtttcctcgatatttagggctttgtcatgctatttatcgataggaaaatttttagttttgagtctaagtccccaaaaagtgatttagcatatcacttatcagttttaagtatgttgtgacataggggcctataaatcgtcgagcagcggttacacttaggttaatcggcacgcctgaattcagaatcgaggtaagattagtataatgatatgcatatgtgattacatgtttagcgtgcatgtttataatacctgttagataacatattgaaattgcagtatcaatctacatagagttatattagatactgatgaatgtatgtttggcataagtactaattaacgctatcacatcggtacgagtagagtaccaattataggtcgatatggtcaatagtactatcgtacgaatgttttagactcagtatgcgtgggatgcatgatagtattatgattgagtgtatgggcgcctagttatgatccggtttaagttatgatataattatacttttcttactgattctgccaactcacagttattgtttatatgtgtaggtaagggaaaagttaaggctgggcagcagtaagtgcgagtagatgaagattgcacatatcaggacggttaaacctagagcgttcggtcttcaggccaacaagctttattttgacagtcactaggtgacaacttttgtagctttatgttttgtaaacagttgtaacttcttaaatacgagatcccaatttatttaaagtttattttattttaaataaaaggttaaataagtaaattttaattaaacatgttttctaacaaatctattgattagcaatggattgcacagataactttaaatcccgataacacgcctaacctagtaaggtgttacacttcatatcctacactaaattgatttcctaattttgataagtagctttctctcaagtagaacctcaatcatatgctgaagcttctcaattcaaacattggttagtggccatagacaatgaaactaaggcccttgagaaaaaacaaaacatgattaccactacggcacaaagtcattcgatgtaaatgggtgtacaaagtcaaatacaaacaaaatggggaggcagagtgatttaaagcccctttaatggccaaaggatacaaccaaagacgcggcatagattattcacaaacatatgctcttgtagcttaattcaatacaataaaaatcttgcttgcactagctgcaatgtataactataaagtccaccaacttgacataaatgatgcattcttccaaggggatcttcatgaggaagtgtatatgaaaattctcccaggctataaagctccaccaaacttagtttacaaataaaaaaaaaaaaaaaaaagagcatatatacaggcctccggacagtggtatgataaactcagtaccactttatatgctaaaggcttccattagtccttctcccataactcattgttcataaaaagaacaccaaccatttatttgggtattttagtttatgtcgagatattattgtggccagtaacaataactctgccattatacacttaaaacaattccttgataaaaaatttaaacataaagacattggttctcttcatttttttctaggccttgaaataggcaaaacaaaataaggtatttccctttctcaggaccatttaccttacagttgcttagtgatactggttatatgggaggcaaacgagcttccacacctttggaacccaatcttaaactaagcaaacacaaatgaaaactgattttagatcccacatcttatagaagcttgattggaaaactcatatgtctgaccattacaatgttaggttttatgccctannnnnaactccatttcaatgtaatctattttattcaacatcaataaagaaacaga

SEQ ID NO: 163116 - DNA, 1852 bp, Cannabis sativa
aaataacaaaatattatagattatattctggatgtatatataattttacactcaaaatttaacaaaacacactgcaataaaatttagagtattgtagctacatttatttatttatttatttatttttttgagaaaaccttctttttttgagaaaaccttctcaaccaccaaacatcaagaacaacaaacgcactataaaagtgaggcgaaaatttattcaaaaataagattcgttattaataagttctgaatataagtagaatttcctgacaactaaactacgcattttatagctgtcaaagcaagttaatttagccaaagtataagcaatactacaagatctattacaatataaaaattaatatttaactttttttttagctctcagctatatttttacatttgtagttattttatattaactatatattgtgagtgctctaatacaatcctgaatgaatgagaagatacaatagatacgtgtgagtagaaagatgtatgagattttatttttaaaactaattaattaacaatgaaataagtgatgcatctagcttatatgtaatttttaattctcacatgtattatcaatatgtttaattatttgagaaaaaatattaaaaagaggttttgccaacatgtttattatggttagctaattttttagggaatataattatagtaataaacacattagtgaagattttctttttcttaattgcactaattaataaaagttttttttattatttgaaataagtaactagattaatcctcaactcaaaactctatcataggctttggatgtatataattaaataagcaatgagatatttgtgtaaatatatgatatatatataagcatatagccatataaatatatttattattctagttatattgaatactatatatacaacaaattatacacatatatctctcaaaacaaaaccatgggaagttgacagtcaatgcttttaagtgaaaagctaataatatatgtactatatttacattaaatgttgtacaatgttagatacgttttatcaaataaagaaatcacatgttttaaattatataattaacagagtacaaatacaatatatatatatatgatataatttagttttcttaaataaaaatattgtggtcaccactaattaatttattatgtttggtaggtacgcagataaaataaaataaaataaaaaaacgtgtacgtgatcgtattcctttcctaatttttttatttatttatttaattaacatcagaactaatatgtacagaagctatatatacagttgtaaacatttatttataccattttttttgctggattcaaaaattggattgagtggtctgagtttcattttatatttatgttactgtttgatgtatataattgttccctgacctgaccctactgaaaatagcagtttcatcatatatccataatatataattatatatatatatatcttagcaaaaaattataaatattgtatttttattattattattattttttagtcgtacggtttgataagatcaacttttggggaaattaatcatgaaaaaactgaattattatatatgtaccatgcaccatccaattcccaaattacatatagtgcctaatttgtaaattttgtgtatgtatcctcaaatttattcacattccattaagactttttcttcttttgtagtataataaaggtttgtctttccacttgaaaaaaaaaacacttaaatagttattagtgttgtgagtaatttattatagtataaatatttaagtttaattaattaatttttaattgcatataaatttttaaatttaatttttaatgg

SEQ ID NO: 163117 - DNA, 3738 bp, Cannabis sativa
  modified_base (3704)..(3706): a, c, t, g, unknown or other
ctttcttggatctttctagaaatttccctcttgaggtttccgtggaggctttctataatggatcatattgcatgtttctttatgcacattttctcgaccatccaccaaactggagtactcggtataccttgcttcatactatttcttggcttctttgaaactttgactctgtcccgaacactttcttcctctcttgttttgagactggttcacattattctctagaatttttgctttgaatatccaggagtggaattgcatctggtctgtgtcactccatacctagagaaatgggtttgtgtgggggctatcagtgatgctgatggtccataaatagtcagggtatactgagtgccaagagcaataactggaggagtaaatctgggagtggaggtaacgagagctggtgctagaggaacacaaaagtcttgttgataagaatcttaaaaactcataaagccttgtgccttagacataaacttggacaatgtctcgaccctccttttttgcatttctccctataacaaagaacctactgcgagttcagattgtaggaccacgattttcatgtcattggtcacctttgccttggattctgcttctatcattcattcaatgaagcattttaggctttctcccaccttttttttttatgttggtgatggatcccatcttcaagtcatagtcacagtgtgctataaatatctttaagaagatagaccgcaaatccatccatgaatggatcgagctaggagccaatcttttccacctatcataagtagacttggtgagggccaaggaaaaatataaacacttaggatcgtcactcactttggctacttccatcatcttgttacacctatatatgtgagttttgggatccctacacccatcatacaactcgattttaggcattttgaagtgcactgtgagtggagcttccatgatcctcctaatgcaaggctttaaatttagaatcaatgggggccccactttgcttttggaccaactttgttaaggcagctatttgctcctccaaccttttagtgtcacttttcgaaacatcaattccacggaccttgtcattcaagttgttcctgtggtcattaccatgtggcctctgcttctcacttttttctttctcatacatggcatctaaacatcttttaagatccacagcggaccaacagtcattagaatattgtcccccatcccaccgtcctagtttactgaatcccaggggcagtttttccttcccttgggttttggtatgttcgtaccagccccttttggtgtcacatggcctttctaggtagaagggcttccaagctagaaggtgttggctaccttttgggcctgagaaggcctgttgacatgatttgcatttcgccaaggaggttgacgagcatgtggattctttgagtcacattcttttgccttccccttgtcctattgaggagcggaggttccagcattagggggttttccctcatgtttcctctgacgcactccaccaaggggtcatgttagaatcttcctcatctagatctccaaatttggctcaaaggtcagccatcatattctccatcttatgggaaaacttctcttgatgagctaaattctttctagtctcaagcaactttttagacattcataccactttgagatcttactcataataatagctgtctttatagtatctatcatgggcgtaatcttcatcgtcttcttcctcttcattgttctcagcatccctgtcatcatagatgtggtcacgttggttttttgggttttccccttgatcgttcacattagatatatcgctacttctcgtatccctcgactgcgcgcgctcaggtaaaagggggtttacgacctccatgactgtcttgaggccaccttgtagagtcttcttcagaaatgtctttcgtgtgaataccatgacagtagcagtgctttacgtctttcttcagttcttaatgaaagtaccaaaatgtttaccatattttttgaaaactatatatttaggagctaatgaaataataacttagaaaagtaaagagatgatgaatttttacgtggttgaggtgttaataaaccttaatccacgagtcagtctattatcctctaagggcgatatagatttgcttacagtatttaagtaggaaaccctatctatctactttaacattctcttgaagaagaagaagaccaaacacaatatttgtagatttttagctattgaggttttgatgcccgcttcgtatgagaagttaggggtatttataggctatgtggcaggtatggataggcacgtgacccgcctaaggtatctgatctaatcccactaatggggtaaattacatgcaatgttagagctaactgaaggatctgtggagaacattatgtatgtgcgtgtaggagctggataatggggaccattttttactacgttgacacgtgtagcacaaagattcaacctttaaaagtaggggccacgtgccgctcgaagctcatttctttacgagtagaagtttataatatctatcttgcaaaaagaggtggtggtggtacgcgcacactaccacactcagatgtaggagacaagatctgactttcatcaaaaaaaaaaagcataaccgtcacttcgatgacctagcatgtgtaaatggtcgatgtccatgacacttcatgatggtcaatattagctttaggtccttcacatgcgtattcggatataatctaagcttccctattagacccttctgggtctgggagagatatttttccttccatatttgggaagttgaggcaagtatgaataggcttctgtgtatccttccttcttggatacccctcagttttgaaaagttttcccatgacaaagcggtaacaaaggactttaattaaagaagaattaaattggtttccatcattaaatgtcacgtgtcatacttcacagaaacacgaataacaaaacagattactattatatctataactctagataagtggaagtttattttattatccttacattgagacttcgttgttttgatttttaactatgacaggtcattacatttaatttacaataaataaaacccactgaggtattttcaattaggatttagtattttaaaattttttgtatataagaatggtatttttataaagttaagtccaaatgctgtatttttgtaaagtaaggaattttagggtgttacaggtcataaaagttattcatactcgaagaaggcttagtgattttgtttctggtgtttaaggattcgatctgaagttctacagtacaagagctaaatatatatatttatattgacgtttttgttagatccgttgtaataaacatgatctcattgttgttatggttgcaaaaacattattgaattcatgaacatatatataacattgttcgtataaaatcattgtggttatattatccttactactcttctgctccactcacctcatctatattaaaaaccaacagccaggaactcgatattttgcacggatttcatcataaacagcttcgtagtcaagcaagaaatttgggttcagtaaaaggggaagccttctcagttgttgacttgaatttacccctggtattttttcaagccataatcgtggaatagcttgaaggaaagaaggaagtaaatgtaaaagagagagagagagagagnnngagagagagagatagagagagggagagagaga

SEQ ID NO: 163118 - DNA, 1483 bp, Cannabis sativa
aaataaataaaatactaaaataaagaataaaatttagattgcctcccaagagtgctatcattaatgtcatttagccagattcagaattcctcttttagagcggtgccaagaggagggcgaatttgacttgatcatattgaccatacaattagagttttaatcgttgatccttgattttgaaagtctctaatttcacacctttaatatgtactgctccatacgaaaacacctttgttgtcgtaaaaagacctgaccaccttgattttaacttgctcgagaagagtttcaaccttgaattaaagagtagcacttgttgtcaaagttgagtttccttcctgacaaggttcttgtcgtgccacttcttggtcctttctttataaatattgttgttctcataagcttcatttcaggattcttccatctcgttgagttgttctctccaacagccactaactccaagttcaaagtcctcattatccaataagctcgatgctctaattccactagtaaatcgcatgtctttttgaaaaccaacctatatggcaacatgccaataggagtcttgaaggatgttttataagcccataatgcatcatacaactttttggaccagtccttccttgaatgctaaactgtcttttttagcatcaactttacttcctgctttgaaatttctgtttgcccattactttgtggatgataagagcaccgtaccgtgcaagcaaagctttaaactgtctattgcataagtgacatccatcatcactaataatggctcgtggattcccaaattgagtaaagatattcttttggagaaagttaagaattgtttgccatcgttagaaggagttgtcgtttcttccacccatttcgttatataatccacaactagcaagatgtaaagattgttgaaagatgaagaaaatagtcccatgaaatatattccccatacatcaaaccactttaccttaagaattccattaaatagcatttcattccttcttaaaatatatcccattctttcgcatcgatcaaaagctttgacaaatgaatgggcatccttaaaaaacttggccaaaagaagtcacattgaagaacctttgctacggttcttgtcccactaaaatgtcctccacattcaagactatgataatagtttaggatagagtagacacatatcttctaaatatatgattgacaccatacttataaaggataggctattctggatactagttcttcacctctgaaaagaatttcttcaatttttgtcttgatatgtaaagaggtgtgctattagcaacaagaaactttacataattagaaaatcatgaagtcatcacagtttcttttaacaaaaatagatgctgattccaaaaattatcatttatctaaacttccttcatattagaaatcttttgcaattctagtcttgacaagtgaccgccactaggtttttagtccccttcttatctttgatctc

SEQ ID NO: 163119 - DNA, 3500 bp, Cannabis sativa
ttgcactacagcatgggcctggcgtacccctcaagcccagtttaactttttcagcagtcctaggaattctttttaattttgttaaaaatttattttaatttctctcctaatgcatgactgggtgagttatatttaattccaaatccatttgaacatctaaagtggaaaaaaaatgaatgcaaaagtatttacttctatagataacaatattatataattataaagtctataaatatagatctaaataaatcttttactaataatttaattcaagacgattttttgttgtaattttaggtaatgatcttccaataatacaaaatttaaaatttaagattatttagttttctctcaagaaaaatgagaatagtgactcttgttttgtttctttagaaccactactaatttataactttataaatatgttattcatcttaagtatttctattttattaatcaagaaaggaaattatcattattcacggaacaaatacaaacacaaccaaacaactaaaaccagtctagcttacaacaaaccagctccagcttttaatttcttaataaactatacatttaagcagaaagtgttgatcattagtgttaaccttccctctagcaatattaagcaatttataagataacgtcttttgaacctcagcaacaatcgacttagttgacctagaataacctttaaacacacttattttgatttttccatctcatacactgttacggccatcaaacaatttataactgcaatagccaagcctttcctggtattgcagatccacatgttccagctttcaaacacttgaggccaagaaataggccccaaccaactgaacatcatctgaatcactcgatcagacaaagtgcaatcaaagaataaatgagcgtgactttcttttgttaaatcacaaataggatagtttaaattttcaacagagatgcagaacttgaccgacttgtctctagtaaaaagatgggagttcaaagcttgccaaaaaaataaacttatgtttaggagcacgtagttgacaccaaacatttctttgataactaatagcaggttgctaaataagactgttatagagttttgcagctctaaatttgtcagaacttccttcagtagttatagtacctctacaaaatattttcctcaaatgacaaagttttctccaatatcagctcgaatcctgcttcaaattataattctagaaattagctcctttgagttatattgaactaactcatttaacccataacaagtcttgcttctccattatagcccaaatatacttaaccaaagttgttttgttccacaaagggccctctcgaaatcccaaacctccaaacaacttaggaagacagccccaaagaaattctctgcaaagtttctcaacttttttaataacactctgaggaagaagaaaaatgctcatccaatagttccttaagcctataagaactgaatggatcaattggactctcccaacaaacgataaatgcctagaagcccaagtgtaaatcatgagttttatttttctcaagataacatcactatcttccaactttcacttggtaggtcttaataggactcctaaatactttaaagaaaatctactttcctcaaaatattgaacaaaatggtcaacaacctcactataatggtcagccaaatctccctgctcattaacaaaagaagcaatcctattttcctcccttctcttcttaatacaagcatgaaaataagcattattttcatttccctttctcaacaaatcgactttacttcattgcaccagaaaactttgaagcatacccgatttaacattataatccttagcagcctctaattcagcttgaaaacaaacatctcttgggtgagcttgagcaacagctttagcttcttgataatactctttagctttatgaaaaatagcctgtacatgaccaactaactccctattgaatcttttaagaacatgcttcagtctcattaactttaaataaagagctttaagcccaaaacttcttagcggtaaattccaactagccataacagaatctttaaaactaatatgttgggaccagaaatcaaagaagcgaaatggtttagttccaatattctgaggttgagttgaagaaacaatacaagagcagtggtctgagataatttccaactagaatatagctgatgaattagggaaaacatctaacgaatcttcatttttgaacacatgatcaatcctagaataaattctatcttgaccatcttgattattagtccaagtaaaatgagaacctgaactagataaccaatcaactaacctcaaagcaagcccaaatattgtcacgaatacacataaaacttaagattagaaaggtatcaacacttcttttccttaagcgagttagagccataaacaaaaagtagcacaaaaaacttgagaaatccctgccatttttataaagcaatgaacaaactaatctgatttccactgcaatgactcgctcatatactttcctctacaaaatcaaaataagaccttcagtaacagagctagtatagtaatcccaaccctaaaactgagaattaatcatttcaacaacttttggactcttcattttagtttccaataaacctataactcctaccttcttaatactgtaggtatctacaactgcatcctacttattagtattattcaaccctttcatatttcaacttattattctgcaattttccatgatcaacaagaagaaaaagtacctcccttaagttaggctgctcttataaggcctcatgagcattctttgaacttcctggttgactgtttgtctcttgaacaatattcttcagactatttctcaaatttgatcttctcacaatggccttctttggggtttgccaatagattcctttattagttccaatcccaaaacactaattatagtattactatcttccatttgagcttcaagaacaacagtagcagcctgtttttctaaattaagagcatcagattcaacaccagtctctacttttttctcttcctcaacttttgccttttttacccacagagctttttttcttcttacaatcgaccattccatggccataaccaccacagttcttgcattttattgggagccattcataatccttattttaatcaacaagtctgtcatgctcattaagaaacttcacaattcggggaggtgaatctaaaatttccatctcaaccgaaacccgagcaaacttcaccatagatttttctttagtaactctatcaaccattatcagcttcccaatagtgctaacaatagcactaagacatttagaaccccaatattgcaagactaagggcccgtttggcacaacatttgaaaaaactaaaagttgctttttaaaaagactgtgacaaaaatgtgtttggtaagcagttaaaaaacaacttattgatgaatttatgaaaaagctacagctaaaagctaaa

SEQ ID NO: 163120 - DNA, 8027 bp, Cannabis sativa
  modified_base (2966)..(2969): a, c, t, g, unknown or other
  modified_base (3117)..(3118): a, c, t, g, unknown or other
ccgcctaaggccgagccggtgagaaaggcggcgccaccaattaggattgaaggcttgcggccaaaggttttggtgactgaggaggcaaagaaggaagctacaagaccagctaagtagagtgacgatgtgaaagaggtcaagagttgactgtcgaatttgcagtagttgcttatttccgagtcttgtttcatcttaatatacacttctgggaaaaatttctttaagaatggttccattgaagtaaccccaccttcatttcattcataacataatcaactaacgtcagaaaattaattataagaacaataatatttcatattttttttttacaaatatatctaaaattggtttagcaaactctaagagagacctgaaattccaatgtcgtagccaaaaataacacctcccatggcggccatcatacaagagaagattacaaatggagtcattttgccgctgtatttgccatctccttggctttctaccattaatcccacagccataacttcttgatcttcttcttccaccaactctcaatatcagaacagaagaagataaacagagttgatagagagtgtatcgttgcagataacacataaaaagaagagagactagtcaatacagcaatcatagataatacaaacaaaaattatagcagcagtcaagtttgactagttgtaatataattgagattaatgtattcttccaagtgatggagaaatgggatacgtttttttttaattattattattatgtatataaattaaatacacatatataatattataattcatatataaattgttgaaaagcatcgtgttggacttttttggagaaagatgtcgtgagaatttgaatgtgcaattcttatttcatcattttgtttttgcttcgttaagattaaaatttgaagcagagttattattttatagcttttttttaacttggatagattcctagcccttaagcttgggatcaaatttgcccaccaaaactttcaggggccttggcattagacgcttcaaggacatgaataaaacccttctctcaaaattggcgtggtacattgcaaaggaagttgataaaccgtgggtcaactatgttcttaataaatactgtcgattcgagaatttctggtcagttaaagcaaagagcaaccattctttcttttggaagtcagagatgtaattgccaagggttcggtttctttggctacggtgcggggggagattctattgatttatggaatcaaccttggatcctttggataaatctgaatgactttaagctacttatggatggccttaaagctaatagatacacagctcgttcgattgctgacatctctattggtagctcgtggaacatggagcttgtcctgcaaatctttggttgaggacttggggaagcaaatcctggaaattcctagaatcccaagtcctcatccgaatcaacttatttggaaggttaacaagaatgataagttctcggttgaaagtgcttattgtgtaaatcaagaacaacgtttctctcctaaaagagacatatgaaagtggttgtggcattcagatttacatccgaggattgctatccttatttggagaggtttaaatgaagcactacctacaaaaaaaaataagcttcctttcctatatgacaaagaatgtctcctatgtggatcggaggaggaaactttgtcttcatctcttcaaggattgcagctttgcgagggcattatggttcttggggtgcccaaatctcttaattgataatgtcccaggcagttcaataattccatttgcagaagttctcttggcaggttcctccctaaataatagaaaaaaatatttttatcttcatgggatgcattttctttgaggtttggttgcaacgtaattgcctcagtcgtggtggagtgaatgggaacctctagcttggcatttcgagggtgaatgccaaatttattgagttttcttcgttctctggtgtggagactcagtcaactacagagtccagtatggtgccttgtcaaaggtggagataggcaaattttgtgttatttgctgatgcctcttggtttcagggtaatgtgggtatcactgtagttgttgtgaatcgatcagacaacttctgggcgtttaaagttcaacagttgaaaagcttcctctattttggaagcaaaatgtcgtgcggttctgcttgctcttcagtgggcaaagcaaagtaagtggaacgatatccatattctctctgactcccaaatcctgatgactgctttggcgaaggatagcagacccctgattggtcatgtttaactgttttgttggaagttttagacttgagtgctagttctagtgtttgtaacttctccttattaattgctcttgtaattcagttgcagatggattagcaaaaaaagttaaagtctctaatatttcaactggtctgtattaaggggagggaattccccctgtgattcacaactttttttcctaattcaatgaacgttttagttcttccaaaaaaaaaaataaactgagcaagcaatgtgttaccaaaataattggataaatctgattgacaaaacaataattgaaatttgggttaattgaggtaaaactctcaataatttcactttgcttgcacttaacccccaaaactcaatttttggtggcgaaaccttcaatactcatgttctgttagcaatttaatatttccgtccattttaggtgttaagcgccatgttctgtccacatgtgcatctacgtggacacattgtacacatggcgcaattttattgttccacataaaaacttgtttaaaaaaattaaaataaaattaatttgaaattaaaaaaaattgtaaataaaaaaaaattcttttttctttctttttttcctttctatatctttttctttcttttcttttttctttctcgtttgttcatctcctctctctctctctcnnnntctctctctctctctcttgatctcctctctctgtctctcttagtcccgatctagggttttcaaaacccttggatagccaccataggccaccccagtagttctccgaccaccccaaggctctcgtgatctcctctctctctctctctcnntctctctctctctctatctccctcttagtcccgatttaggtttttcaaagcccttgggcagccaccacaggccacctcagtggttctccaaccatcccaagctctcgtgacctcctctatctctttcagtcccgatctagagttttcaaaaacattgggcaaccaccataggccacctcaacggttcttcgacaaccctcaggccacctcgacggtctctccctctcggtgctctcgtaagtcctctcctcatttctcttatcatatatattgcagtaaaatgttatttcatttttatagatctaggtggagagagaggcgatttacaaattttcaccatcctattttggtttaagaaactacattttggtgtttagtgatttgtatttttttcaactgtttcaggtgagctttgattggatttctgtggtggtggttttggtgaggtactggttgttttggttacatgatggtagtttcttggggagagtgagagatttcagggagagagagagagagagagctgtaaatgaaaagaaaaaaggcaagaaaaaaaatattttttatttattcacaatttttttaattttttacgtggactaataaaattgtgtcatgtgtacattgtcttcacgtagatacacacgtgtacactacaatatgacacttaacacctaaaatggacagaaatattaaattgctaacagaacacgagtatttgggattttgccgcctaaatttaagttttgagggttaagtgcaaataaagtgaaactattagagattttgccgtaatcaacccttaaagtttgagcaaatataatacaatggagtattattataaagttcaagatcacgaatcagtacttaggtgatgaattaaagttctttgttaaaaagtgtcacatactatattaaatcaatctaaatttgataagtaaattaaatttttatttattgaaaaaatattaaacttttaattgagtcaacaaaaatattaacatatttaatataaattaaattagtcgacttgtcaaatttaaattagtttaacacagcatataacactaccttttaacatgaaatcttaattgaatgattagcaatattttacaaaaattattatattaaattatataaaaatcaaacattaatagggatatgaaactttaaatagtactagataatactaatgccttttaatagtttactagataatactaatgacccaaatatcaagtacaaaagagcaacacgtttactagtttctctataaaatgaaatcttgtgttattgatgtctgttggaacagacaaattttaatttgatgcttgataagtcatacaagaagacaatatgcataactgtttaacatattacgaggaaatatatattatatttataatatttccacgataattggaagataatattcattaaattttcaatcacaaaaggcagatacagctgttatttaactcgagagggtaaaattaattaatatgctcgagagggtaaaattaattaagataacatctcctggttcattcaaataaaaaagataaggactaattaaaatttttgtcttcaaatttcaacatgtattatattatatttttaagagtttttaaatcgttaaaaattctttcgagttattgaaattgatagatttaacgattttttttttccaattttactaacaacagtttgacgtggataaaaatttaggggtacaatttagtacatgtcaaagttcggatgtacaatttagtagccttgttagtaaatttaaatagaattagaagtccatgaatctaacaacctcaatagttcgaagggaatttttaacagtgtaaaaaatttaaggatatgatttgatacatgttaaagttcataaggtaaaaatcctaactggccaaaagataatttctgttgttagtgtaattgtaatggaatgaatgttactattctatggtttggttattgtttagtgtgattttcaaaatattgtaatatctttaataaaaaatttgttagaatacttaataggattatttacaaaagtatgaaaaaaatattagtttacatatttatggggataaaatttatgttacaaaatatggtaatattagacagaaaatgactagaaaaatgagaatcccaacaaaataccataaaaaaacttaaaaagatttacaagagaaattatccctgaaaaaattcactggagttgacatcgtcgtcggaaaagttactgaaaaattactggaaaagtcatcatatttgtcatcgtagttggaaaactgacaagtgttttcatcgttactgaaaaagtgatcatagttgttatcgtcagcgtaaaagttttcaaacaggtcattggagtggttgtcatcacaagagttagacattggagtcgtcagcagtgttggacattataatctgacactgagaaactaactatgtgtattagctagctaagaaaatgtgacatagaaaaaccagttatgtaaatcaatcaaattaaaattaaatcataaaagctaattatgcttgttagctaattaaaaatttaacacattatgtaaaataatcaattaaaaactaagaaaaaaaacaagttaaataaaataacttaatcaaaactaattacttgaaataactaaataaaaactcagttgataaacaacacaaataaaatatacttgtattaaaaaaaatggtaactatcatgcacttatgaatattgagaaattgattgctagaagaataaaaatattacatatgctataaaaactaaatatattgggaaaaaatctcataaaaatgtaaaattaaaaaaaataatatacaaaatttaataaataaaaaattgttatattttgtaagccacaaaaaaaaaaaatcatattttgtgcaatttcgtctatttgatattgactaaaataattaaatgttgctcatgcagtgtcattattaacatataaagataatggtatatataattggtattgcctgtattactattaggtcatataagatggacataacgtactaaaataattggggtctatggactcactctaaaatgtctttgaatagcccattgactcaagacaactaattatctcttattggacatgtaggtccattatgctccgccttgtggactaaaactctttaatacctaaatcacgtaaagatcgtgtgttattttattttctaatctattttgttcagctcaatctcttaaaatatttagttccaaaaatctcagtaaatattttggttctttgattaagaactaaaggaattttctaccatttttgtcatctacaacaatggtagctacgaggcatacaactacacaatcacctagctaaggagttcgtaataccactaaagaccctattgacgacaccttgaattctctccctccgaccaatgttgaggcaacagttggtgggagataggaggcatccgtcgtaggtggcaaacactacgaaaatttctaccaacacaaaaaaaaaatccatgaaggagatgctaatgaataagatgatccaaatagatactatgaaaatgaagaacaaggtgactacaacaaagaagaagaggaagaagagcagaatcaagaaaacatggaggaggacccctggaagatctaaaagcggtgcgaataagacaattggtcctagaccaagaagtaaaaatggagaagcaagaagaagctacccgaaaagtataagaaacattgttccagttgcaaatactaactgcaataaggggtattaatctgtaagttcctcctacaaatcatacccaagctgttggagttcaaatcaataccaatctgaaaccggctatgggaaagttcggccaccctagagccgaaccatcacgaccaccaaatgacaaagggaaagtcatgaccaatgatccccaaaagaagatcaatttgttgaggcccacacgtgcagcatcacgagcatccagaaccggggtgaatcttgacctccgaagagaaagggttgaccgatgctactttcttaaaaaaagactatattcttgaccatagaccatgaagcaaagtgatattagaagaattagagcatagtttgatttccaatattccatcgtcatcaactcaggttgaaacgatattctcactttttcttgtgaacctactcatgtcgataatgaagaagaacttatcattgattttccaagtcagtcacttaaacaaccttattgtagtgggagggtttctaggaatccatctcattacggacttgatagtgaatccaacttggtggttgtaaatgaaagtgatgacggtccattaacttataagcaagcaatggctagttttgacaaacgtttgtggaacattgccatggattaagaaatggtttccatgcacactaattctgtctgggatcttgtacttgcacctgaagactttagggtcatcgaatgcaagtggatatacaagatgaaacgaggagctgatggaaaggttgagacttataaagctcgagtagttgctaagggttacacccaaagagaaagtgtggattacgaggatacctttagtctaattgacatgcttaaatccattcacatactcctctccataggagcttctctcaattatgagatatggcaaatggatgtcaagattgatttccttaatggggaacttgacgaggtcatttatatggagaaaccataaggatatattgtttagggacaagaaaagaaagtttgaaaacgaagtgcatgttcggcatcataactaaaaaactgtttgtttttaaaaacagaaaattgttttttaaaaataatttggcttgtttggccttattttttgaaaacagttttcagaaaataaagttacaaaaaacaa

SEQ ID NO: 163121 - DNA, 1989 bp, Cannabis sativa
caggaccattgttcttttctacttcgagtcagaaatgtacatttaacataacaatagaataaactaaggttgaacgtaaccaaccaacttaggagaatcaacaaattggaaacaattaattaaattaatcaatcaaaattgtcatgaaaattaaaattaatgtgctgaaaattgaataatccactgatttatttgctatattagcttgttattttataccaattctggtccacttggtagagcttcataaccatcatgatgatgatgattcttggttttgattttaactggaatgaacttgaagacaacagctaccggtaaactaaccgctccgatcaagatgctaagtagccaaaattcccaacttagaggtacagttccagcaaaagtccccaaaagttcaactataatgacttggaaaactactgtggagaccataaccatcataaatggccaactctcaaacatgcctttgaaaacattgattttctccatgtctctgctgttgacttcattgaatatctggtttgcaaaaaacccaataaaattaatgaaaaattttgtagcagggatatcatttttgttcctactagtaacgttagtatttagataaattataacttagatttttttttatataactgtgtatattgtagtcatagcaaacatttcatctattttcgaaaattttagaataatttatagcccaaatattcagaattatacatttgtaaaaagaaataagcacttcttttaacttgaatgtttgcttttaacataaattattcaaaaaaattcaaaaatgggtagaatacctactataaatataatgtagaccgttgtataaaaaaaaaaaaattggttataatttattcaaatactgaaaacacaaatgtctttatagtaaagacaaaagtgatattcctgttgtaatcgtcttaaaaataatatcatttctgaatcactattgatctttgtaatacttttttacgaaaaagataatcataaataataagttttatatacctggcaaaatacaaaggagttgaatataactgtgttgagaactgaagtagaatctgaatcagtgagatttaagagttgtttgccataaaatttaagagctaaaaggaccacaatctggtaaatgctttgcccaattatgtttctccacattattggagtaatgaaatttacatttcttccaattggtggccttttcattaaaccatcatttggtggttcagtagccaaagctagagcaccaagagtgtccattatcaaattcacccaaagcatttgaactgcagtgagtggagcagaccctgaaaaaagccattgatgaagttaacaataaaggtttagtcttttttcattgtcttcaatagtaggctgtccatcgatcgagttattacatattttaaccgatataatgtaaatagagcattgctataagtgtcgctctataattagttagcgatttctataatatttattaaagtaaaacaagtgagatccgatattaagttacaccaatattaattttttaccttagaagaatactaggcaccataaatacctttaaacatttctccatatagtatataccgtgttacaaatatctaataattatagaaataaaaaaatgtaaccctatttgtcaaaaccgattattattagtttttattatttaagcttagaaattgcaatttaaaaccttaaaaatgaaacaaacattaattgttaacattaaaatacgaaacaaacatttatttataaaatagaaaatttcaactttaatatctaaatatataatatctataaaaaaaaatactttttttagtgacatctttttagtcacaacaaaatttttttgtggctaaaagtctaaaagtgacttttagtcacaacaaaaaaattacttgtgactaaacatattatttagacacaaattgtcactaatttaattttagtcataacaagtattgt

SEQ ID NO: 163122 - DNA, 1963 bp, Cannabis sativa
  modified_base (1872)..(1872): a, c, t, g, unknown or other
gaatgttaaaaatcttagtactaagaaaattaagataaaaatatactgcaatatcaatatattaccttcttagtttgattgtaatcatcctgccaatttgaagtagcaaaactactttgcaagtgaaacatatcaacctgtaaaattgagattaggaaatatgtatgtaccttgtagtcattatctcaatcgaaacattattttttcaagtagctgacgtgactagagaaaataaaacttacagttccagtaaagtatgtcagaaatgataacataacaccattttcaagggttgattgtacacgagcattaaccatcacgccgggagtaagaacatcaattgaaatacctttaacatccttggtctgtttgggcagtaacaattaaagattataatcagcccgacactgagaggaaggctgtgaacaaagaagagaaggtttcaaataataggcataccgcatattttgacacggtgtctgggttagaacttaaataaacaactctatgggctttatcaattttcccaacaatgccctgtagaagttgtccagtgttaatctcagagctggctgcaagggcattgaaattaaataacataaaaatgtgaaagttaaaaaggggttaataggaaaccaaagaaaaagcttataccaaggaatatgtaatattaagaatatatgttatgcccactggcaatggatcacatcataagagtacacagtcataataataataaataaataaaaacaacaacaacataattacaaatttccaataaatctcaatgaccattaccaacgtattcagtgatcagtctaacatactttcagaagctctcaatgtcgatcacaatgatcatttcacaaaattcaatgatgctaagatagatactagatttctggaggtgaaagttaacaccatcatttgaaagtaattttctaggaagaaactacaatccaagagatcatatgtacactaaaaggggggaaatctagacattgacacattgtatatcgttacacctttgtgcaccatcatgtgtctagacatcattcataaagaatgctacagcatgtatgaaaagtaaatgctttgacgagaaccttgcctaaatttatcattgagctgcctacttggttcatacttactacattttttttactgagatacttactccattttcactaattagaagtcatatgcatgtataagagctagaaatgcacattaaagttgagaactgattctaattatccctgggtcctgggaaatgttcatgctgtgtgtatttggttaatgttactcatattgaccaatgttattagtttctgaaagtcgttgtataatgaaaacaatagatgtgaacaaagtaacataaattacaacagaaaagaagagtacttaacaaaaattaaattttttattcaacttatgtttaccatttttgctctctctaggcaagaacccggtgaatgaagtcgaaccaaaatgaagaatataaccatggtcttcaatacttttcacataagcactgaggacctgaagaaaagaaaaacagttgaccactcatcattagcacaaagtatcaaacacatgagaaaatataaatgagagaaagttatcaaaatatctatcccagcttatttggttgacataccatgccttcttgaatagaatccaacatgaagcccttgtgcaacaaagaaagacgcagggaaagccagatcttccttttgccactctctttgttatcactatccaggtgtaaaaccacagaagctaccatttgcccaacgtggaagacactgggcagcacattatctgctatgctctataaagtgaagaaaccataaaaaaaaaaaaaaaaanaaaaaaaaaaaaccaaaaaacaacatttaaaaaacaactccaacatggtcagcctaaaagatgaacaactttcaagcaacatattaacaac

SEQ ID NO: 163123 - DNA, 3446 bp, Cannabis sativa
  modified_base (1480)..(1480): a, c, t, g, unknown or other
  modified_base (1595)..(1597): a, c, t, g, unknown or other
  modified_base (1712)..(1727): a, c, t, g, unknown or other
  modified_base (2862)..(2867): a, c, t, g, unknown or other
agccatcggtaacaagctcggttactacacacaatagtcaaagattcaaagaggaagctataaaatgagagcagaacagtagaatgaggtaatggcaaagatggaatcagcaaggttaacacatgcttacttcttctgatttgaatgttataatattttattgccatataagttatggtatcatattagcacatgcttacttcttttcatagtactattattaattcatccaactatttaatttgacaatatttgtaaaactcttacatctcaactatataatattaataatctctttgatttaaggtatacaagcctgtgtttatttgtcttatattgttactattttatgcaaagctacattggtattttaaattcgtattaaaattttagcatgttatatataataacactattttactgcctctgaaaaatggtcccaattaatgtttgtttttatctttaattaagtccattacactcatagttctaacaataatgaatgaaagtaataaattttaagccttgtttaattttataatattttagaaaaaacttgggccatgcatgcgtgaaaagctggatcctttattgatttgatcaatatgaataacaatgcttagaattattgttagagttgttggagattcaaagttcaatctcacacaccaagagagtccaatacacatccaagaacactccacaaagcacttaacccgaaaccagaagttaataccaaaaatcaaacttaagaacttagaactgaataaaaaaatagtctttcttttttttgatgtattttatctgaacttacaagtaaaggaattaaattctacacattacaattacatggtatttataggagcttacaattgcttctatctaaaccgacacgtgtaacggttttaattaactaatcaagttagttaaaacagttgcttatgtggcatattacaaagtcacactaagtctaacaagagtattgctattagtcatcagtgatgtctaacacctttcataggtagcgtcgcataattagttagtgatattccttaaaaattatttttttaagttatatggaacccaatatttaattacaccaacagcattatgacaccgaggaggatgctagacacccgtagtattttttagcaattctcttattattattattttaaagtgccatataaatttatagctccaagtttattgattagagcaagacttatatattataacaataatgttcttaagaatagtacttttattattgacatgatctataatgaccagcagtaaaagaaaaagattcaagtagtgttaataatgtaaacacaacttatgtattttaaagggtaaatatatactatttgaaacattatattttgtaaagggtaaatagtggcataagtatccaaagttttatgtttgtaagcggcataaatctaatgtttacttttagcggcataagtacccaatntttgtaaaactgtaatttttctactctgatatttaaacagggcacatataaggcccaaattttttatcatcgggtctagatagaaatatatagtatcagttacttccaaatgttnnnttaataaattcaaaacagaatctgtactgacaaaacggaaagaaaattaacgttttacaaacattgggtacttataccgctaaaaataagcattgggtttatgccgcttacaaannnnnnnnnnnnnnnncttatgccgctatttacccttttgtaaaagttactcatttgaacctattcttttttcaaatgataaattaatgaatcttatattttttaaaatagtacaaacagcatactaaattaattttttgtcaaaataaaatttaatgataacccaatataaatgtgttttaacaaaattaattacattttctgcatcagtttgtgctaggaattattatttatggttataagttttgtcatcaaaaaaaaaaaaaaactgttaaacaaggaaaattaggttgtagatgaaacttttgtgacctgctgcaaattattcaatgtgtaatatataggtaggatgattgatcaatccaatttaattggaatgatttgatgttgttgtgtaattgtaattaacatttttatgaggataattatgcattattataaaacaaacttgagaggaagttatttgttgagccattttaccattcatttttatcaacaactttcatgtttaatattagttctaatctaaaccttttgacttttaaaagcagttttaatcaatgacttagtaagtttaaaaattgatctatacaatctactgagttttgtataacaaccaaaatcactttttaacaaccaattgagctgaagacttagcatttttctatttacaaaatacagtacaaaagagttcctttacatgaaggtgaaaagcatacatacataatatatatgtgtcaatgattggatgtaaaatgctttcaataatactttttaactattctaatttatatcataagtaggaattattattattgaacatgtctacatattaagattaggagcagagcagaacaacctgagattatatgtcctaaatgcaacctcaattaccaaaatatgacattgggtatgtgactaatgttgttccagtactcctctttcccactcttctttgggtcatactttttctctaccaaaggacatccacctatccataaagaagtgagggaggttggaaacccttcttcagacaatgtctccaactgatcaagggagtacaagacatgaagtgtttgcaaggaggtgagttgtgtaagcccattgataactctatggtatagagttattttttatgcttttaaactaannnnnntatgagaagagtagtgaaaatgtgtttatttgcttaattttagttagttttagtttcattttctagttcgtaagctaacttttaagtcttttaaagattgatattgttaagtgtgatttgtcaattaattatgcttgtttgttgttgaaaaaggaagcaaggaagagtggaacataagctgaaatttgggcatattgctgaagcaatgctgaagcgaattcagcattctggcagtgacgtagaaacacgagtttcacttatccacctcagcaaattcggtccagtcactcaaattacaccagctcgctgaagtggaaggagagggactaaacctagtgggccagagtggaaaaagattgggcttctactttggggtatgaattttgtaccctaaaaacccaacaccaaaaagaagagaaaagaggaagtacatctccatcttccatcaacctccattacgtgagcagcagctggcaatttttgaagaggagtaattgcagcaagtacacagcagaagaaagaagagagggggaccaaccttttgcgtttgaattttcttttaccttctcttaatattgt

SEQ ID NO: 163124 - DNA, 611 bp, Cannabis sativa
tacggtggccatgaactcagcttcagttgtaaataaagccaccactggttgaagctgaactttccagctgatgcaacacccattcagttggaaacagtaacttgtgactttcttgtatctctattacttgcataatccgcattaacaaatccttctaatttcacctttaaactatctttgttgaactttaaaccatagtttatagttcctttcaggaatcttagtaaccacttcaaacctttccagtgctcttctcctggattggatataaacctactcaaaacacttactgcataagctatatcaggtcttgtgcttatcattgtgtacatgacacttccaatgctttaacaaagggaacttccttttaatttttgtatcaccttctcaacataagtgctttgagagaaagttaactttttgttctccctatctctaaaaatatcaattccaagtattctccttgttggtcctagaaccttcatatcaaattctccctgaagtacctcttttaactttaaaatttgacttgaatcctttcccattataagcatatcatcaacatagatgagtaagaaagttgcttcttcagtttcagaacctttaaagta

SEQ ID NO: 163125 - DNA, 2902 bp, Cannabis sativa
aaagaattgattattaggcactacactgtctaatagtgtccaataccttctgtaagtgtgtcttacgatttgttagcaatattctttaaaagttatttttttaagttatatgagactcaatacttaattactccaataacagtataatcctgataaatttgttaagtaccagtaatattttttagtatttttttaaataaaaatataaatttaaaaaattatataaataataaaaattaaaaagaaacaaagcactttgatgaagttcccacttcccactgacccacaattcaagcacttaaaacataataatgtctttttttgagatccattagattagatacaattgtttgttaaggacatttttgttccatactttttttttggtagatagattgattcctttgagcttcaatcaaaagggtttttttttttcaaaagtgaaattcatttcatggaaagaacttttcttttgtataaataggaaatttcctttttgtatgtgcaattccaatgttattttcaatcaactaactactcttagaaaaagaaagaaagaaatgtttttgccaactaacataaaacactataaaagagtttggtgttatggagagtgctaatcaattagacttttttccatacctttctattgtaacttgattgcatttggttttgtgtatttctttttggagaaatgcttaagggtactactaatgtttaagactattataaattagtatactgttattaatagaattaagtatcgagttttacatattttaatttaataattattgtaaaaaattgataattatttacaaagtgttgaatttttatttattttttaaaaagaaaaatataagttctttcaaatgttttatgtgaagggaaaccggaaaaatacataaaaaaatttggaaattatgtaaatacaaaagagtaaaagtggagtaataaaattgaagtaaatatatatattttatataagtaacatttatagattagtaaacctttgtcacagatttataaataattgttataatcatgtaaatgtttaggaatttataaatattaattatagatattgtatttttatttattattttttattaccatttattttgattttttttctttctagaaaaatatatattgtggtgtactagaagcaattttgccctttttattattcaagattttaaataggaaaataagccattttataatgggctttccttttcaaattgtgatgaagaagagcaatgttttgaagataaaaaatcaaaattggaacaacaagatgtgatcacattgttgacttttattaggagaaatctagtttacatttacaacatagcatactatttactcaaattaaaaaataagcatagcatagattctataagtattgaaaaaattgtttgtttgcccctaaaaaaagggaattgaaccattaagatttaatatttgaaagttttataaataaaaaaaaaaatagtactaatttttggaaaataaatattacctattctatgaatcatatcatgtctttacttttgcttaggattttgaaatcacaacggctactttttaatgtttaagccaaaatcccatatccatatgtgagtgagatatacaaacaaatcaatactatagaaatatagaagcaattttttcaagccacacaaaataattatttactcttgaaaaacaaaagacatttacaaggaaaaaaaaatgagatctttatattaaagaaaaattaacaaacgaatattaataaaaaaaactaaaaaataaatctgatttatgttttcattaaaccagttgagactggatcaaagtaatcgtagagagtattagtggggtgtctgtgtgggggtcaaaagatcaaatccaaatatgtaacttaataaatgtatatactaaagacatttttattaaaaacaattgacgtgttcattaattttttcttagagaaatgctaaaaagtaccagtggtgtttagcactctcctatgtgtcaatattgatattagtcccactaagtatcgggtctcatataacttaatataatagcttttaggcagtatcgctagtcaatcgcaacgcaacatgtctagaaagtgttaggcactactggtacctaataacaatgctcttttttcataattaaaaaataattaatgagagagaaagaaaaagacaaagtggttaatgagctagtgttatgcaaataattgtagatgtaatttcaataagaaaaaaccaaacatcatgtaataagtattcataggtaatttggaaattagtaaaattatctttcattttaaatttaagagcattgctattaggcactattggtgcctaatactttctagacgtgtcattttgtgattggctagcgatactttttaaaagttattacattaaaatatatgggaccccatacttaattacatcaatagcaatagtaacatgtaggtgggtactaaacaccactctagtgccttttagcatttctctaaacctaaacttggtttagtagtaccacattgctcatattgtacaatttttgcaacttaactcttataaaaaaaattataatcaaaactatgaaataaatttatttatttgttgtttttaaattattcattttcaataatggtaattattatatctttacctcgatcagaatcgagtcacaaataataataatcagtaaatcaataagtgtctattccaaaacactctaagattttctacggactcttcttcataagcttcgaaaaagtagaagaaaattgcattgtatacccactttactttatttgttttaatttttacctttatttccatattctttaagatatacccacttttatagatgatgtgcctattat

SEQ ID NO: 163126 - DNA, 1839 bp, Cannabis sativa
ttaatcaatccctcctagccaatatggaattgttggcaagggtggtttggttccctacttgcaaagcagctactgctgctatgtttgctggtactaccacgtctccaagcgtagttggtgcgattggtaggtttataagattcgttgcattattcgtattcgtaggtgggataccttgatcgaccaaatggggatcacgaggttcctcttcatcgttgcgattcctcagagtttgcaatcgttctcagaaaacttcattgaggcgatcacgcagatcacccctatgaacatgataccttcctcctagccttgtaaatacaattcctgacctggtataaacactgggagaacgactattagtagaggaagaatgagagtcaccttcatttacctcagtccacgattgtgcacgactccataggttacgtcatttggaatcctcctcttattgtctttcttcccttcgatcaggttgtcgacttgtatcaggagcggtagggccttattacgtgtagagtagtgaaaaggtcaatttagatcaagcccttcctaaccattttcatccacacgttccatgcaatcataagtattgtcaggacatctattatgacgtctagtattaatagttaccttagtatcatctcgacgttgatttaggacttgtggcaaacatcgggtctggatcctatctgtccctgtgatctcttcttgcaatgcttgcatctattctcgaatggctatatattgagaggttatgatggatgatgccttcaaatatagacaggtgtgattggtgaaaaatgccccactaaagctgcaggtgttgaagtttctcctacatgtccagcgatttcagggaataaattgagggggttaacatggattcgtcccactcctcctatgatggcttcaatcggggttgttcctcctctaggcattgttcctccaccaagggccactcttccgctaggtgttattcctccacgaataggaacatgaagagtctcaatgttgaaagatcttgcattgttgttcacgtttgtctgatttgtagccatgttgattctcctccaaaaatcttcaattatatgtgtttcccacaaacgacatcaaatgtttgttggaggaatttcaacaacaccaaattcgtgtgagtattcaatgcaaataagaacacttaactaaaaagtgtgcgagtactcaaaccatttgctactaaacaaatgaaataaaagtaaaaagtaaagagaacacaaggaaattatagtggttcagtcagagcttggtctgcttagtccactgttgtaaagatttcaacttagtttatttaatttggatcactcttttatatataaagaaagtgtcctttagatttacttaagtaattagttttagaactatttttacattaaataataaatattaattaaagtaaatgttcaaagaataaataaagaatgttttaatctgtttttgtattaagtacagcaacgtatgcgacctagtaagctctgagttacccgttcatattctaacacacgaactcgcagactctagggtgtttatattcacatggccttcgggccttttatttggatatatacattcacccttgatcgcatacacgaacatcctatgcgttgacaatgtggaacatgtgagtccccgacgagtcatcgaacactcacttgaactaatcttatgtaaagaagtgatctttactggtcgcaggagaggtctgcttggtcgttgcatataatcaatatatgcacattcagttatcaaatcctcttggtcctacttgttaggttatttttagtattaattttagattaagtt

SEQ ID NO: 163127 - DNA, 861 bp, Cannabis sativa
aaaaaaaaaaaaaactaaatgtgaaatatcattggtagccaattcctaatattagtacaagatacaaataaaaattatataccacaacctaaataacatataagatagcagccaactacatcaaaatctaagcggtaaatactataataaaaataaaagagcagcataagaaaaaaattatcaaatagataaaaataaaatctgaaaaacattaatgagaaaaaagatatgacactaaaagaatagaggataaagacaaacctttatgaataaatttcaaaaattaaagggagcaaagcaaagaatcgggaggcaatagtcaaagaacttcagcgaagtaaacggaaaaatgtgtgagagaagaaactttggtcgttgtttggaatcagctgctgtaatttcaaagctgtaatttcgaggcatgaaatcctataaaaaaatgaggagagcttcgttacactttcgattgggaggaactaggagaaaattgttgaaaaattcagcaaactaagagaaaaaatttgatgagagaacaatctttgatcttctttctggatgaatgaataaaatttctaggacaagtttgaagaaatctaaacgaatcgaaaaaagatagagcatgtatgagacattaactttcattacaatgagaaataaggtcatttgctgccatttctcttaagataaacgtgatgatgtatatcaatgtagcttgagatgtatgagatgaatagagaagagaaatgcaagtaaatgaccttattttttattttatagatagttaatgtcttttttttaaaataataaagtaaatgtccttttttactttttaatacctaaaatacccttcattatataaaa

SEQ ID NO: 163128 - DNA, 1585 bp, Cannabis sativa
ggattgaagccaggttatttttgtgacagtagcaaccaagctttgaaactctacttctagggaggatctagacattgtttgtttctaattagacttccaagcaactaagtttaaccacacaatagccattacttgagcacctgccatcaagatttgaagcccaatatcagaatcacagaacaattttatggcggtatcagagcattttgagagatgaataccataatccagattgcctgcaagatacctcagtatacatttgagtgaaatacaatgtgcctctagaggagactacataaattgagactttatttattgagaatgctatgtcaggtttagtgatggtggcatattgaagagcaccaacaactgatctatactgtgtggaataatgtattaaatcactgccaaattgagataatttcaaaccatgttgcataggagtagaaatagactttccagctggcatctttgtttaaataagtaggtcttacaaatacttcctttgagagaggtgtaccccaggtatggtgtgagtgacttgaatgcctaggaaataattgagatctccaacgtctttaagcgcaaattaagagctcaagcttgagataatgcttgcaacttgagccattactgctagtgacaataatgtcatcaacatagactaggatataagtggtatgggactagtgaactttgataaacagagatgaatctatttttgcttaatgaaatccaaactgagttagagcagctgataacttggaaaactaagctcttggtgcctgtttgagaccatagagagctttgtccaattcgcataccatattaggacaagtacattcaataaaggtaagtggttggaccatgtatacttccttgaagatctctagtatgaaaagcattattgacatctaattgtctgagtttccatccttttgtaacagcgaaagtgagcaccactcgaattgtttctagtttaatgacagggctaaaagccactttgttaatgatacccttttgcaactaaccgatctttgaactaagatacactgccatcagagttatattgattcaagaaaacccatttacaaccaattagttctcttctagcagaaagtttgacataatgcaaggtcttatttttctttagtgttgtcatttccttttgcatatctgcaaaccattttggatcaagaatagcttatttaatagtggatagaaacattgaagctatgtatactttaaatttatgaatgacatctttagatcttgtttgcatatgttgatttgtgacaacaggtgtagggatattgttgttggaagatgaaagagaaggggcaattgctaaagtgttgttgggatgagaaactgtttgagatgaagaagtaggtgttgagattttatgccctaaataaaacccattacaatctaatatgatttgtcaacaataaaagattagaaattatttatgcttacatattatattcatgtttatggattaatttatatacatatatatacacaaaatctgttaagtccagaacatatagacatacacgattacagtgttgtcaacacagtg

SEQ ID NO: 163129 - DNA, 3012 bp, Cannabis sativa
aaggaaaagggttgaaacactggttgttggaaccaggtacttcattaacgaaaccagcccctagacagtctactacaacaaatctccaaggaaggaacaacaaaaagaaagatcctatttcactattaaaagccccccacggctagggaaaatattaattgtctctgcgaatagaaaagtgtgattaaaaaaggggatataaaaaaacaacaaacaataacaaacagatttacaaaggcctactggaagttcagagttggacgccaattgactgagaggtcgaacctgcacttgatatccaccccatagtcttcgtataaagatcatgaatggccttcatactgtgaatgaatcatgcctgtcaggcactttcctcctccagctgttggttggcctgctgtagggccccaatctgaaacttggcatcagtaagctcggctagagggtctcattggcgacgcacatgtcacggtttgtcgccctaacctattcgaactctgtcaccagcatgcccacttccgcagtagccctttctgccaacagggccacttgtcaaaagataggcaaagttagaaagctaaagtgccagaacaggggacaggacaaatagacgtaaacaaaagcaaaaataaaggcaaacatctcgaagtcttaccctaatagcatgccgctttgtggaatgggccagtgcaaaaatatgcgcaatactacaagatgcctaggtttccatgggcagattagaagcactctcgaccattggtctaagtgctccatggaaaaaggtgcggcctcttgccttagcttaaaggccatctgtttctctaggaccttgacttccacgatctaacttgttgggggcacagcttgcatgccgtctacaattttggccttgcaaacaatcgacatcacaattgccctccggcgaacctgtagtttcttggcctctaaatgcccattcagggccttgttcatttcctttccctctgcaagttgagagggtgaaaagaaattgccttccaggggaaggcgaaccccacacaaggaacccttggcggggctaaggggagtttagaatagggaggctagaggtggaccccattccaagagcaaacacttcgagcctctaatttttcctagaataagaactactacttgccatcccaacaaggtccgtcttcttcgaagtagacataatgtacctgtcaaaagtcgacacaagttaaaaggttcatggcttgatcctgaaattcccaagaggtatgctactagaatcagtgtccctgaggcggatgcaccttcacatttccctcaaaactctaacgaagagtaaatgaagaacttaccagtacatgagagagagttaaggtggaatactttagtgtggtatccttgacgagagaatcagtattcgacgataatagtagaaaagcacgatggagaaggaaaggaacacaagaactttggcttgacgggcaagaaaagtgaaaaatggaacgactgctaaaggtattaatgggatgcctagatgatgcacctttcataagaggtagacgcttcagatcgccccaagaggcatctgatggtaagaagattaagacgctaaaaggttcccatcattgcatgctttataaagtacaatcaaaaaaagagaaggctgcctaagtccaattgcctttattttgagcttccaagagaacacgcgctcggcacgcgcgcagaaatcaaaaagtcagcatttatgatcctaacaagaaaatagaagaaattatgcttccctaatagtgacactttaggttggcggctgatgacgcaatgcattaaaagattcgttgcaagtcccacgtgcgtaaaaaatctctcaagagaagatattgctagctcccagaccatggtatgtcccaaaagattgggggtaaatgttatccacctttcatcaagagtgacatgtgggcataaattaaagaaggtcaaggagtcattaagctgcctaagtgtccaacttcgcgctttgggaagataatgagataaacctcgcgggacgggtctctacaaggtaaaccttctcgagtgcaagccacgagataggtgttcgtgaactaatgattccttccatttccataagactggacccttttctcccgcgaggaatatggatcttcacccaagatgcgctagttcggagtacgcctttgactcgtaaaagttcagcctgtgcatgccaagctacgggccaactgactgggcttttttcaagtacaatgttagagtttgtctcccatgccatgctaccatgtagagcatgtgtgtcattgtgtactgttctaaataatccaacgggtaaggatgagaggaatttaaataaggatggccctggaatgacacgcgtccaacaccacgccagtataaccaatgttatctgacatcaataaagaccacatagaaaacatgctacctaccaatccaacggtgggggttcatccctacgaagatccatcaaagatagcccatgcaagggggtcgacctataaatactacaaaaaaagcacaagggggggggactccgatcggtccttcaaaccttcaccttgagattgaagattcatccttcatcaagaaaacatatttctgtaaccccactattctctttaaaatatccgtactaagcttcttattcttcaacaggaacatggtggaatggagaagaagtccattgtcttgtctttgataaacaatcaccggccaaagagcttaataaaatagactcgtggactaaggatagttaacgcatgaatctcgtaaaaatgttttatttttcactatattatttataccttctttactttcttaagctctaaaattattcgattgccgaaaaacttgataaatagtatttatttgattaatatattgggattttcaaatttgcatattctgatcttagattaggggttttttatttattatttttcatttgtgtctgttgtcgagcaaaattcgcaacaccaaaagtat

SEQ ID NO: 163130 - DNA, 3242 bp, Cannabis sativa
ccacctgcaaactggaatgtttatttgggtgtcagcaattagcaaacgctaacatgcaagctttggaaactagattattatatgtacctggtggatgcgataagcgaatctaactccttgaagaagaagattttcttctcttgtgcattcattacattgcaattctttggttattctcttcatgtattctttggccagtcttagtgagcttagtttcatctgcaagtataagggttggttggcaaataaatgtaattagattaggtgttgaattttaccaaagcaaacaagtgactaatgtctacaaaaaaatcattaggttttgatgaacattttctttaatgaagttgccatcatttgaagtacatttttataagaaaaataaggatattttgaataatgggttacgtaaaaatttttggggtagtgtagtgttgatgaattgacatgaatttttgtgatctatggtttatctaccaacctcgccaatgagtcctgtgtcaagcatccaatcccaagggatcttgagatccttatacctcttgctagtactttctcttgtcctctctacattgttgatactcctctccaacctgcaaacattcaaattttagtatctttttaaaaccatttcttccacaagtgttgaaaaaaaaagtacataacaagtgagtacatgctctcgcctgtcttgcaattcttgcatcttcctcaaggcctggctcagtggctctttcgggttgtcttcgaacgactgaacttcgattttcaggttccttagatctctgtagttgcaagcagcctcacgcatggtatctgcttttcgttcgggccactgtgggaaatgcttgaggacagccctttcatccaccaaggaagatagttgctcatcaagccaagttacaaaggcttccacatcagaaatcctcttgtgggctgcagattccacttcccttaccaacaagttgatgaactctgcttgcttttctacctctgatttcacctgtacaagttggtgtctattctctcatgacttgaactcaagatcaaataaatatgtgaacataatttgataagaaaagagtactactcacggctgagatgtaagttgatcggttttcgatttctccaatcatgttacgagtaagtgcaaaggctggaacttttgcagcactacttttgttctcaatgttagcatctcttctcgtcagtgaacggtagagctccataacttctggaacacgccgcactgccttggatccaactagtgatttcgaaggcaaaggtggtggtggaggtgggggccctcctaatgtggttgatgacactttgttgtccttgactacttccttgaatagaggtggagaagttaaggaaaccgggcttggttgtggattaggaaccttggcaggttttcccttggtgaattctgattctgggaaatcttgcttttgatgtcttttctccattgctggactctgttgccctgataagctgaccaaaaacgatggtttctgttgggacatatcaatattgttgttgccatccatagaattatgcagcttcttccaaagcatagactttctctcatgattgtgcgctctaagagagcttatttgagctttgagacgagtcacttcttgtctgagctcatcattttcttttgccaatgaaccattgctcaccaaagaatcttcaagttgccttctcaaaagggcgatctctaactcatcgtcttctcgtggcattactctaaacctcagctttacttcctcacaagaatgacaaaagaggctaacagttacattgaaattgcttgcttaatctcctttctttattattgtatatgcattatatgtcgttttgctttcaaagtaagaatttctatttatttatcacttgaacttgacgagttatgtctacgaattaccctttactaagctggtaatggcacctagaatcacttttaagtagtagttcaaacaaggatgcttttgacaatttgctaattgtctaaaaacatttttcagccatatataatgaaaaaaaaaaagaaaaattggcttaatttaagtttgtgttttaggtgaaagtttacttgagattgctgtgatatgtttaggaaggcatgttaggtacaacattaaattctttttggtcaaatttacaattaaatccatttccaactttttgttttttgtttttgtctctttagatatatttcattcatactcacatgatacactcacatcaaaattcacacgtagacttgtgaaggagtgactgaaacagtaagaagactaggattgattgcaaactaacaactgcctagaattaaacttgctttttgccaatcctcaccgtccaagtgcaaccctttgactgggatgttgaagaaatcattaggttgatatagtagaagtttcattcttttctttttagcatgtttttttatatatatatatatatatgtgtgtgttttcatgtttgtgtgttttcatgtttagtcattgagggaaatcattgtggaaatgaaatggttttaagctattctttgcttgtaaagtaaatgggaaaaagaagaaagttggggggaaggtaaatgaataacaaagaaagatgctgacaggggaaaattaaagaaaaagtaaaagagccttgatatttacatcccaccagattgagatcttcaatttcatgtatattcacatgtgtacatatatacatatataaatatattttctttcttgtaaaagaattatggaaatggtatctgggtttgttctagaattaatcatagctgcatcaaaaatagattttgacacatttagaaggggaaaaaaatgaaaagaaggcatgctaaagaatggttaaactatcaatagtaatgagattaagagtgatttttttcatataagaaaactattaagttaacatgcatttacttaagccaagtaaactagatcattttttttattttgtgaagtccatataaaagtaaaatattctttttctagctatttagctaggagtctctttagttcagctttaaattttataggacccatgtctttagttcttccttacccgaattccctatagccaggggaaccttagagagtgataggtgttacaactttttatgactcaacataattatattataatattttttaaagaaggttgcacatctcattacattgagggctgcactttcaataatatatatacacatatattta

SEQ ID NO: 163131 - DNA, 2434 bp, Cannabis sativa
gggagccattctatagggtaccttagaaattggctccatttcaggtgctaagtcaatcataaaatctatttctagctacaatggcaaccttggaagttctttaggtaatacatctaagaactcttgtaccataatgtctttaggtcagactaactcgggtctttggtatctaacaccatttctaaaaaccttatgcatctttcttgcaacaagtctctagctaagattactggaattcgagaagctttaattgataccacaaatacaaatggttcctcactctcaggttgaagagtcgccatcttctgcttaaaatcaatgctagcagcatacttagacaaaatgtccattccaagtataatatcaaaatctgagaaacttgattccactaggtcagcactcaactccttatgctcattcctaaattgcattgacatatatcatgttttggagataactaattcccccacgggtaatagggttccaaaccctatttcataactatcacacgacctatccaacttatcaattactctggtcgccacataggaatgtgtggctctagaatcaaataatagagagtaaatagatttgttgactgaaagttaacatgtcactactgaaggactagcttcaacattggcttaggtaagggtaaacaccttagctagagcaggctttgcctctgtcttctgctcttctttctttaactacgggcaatcccttttataatctctagttacaccacattaaaaacatgctcgacccttacactcactcaaatgatggttcttacaattgaggcattctgagtaagtgtaacagctctcagaacaaccctgtctattaccacagctttggttccatcagaacctcttattttaactgaagccaccaaatgcaaatggaaattttctcttctaatcaggggttgaatcactaactcccctacaaaaacaagaggcaggaggggcagtggccccacaaacaatttgagtcccccagaattcctagatgcattctactgtgccctcaagtcacagtgccttctctaccatagtagcataagtagatgtgtcattagtgctaatcaacaaatcatatttaatcttatgattcaatcctattaaacacttttttttcatgctaaaattgcttggacaattcttgaggctaatcgagctagtttatcaaattgtgtcatgtactctgtaactgacatattctctccttgagttaacttagtgaactctttcctctttatacttttgaactgtttctttatagtacattgtgttaaacaaatcctcgaacacttcccatctaattttggtgtcgtcctaagtgagggacaccatctcccaccaaacgagggcatcctccaggaattgaaagatagcataggacactctatcattgccagtaaaacccatgaagtttaatattttgctgataattgttcggcattgctcagctttcataatatttggtcctcctaagtgtactggaggtgcttgcttacgacacctttcaaatagcagtttcgtacgattaataaaaacttgctccattggcataataggagcaggagctatcagtacttcaggagcaggcatagtaggagcaccttgatgccttaagcgttaaatttcttcatctttttcattaatactggcttgcatctttacaaacctctgttcctaatccaaggcagcttgtggttgattaacattatcctaaccgcgagtcctacctatttggcctctacctcagcctcgcagattaggggcaatcaaaattccataactgccactggatctgagcgaatttctgtggattctcgtgttttacctaacgtctattctattggactagcctgcaaaaccataagttagcatggtcaaactgccatcaatgttaaaatctaattaccgcttacttgagaatctaaaacatgcacctattttgctatcgggctactaacatgcttttcttatttcaccctaataaatcatactactaaaacatttaaaagcttactgaatcatgagtcaagctgatctctgatgataattgtacatatcatgacaatcttcgaaagataacctggcagctctaaaacaaaattgtaacgccccactagattacaacgttatcgttatttcaaactactgtgcacttattcgctaattaaagggtttactcaaaaatatgaataactaaatttttcataattaaatttaattttaaatacacaactacaaaacatattcttggattccatttatagagttacgttagttttcaaaatataatagttataaaagttatcgtttggcgactatcaaagtaaagcctactgtctcgaagatatgaatattctaggtctaactgcctcgatatgtacaatcttcaactagattgggctcactat

SEQ ID NO: 163132 - DNA, 1706 bp, Cannabis sativa
aaaggatttagcttcggttattataagacaataacattgttagtgtcggtcatgaaccagcgctaacaatattagcgtctaataataactgacgcataatataaatttgttttataaaaaattaattttttggcgctagttaacgtcgagtagccaccgatgcaaaatattactttttttgcgtcagttgataactgaagcaaaagttttgcctttattttttgcattgatcatggtcgttgacccgtaacgttgaccaacgcaaaactattttttgtagtagtgcacgaatgtaatgggtttgctaacattttagaggtgaattcccatgtgatcaccattatctttttaattattatattgttattagttatttttaaatatttaatttattgataatcattaacaatattttattttttgttataatttgcatcataaaatgcttgtgcattggagcacaatagtaaatataaatattgtagcaaatataacacttgttaatttttgtgtcaaaattagcgcaatatttgaaccttatgacattggagatggttagaacgaaaattgactcaagtactcaattaattactaccaattaagcactacaatgcccgatcaataatcatttctctctctcctaaacgattttctctcttctaggattttctccttttctcttctcttcttctcggttggggaagccatcgttggccttaaatgtgcgtatgttgccccctagctgagggggattcgtggtgcgatttattaaggatgatgcttttgcttttgattggaatggagagtttggccagaggtgagtcttctcaaaggtgtccttggaaggagctgcgaagcgttgggcttcttcgtcggcgatgactatgcctcaacgacagggtggttggggttgtccgggtgctcgtcgatggatctcaggttagagccaccgatttgtgccttttatcctacattatgatgcttgggtgggtagaagttttcgaatccgtctggtgaggcatggggatctagtgtggtggatgggtgatctgagttcatggtacctccggcgtcaaaaagatgaaacttgtgtcttgttagatttttctctctgatagattagtgttttttttttgcttttgtttgtgtttttttttttttttgctcttgtttggccattgttgtttttatttttttgctttatgttgtttgtttgtcccgattgtggacctgctatttttagtttatatccttgatttatttctttacctaccatctttgttggtctagtacttgttaacggttatgacttcaagtgtttgtgccttgataggtcagtttattagtcttgttgttgtttgcttacccttatcgagaacgatttacgtttaaatctttgagcgttgtaatagactttgtccttaagattctctactaatgaagcattatcttttcctaaaaaaaataaaaaatttagcactacaattctttttaataaaatctcccatgactaaaataaaaatattatatacaataaaacttctatttaagaatactctattcaagaacaacctctaatttgttattgaaaaaaaaaataagtccccatttgggccagttataaataggaataacctctaaattgtaattagttatacattttctaagtctcgtattaacaaagtatacctctatataataataat

SEQ ID NO: 163133 - DNA, 1058 bp, Cannabis sativa
  modified_base (1009)..(1015): a, c, t, g, unknown or other
agagcatacatcgattaaatactttaaaataaaacatatttcatttaattttttttaaatgcaattgttcacataacgcactaaataattggctgtcttcttcacagatcgttcaaacacattgaaatattgtttaaagaagccaataaatgttgacagtcaaaaataatcaaactaaatggagaaaatatttggtatgtatggcaaaatacataaaaaaccagttaacaattagtttcaacaaccacctaagaaatgatctaatgtttaatccaattacccacggcttctgccatattctattgtacataactagccaccaatttcgactcgacctcaataaaattatttggtgtattttttttcttacacagtgatgttcattaatttttattatttaattaaattatcatggtacatatgtgttgagtcaagagtttctctattggattggacttaaaattggctatgttgtttgtgaaaaagaaaacacaaatacttgaaactggttttcagaactgtctaaagaggatttggatgagggagagattcagatttagtgtcaagcatttattacatgccaacttcaaggagttttcctggtctactgttaaaacacaagttgtgggcttgtgctattagtattggacactatttgtgtccttagcatttctcatcaaaatatggtccaatacatttctatagcaatggacaaatcattctcttaaatttagtgcattcataatgggagtaattaatctcaattaatttttatagatttatttttaggaaattaaaactttgaaggaataactcatgaagtctcttttttgagaggtatatacttccaattagaatattcattattatttctgtaaagatggcatctcttctttttaaagaattgattacctgagtgacacactaattttacctctcttaattctcctttaaaaaaaattaattaaacttcctctaaactcaaatcttatttgtaaagcccgcttannnnnnntggaaattagcagttgtttatgttaattatgaaattatttata

SEQ ID NO: 163134 - DNA, 1261 bp, Cannabis sativa
cgaccttttcttatgcactaaaaaaaggaaatgggacacgtgaaacggtgcatgtccaaaagttatgtgttcgcattattttcagaaaaggaaaatactactacttataataattcttaccatatagtagaaaaaaatgaatccttttgttacatgagacaaagaaacaatgtataccctattcagacaaaaataatgcaatattaaaaatataaacaaagtgatttcaaatcatataatggaaggttctctgtatatagatcatgatttcaggtttaatattataaatatatattacttcaacggcattttaagtgctgagttccatgtggatatgtctatatattataaaacataaatgttttattttttcattaaaagagaaatatttgaataatgtgtgtaagaaagaaggggggattaattccatgcaagccgtaccagttaaacacaagagtgtaagagtttgtttaaaagcgtagaaggccatggatgagtgacacgtgtagggaagacatgcagctgagttatttgatgataggagaatcaggaccgttgattttgaattggacagtcattatcatatgataggaacaactccagccagagaactctggcgtggtccttcactcatatccttgcaaactgctggcattaatttattatcgtcgtaattaaccatctcatcaatctcatgatctttttttcattttattataagatatagatgattaattcactaattatatctatttatgtatatattgtcattacctgatggccacttgaaactttgaattttataaataatcggtgcaaaatatattgtgatagaaaacaaatatcaacttactggatttcagctattttattggtcaaaagatttttgtaagatagaaatatatatatgtatatatatgctcatatatatcctattttcatatttcaaaaacgagtaaaaaaaaacaaacccatcttatcatcaactccctgcacctcctaaaagattttgaatcattgtctctcaccagagagaaagctacatgttgtgggaaaaaacaagaagaagaaacattcttagttaagataaaatgtcactgtatgtttctgttgcaatgaaaaatgtcatcaattacaaattaattattattattattattttattatattattttcgaaaataaaattttatagtacactaaaatagttgtttcggtacatttatatattattgtttttgtatttagaagaatttttgaat

SEQ ID NO: 163135 - DNA, 2419 bp, Cannabis sativa
tagggcacaaaatccaacactatggccccaatattggagtaccaaaagtctaagtgctcttgttagtacaattgggaaacctataatggtggaacaacacaccaaagataggtctcggttacaatacgcaagaatcttggtggaaatggaagtcacagatgaaccaccgcggttcattccatacttcaatgaatttgggcaattgcaagatcagaatttggaatatgaatggctcccagctaagtgtgtcgctttctctaggtacggccacaccaaagcaacatgtagacatgacaaaattgttaaagcgagggccaagaaacgtcaggagttggaaaaaaataagcagaagaaaaagaagggagccaagaacatcgcatcaaccaacaaaccacaacaataggattgggagacccctaagaagacagccactatggtgacaactcaaccagcaatagacacaaagggcaatgctaaaaaaatcagtaactcatttttagcattgcaggagcaaaaggaggacatagtagctattcaagtagctacagatactaatactcttgatgtttctttaactgcttatggataacaacaatattagttgttggaatgtgagggggttgaataaaatggagaaacaaaacactgtttttgaattgtgttgtctgaataaaatagggttgtgtggtttactggagacgaaactgaaagggaataaaattagagagatggtagatagaaagttctctaattgggatttttacactagtcctactattgagaacagtattctggttatatggaggaaacattttgttcgagcaattgttgttagagaaaatcctcaatatgttcattgctttatcgaaatggctggccagtcgaatgctatgagtctcacttttgtgtatgggtttaacacaatggaggaaagaaaggggttatgggatggtttgctcaaccttaagctctccgctaagtcgtggttggttacaggggatttcaattctctctttgaattggaagataggaagggtggaaatgtggttgctttgaatgatataagggatgctaatatgtggcctgctcaaaatcacgtggacagactcctcaagacaagttcagggtacacttggactaacaaccaggatgggagtgaaagaatctattccaagatagaccacacctttgtgaatgaagactggacatattatttcctgaggtctaaagctcactatagctgggagactacttttgatcactgtctttgtctcatctcgattgtggtaaatgaagaaattgggttcaaacattttaggtattataatttctgggctgaacatcaggagtttaaagatgtattgcttgaaagttggcataagccgatgacaggtgagggaatggcatcactttttttgaaacttatgcgattaaagcacacaataaagaagttcaatagagaagctattggggatattggaaagagttatcatgaagcaagagacagttacttagaagccagattgcaagctcagacacatactcaaaacccagtttaccaacaaatcgagaaggaggctgcaatagctttcaatactcaagagaagatgtatcatagtttcttgagacaaataagtaaggttttgtggctgtgcaaaggggatgagaacaatgtgttttttcatgcctttttgaaaacaaagaaggatggaaaatagtattgtttcttacacaaatgagcaaggggagataatagattactttaaagaggtggcaaagcatttcataaagtattttcagggttatatgggaacaagtttgcatccaactcaaaagcttgtaaacaattgcatggaaatggggaactatcttactatggaggagcaactaagtatgataagaccctttactattaagaaaatcaagaaggctttattcactatcccgaattcgaaatcccctcggacccgatgggtatgaagttgggttctttaagaagatgtggcatgagttgggtattgagttcactaaggctgttggcagttttttcaatacaggttatttacctcaggagtttcatgccacaatgataactctcattcctaagacggaaaacccacaaaagctattgattccagaccaatagcttgttgcactactgtgtacaaaggcatatccaagttactatgtttgagactttctcaagttcttccatggcttatagatcagaaccaaggtgcttttgtgcaagggaggtctatagctcataatgttatgacactccaagatctcttgaagaattaccgaaggatgaatatatcacctagatgcactctcaaggtggatattgttgggttttatgcctaaatacaactccatttcaatgtaatccgtatcattcaatatcaataaagaaaca

SEQ ID NO: 163136 - DNA, 1433 bp, Cannabis sativa
acatattctcaccatggaatcaaacaactgaacagacttattcaaggtgagatgctttttttatgtagagccttgaactagatgtgcacatataaatatcatggactaaacattattaattgtttgatcttaatattcaccatgtactacctttaggagtaagccagaacatttgataacatggacccagaaaaaccgatagaagatcagttttcaaagttgcatccatgtcttcctgtaaacacaagaattgggatagtaggtggtggcccaagtggtatatcagcttcttatgcattggcaaaacttggctacactaatgtgacattattggagaagtaccattctgttggtggaatgtgtgagtctgtcgaaataagaggtacagagaacataatggtttcttctattcaaacattgttatatgcttggatatttagtacatacattcttcatttgcagggaagatatatgatttgggtggtcaagttcttgccgcaaacagtgctcctgtaatctttcacttggcaagagagactagttctgaactagaagagctggattcccataagcttgctctcattgacagttccacaggagagtatcatgatataaaagttgcagatgattatgtatctgtgatatcactgactttagagcttcaggttaaatttcttcttttgtgtaaatagcaacacttaaatgttgatctcattctcacagttcgaaaaagtattgaacttgaagttcgtttcctgcaggataaggcaaagaatttaagtcgactaggaatgcatgctgtgagtgaattagcttcagacttaactcctcagtatcttaacaatcgtggattcaaatccattcccaagtctgtggcttatggatatactgcttcggggtatggatttgtccaagacatgccttatgcttacattcatgagttcactcgtacatccatggctggaaagattcggcgttttaaaggtggttacactagtctttggcaaaagatcagcgaatcacttccaatagaagttcattgcaacactgaagtgttggcaatccgacgtgattttgaaggtgttaaagttgatgtgaaagactacaatggggaagtgaaggttatggactttgataagatcatcatttctggttcttttccatttaaaaatggaaggatttatagatcaccacattcaagttctacaggtttcttgctctacttccttttatttgtgctttaatatcacccattttcctctacatgctaacttgaacttttctgaacagaaaacgaaaatgaaactgaagcaattgattttggtgatctcgagaaagagttgttcagtaaagtacagacaatcgattactataccactgctttgaagatcaaaggcctagaccatttgcctattggtttctattactttgct

SEQ ID NO: 163137 - DNA, 4096 bp, Cannabis sativa
aaataaaacaaatgtgttttgagtgtcccacatagaaaatgcctgtgaaaattgtacaatttattagaggatgagatactctacttatcactaattagttttgagaaagaattcccgtgatttaccattctattacttttgaaatattcgttctactttctcaaaatttccatttttctaaacttttattcttacaaaactacacttatataagtttaataactcgactgtggcacatttacaatctattttgcaatttataacattccaaactttttaatcattatcagtttatatagtttgctgttgaaatgcttgataacttttattctgcattttccatgcaggtcgatggcacggaagccttactgcaggccatactacattcaagaaaatggggtaccttagtgtttgtgatgcttgagattttattctggggtattatcgctggttttcttcacatgaaaggcatatacatgaaattataaacacaaagctttttatgcgtatataacagtttggaagtagtggaaacataaaatctgtatataatgatctctgtctctgaaatacatttttttttccaagtcttttaagtaaatagatcagtttataagggagggaaagggagtcgagtcctcgaggtcttaaatttattatggctgatgcattgtgatttggtcaaaagaatatcaaatcgtacttggtgtgtctagaaaggtgatgacgaaagagatatgacttaagattgtttgtagaataagacaaaaaaaaaaaaaagaatgaattggtttccattatgtcgcccctttaacatgaaaaaaagggtaatattatctatacgtatttgtgaaaaaagaaagaaaataaaaagattagggtaacaggagagcttttggaattcattcggggacaggaaactaatattgaccaaaagttgagaaaccgttcacactaactatatcgtgtgtttattatgttattgcttaatgtaaataaattgaaattaaagcctgtgtgatgagccaagacttgggatttatttatgaaagcagaacctaaaaatgctaaatatacttgtcataacactataagccaaaacgttctttactgacaattcactttgcaggaggattgtggagccaggactaatttattaaaaggagtgagaatgaggggaaaaaaagaagaaaagaagaagaatttgggatttggtatattggtttcttgaagtcaaagataacttgaatgctaaaagaattaaaaatgttcctttactgtttgaacatctaaagattccgttactagggtgaaaccgagaaaacttaaagcaatataaagctttaagtccatttttctttctagttgaatcacttggcaaagagagttttctgagtgttggaaatggctactgaaaaggagactaccgaggtttcagacatccaaaatgatagaagaagcatccatgagaatactgaacgattgtcaaagtgcaaacaatcatcagaagagctgcattttggcaaggcactagcgcaccgagcattgtacggtgcaggcagcggcagtggccaccgaagaaagcccaggatcaatgatgttaaagcacaaccaagtaggttgagtaaggtttctttggctgaggaagaagagaacaagtagatatgacaagcgcagtttgactgcctctgtgatgtatgtttctcaattaactattagccaccatctttgctagtaccaagtatttagaactatatgtattataattatatagatgaatccatcggtcattcttgttttgtttttcattttctaaggtgatcatgtttacaccaattcaattggaattaccaagagcacaattttcaaattcaatttgtcaagttttagaaaaaaggagtaccacttgtaaggttctgtcttagagtgaaaagagaaagagaaagtaattgtatattgaattgaattaagagtgttccaagagagaggtatatatatacaaaatagttacaagaagtaactaacacaaccagctactgaaagtagcttagctaactctctaacaaatctaataacagtcacttggctaacacgggataactaattgttagtatctttgataatcccattcaaactgagtgtagctttgaaaattacataatttgtctcaaatttcagcaaatttggaactggaaattggcttggtaagatagtcagcaagttgagcagaaatagggacatgcttaatataaatttgttactgtaggatcttatctcgaataaaatataaatcaatttcaatatgcttcgtacgagcatggagtactggattagcagcaagaaggaaggacattttgaggaatttgaagttcagcaagtaaagattgaatccatgatatttcagatacaacattagccaaatttcaaaattctgctttagtggaggacatgctaattgttacttgtttttaagacttccaagcaagattgcctccaaaatatatgcagtaccctgaggtggacttcctgtcatcaagatctgatgcccaatcaacattacataaggcttccaatgagtaatcatttgttgttttcagatgaagtccacaatctaaagtgcctactatgtatctgagtatgcgtttgactattgtccaatgagcttgcaaagaattttgcatgaattgacacactttattgatagagaaggcaagttcacgtcttgttattgtagcatattgaagggcgcctttatatagggtggcatccttgacttgttcactgccataattggagagtctgaggccactattcattggtgagttccgagtgttaacattctgcatatctactttgcatagaagatcttgcaaatactttgtttgagacagaaggatggcatctaaatttgtggtgacttgaattcctaagaaataatcaaccggaccaagatccttgagagcaaaagtggtgttgagttttgtaaagagtttatttactaagacatcatcactgcccataactatgatatcatctacataaaccaagacatagatacaactagtagatgtaaccctaatgaagagacataagctctagagaaattgaaaccatgttgtagaagaactgttgaaagcatgtcaaaccaagctctaggagcttgcttaagtccatatagggcctttgtaagtttgcagacatgagtaggatatttaggatcaataaaacttggtggttgttgcatgtaaatctattcttgtatgtcccgtttaagaaggcactattgacatcaagctgcctaattgcccaatttttggttacagccatagttagcaccactcgaatagtaataggttttacaacttgactaaaggtttctgagtagtcaaaccccagttgttgatgaaaccctttagccacaagccttgctttgtagcatttgtggctcccatcaacattaaatttctctttgaacacccattgacaccctataggtgttctatctttaggaagcttgcacttcagttttcatagcattgaaccaatgacgctctttgatgcctgtcataaaccttatcaaatttattattttttaattctaatactttcaattatttcagtataaaagcaagtacgggtcgatcccacgaggactatgattaatttattattcactatcaagcagaaattaaagggggtgttttgagttgtaattaaatagcataaaaacatattataattgagattgcgatatgagataaatagttaaaggttattctccacccctaacaatcatccttaatttctattaattaatgtaatttcaatttccaatcaaactattaatcccgcagatgaatctaaagaagtcaattattctaatctccctattgtatgtaatcaaggcgaagcgctcaataattaactcttttacctaaacagtaaatccacatagcatgcaaacttagataaagctttgagatttatggaaatagattaatcttggcaacaaattaatgaagtatataattcatttaacttagggttctattcttcatcacaattaaaaattgcaatttatcacaaacacttagaa

SEQ ID NO: 163138 - DNA, 2206 bp, Cannabis sativa
ccaccaacatcatcataaccaacctcatccaatctatcctcgtcctcccttctcacgggctccccctcacaaaagatctcagtgtcaggtgcaaccacacaatactctggaggatcagtttcaataaccttgaattcaacacttctcattccacctctaacaaggaaaagatcaccctttcttactggacgatatgcttccaagaagtaagctgcaaatgacaaaagtttgacattaattcattttatgcaacagtaagcggacatcttaatgaaacagacagcaaagaatccaatgcattgaccgtataaccctccaacatagaatgaaaatttagttataatgaaatataattatatatatctatcaactttagccattatagaaaagaagcaaataaatgtacaatattaagcttgatccctaatctgtagataaggcaactcagctaccaataatatgcctactaacacttctaccaaagaaacaccacaatatgcagcgcaaaaggttaacaattcaagttataggtaactattgatgatttacttgtactataggaaaaagttatattataaatgcaactacaaaagtacctgaggacattgtttcaattgattgatgaattgtcacaagtttgcatttttatgataaaatataagtgtaacagaaagaactaattggcatagaaaaagaatgtaatgtactaattagaacagcaagacaatgaaaaatatccaagttatttaactattatatcagtcaagctgcgcttttaacactgaaactaatagacaatagtgcgaaactcaatccagcattgatgcattaagattaatctatatcatatttgaagataaaaggcttggaaaatactcacgtttcaagtatgcatcaaaaagattcccagtaactccctcaatggaatcatcaatgggaagaatgtgcacacgttttccatacttgacatcagcacactggtgcacggaaacaacatctccaagcctgactcttaagttgctcctaacaaccttgttcatccttatctttggttcatcgcaggtatcatcagcaagagcaatgcagacagtgtccttccttttctttccctgaacaccagatgcaatgaagcaaacccataagaaactcaaagatacaatacaaagacctcacagtacactacaacacgtagtgaaacataaaataaagcttaagcaaatacattaagccctaattttgaccaaggcaacctatgtacgaccataaatatcagagaatcagagaaaataacaccagtcgtatcatctatccacacatgtttccaacatttaaatccatgaaatcattggtgcaatcgggctatgtattctcagatcctaaatgagataacaaaatcccaccgacccatataaaattgaggcatcaaatccccacccaaagcctaatttcccattaaccctaaccagaaccacaaaatcatcactaccgataaaacataaaaaagcacaattcttgataaaccgacttcaaaaatttatcaataaaaagaggaattaaccaaacctttatcaaaatcgtatcgccacggaaaagctggagtttctccagggtgtccgggtgaagagagacgacagagttgtcatcgttgatagcctcatctacaacaagccgattagcagctttcttccgctcaagaatagcggtactgaagtccctttttgttcccttactgccaagatagaaaaacccacaaaggaaaattagaatcggaaaacagtataccaaaaagtaaaatccaatcaaagctcaaatcgggcacataatcaaaataaaaaatagatctgaaagcttacgcgtctgaagattcagcttgatcagccatgttcgagaccagtaactaagacgaaaagagattaaagtttggtgcagagcgaagaagacgaagagaatgtgtgcgagtatgggcaatattgggatctgatattgatatttatagacaaagaagctacttttcttgtttccaaagaaaacttcgaattgaaaaaaaaaaggtaagttactcactccatatataaaataaataaaggaatataaaaaaggaaaatttacattccagtaatttaattgcattctttttataaaaatatggtgctgtcatttatatatcaaaatgtaccgttttttataccgttatcaatttaattca

SEQ ID NO: 163139 - DNA, 1285 bp, Cannabis sativa
tgaaaatatgatatttctttttaactcttaataaccaagaaacaaacaagaactaagcaagatgtaaagtaatgcacctcccaatgcattgttttgcagaacaattaatagtattggtttgtgtgaggtaagacaatattaaatttcatatgaagacgttggaatccaaagatagtgacaaggtttggaattggatgagtaagaaaattagtgtaatgcatttatttcactctacattggatggttgttgttgttcattaaagttagatcaaagtttgactgaatatgatactggttttgttatctatatactagaaagaatttccaggctcaatctttaccaattcaaataagactgcatgtgctacaatagaaatagataagcaaatagggtagtatactatcttttttaaaaaaatataattattttatggtttttagattgaacaaccattttaaattgtggacaatgccatattatttttttttaattattattattgtgattttgatatcaattatcaaatatatttttcatggaattaatgattttgtcgagatacctgaggttctgtggtgtagtgataggaatgtttttactaatatattttcttacctagtatggaattcgaattccattacaatctctcataggaggtttatgcttaacactatggagaattaacttgttgtggtagtgtcatctttaatgggatgagaatctttaaagtatatactgatgacccaattaaaaaatgatgaactataagagtactataattggcatgtgattctcgagattatttaagctatcgataaaatggagaaaaaatctgcaccacgtgatcctttattttatcaaaaaaataaaagatacagaaattaaaaagtttgaagactaaaaaaattagtagatataatataatatgactaatagttattattagtatttttttatataaataaaattgtttacctcttgaactatgatttttagagttttatttcctaattttttttccaattgcaaaaattttccctaaaactacacaaaacattacaaatatcccctttcaattactatatagtcatgagttacatgtttaagctacttaaaatctaatttattgacattaaacatacaaataataacttaaaaaatatacatacataatctcataatttattattagacaacaagtagacatttgtattgatttttataatttaaagagaatcaatatcaatatatatatataaaggaaagcattagggagttgaggtg

SEQ ID NO: 163140 - DNA, 1862 bp, Cannabis sativa
agtagatataagaggattgtaaaaaaaaaattagctttgaatttaccattctgacttgcactatcaagagcatcccaatcaattgaatccctgagtctcaaaatcttcttgaagtaccaactgtcgtctgccttaaaaggcagctgccaaaaatcacagcctttgaggtagatggagttgatccatttaacccaaatgttatcttgtttttcagagataaccaatatattcttagccataagagcaatttgtcatttcttcccttctcaaaaacctattccaccaaacttttttgggagatagattttttcgcaagaaggaagatggaatttacttctatttccattaaccctccagagaaaatctctacaactcttgtcaattgcagtcgtcaccttttgagggaggatgaagagattcatccaaaagtttctgattcccaagagaacagagtggattagttgagcacgcctagcaaaagaaaggttcccagtagcccaattatgaaggttcttattaaccttgtcaagaatacaaacacaatctgagatcttttatttggttggccttagattaacacccagatacttaataggaaaatacccatcttccatacacatcatattcaaaatagccctctttctaacctcattgacccctccaaagtaaatggcagacttgctcatgttagccttcaacgcagtagtatcgcaaaatggagtaaaggcttcatggactaacctcacagagttctcattacccttacaaaagatgatcagatcgtctgcaaagcataagggacaagcttaagctgcttacacagcaggtgaaagccaaaaccctcttttctggaataatagagcaagcatctggtcagataatccataacaagcacaaataagagaggagagataggatctccttggcgcagacctttttcacctttaaacttttcctggagtctactattcatcatcaaattgtagtaagtacctttgagacaaataaggatccaattgatgaaccttgcagggaatacacaaccctttaagtaaatctgcaacgaacaaccagtcaacagtatcataggcctttctcaaatctatctttataatgcatctggccaagatgttcttcctagtgtaacctttgagtagatcttggaaaatcagaattttatacgccaagtatattttcttaacaaaagccccttgattgttatgaataacaatcgggaggatttcaaacaatctggcacaaataattttacagatgcacttgtacaaggtgttgcaacatgctatcggtctataatcaatcgcatctttaggattgtcaattttaggcacaagagaaatgttcgtttcattgagcatacttgccatcaaaccatcttgaaagaaacccaacacacccttagaaatatcctccccactctcattccacaaccggttgaagaatcccgaaccaaacccatcaggtcccaaactcttagaagagtgaatcttttaaggatttttgcttacattattttgtcttaatttcaatacttattttaattttatttttataatttttttttaaattatgtataatttttttctaattaaatttcatataattttttattttaaattttttaaacataatatttaaaatataatttatttttatttcatttatatttttaagaatatgagttgaaagaaaaaaattataaaaaactaatataattaaagggaggagatttcaatggttacattaaatatgtaaccatcatggttatattttttttagctatatgattactattaaatgattatgattaatttgaaaattaaataaaaataaataataattaa

SEQ ID NO: 163141 - DNA, 3369 bp, Cannabis sativa
tccgcaatatggtatcagagcagggaagttgagcttccctccgatcctttttcgttttcatcttcttcctctcgccgtgttcttctccggcgacgatcgtgtctgaagtgaagaattcatctcttcatcgacacttctctttcttctcagttcttttccgttcatggcttctgataatcaagaaaccaattctggtgaggaaattccagctcgaatcaatgatggagatgattcaaatcaagctgtcaacaacagatcgaatacacagttgataaggatgagaaatccaatagaggatccttcagatccatattatcttcatcacggtgataaccctggaaacgttcttgtatcccaattattgacaggacaagataattacatcgcctggaacagagcaatggaattagctatttctgtcaagaataaattaggattcttgaatggttctatccccaaaccaccgatttctgatccagttctttacaacgcatggattcgaaacaacaatatcgttatttcttggatcatcaactcagtctctaaagaaatctcctccagcatcctctatgatgaatcggctgcagaaatctggaaagacctcaaagttcgttttcaacagaaaaatggagctcacatatacaatctcaggaaggagctgatgaatctaaaacaagaaaatcaatctgtgagcctgtattttaccaaacttaagactgtttgggaacaattaagtaatttcagaccaagttgcacctgcaacaattgctcttgtggtggagtcaagaagctacaagaacactataacatggaatatatcatgtcttttctcatgggattatctgatctctatggccaagttcgaggtaatattcttatcatggatcctttgcctgaaattaaccgtgtttttcatttggtaacacaggaagaaaatcagagaggaagccagaacctctctacagatcccaattcgaatatggcctttgcctttcaaagcgaaaaggcagtcggcaaaccagattctcaaggacaatctaagaaccatcatcctaagaagggaagaccattttgcactcactgcaatatgcatggtcatactatcgagaagtgctataaaatccatggttatccacctggatataacaaaaatggcaagggaaaagaggctactgcaaaccagtttcacacttcaactgaaaactgtactgcctcaagtgaaaataacactatattgcctcagttaactccaaatcaatatcagcaactccttaaccttcttgctgctcaaaccacaaatcccaatcctacagatcccagtacatcagtaggtaaaagtaatattgctttatcaaattgttcaattcttccccaagataaatcttggattattgactcaggtgcgactaggcatatttgctccaatttaaaaatgtttttaaatttacatccaatcaattctgttaagttgattttgcctaataataatcatgtaatggtataccaaagtggacatgtgaaaatatctgaacaacttgttctcaaagaggtgctttatgttcctaactttcaatacaacatcatctcggttagttgtttgactcatggaaatttttttaaattgaaattctttgctgataatttttacatacaggaaatcaactccaagaggatgattggcaaaggtgaattggctaatggtctctatatcttggacaccactgccgcttctgtcaacaccttcaatgtttcagctgaaacatggcataagagattaggacacttatctgataaatgcttaggcttattacagaattctttgccatgtaaaactagaaatttacatcaaaatcaaccttgttacatttgccctcttgctaaacaaaggaagttaccttttcctaataatactagtttttctaaacaatgttttgatttgatacattgtgacatttggggaccatatcatgtgccttcttattctgatcataagtattttcttactcttgttgatgatcattcaaggttcacttggatatatcttcttaaacaaaaatccgatgttcatgttataatacctgaatttcttgcatacatacaaactcaatttaattgtgtttttaaatgctttcggtctgacaatgctcctgaattgactttcaaagatttattttccaagcatggaattttacatgatttcagttgtgttgagacacccgaacaaaatgccgttgctgagagaaaacatcaacatcttctcaatgtagcacgggctctttttttcaatccaaaattccaatccgtttttggacagattgcataatgactgctgtttttttgataaataggactccctctcctaatcttggtaacaagactccctatgaactattatttcatacacctcctgattacaacaaccttaaatgctttggctgcctagcttttgcatccactcttacatcccatagaaccaaatttcaacctcgtgcaaagacttgcatttttataggttatcctcgaggtatcaaaggttataaattgtatgacattaattcaaaacagattattatatctcgaaatgttatttttcatgaacatatatttcctttccatacactaaatactgagaaatctactattgatcccttttctttattgattctccctaattctcacatcacaaacacacatgtggatgattatccacatcacaatactagtcttgtttctcctaacccaatcttgcaggacaataacattactgaagtcgatattaacaatgaaaactctgctgccaattctaacgcaccagcaatcacagaacccgtttcggttcagcctgaaagcaatcctgcagcacccattgaaactgaaacaacttcagttcagcctagaagaaccagccgcaccaaaaagccaccacgataccttgatgactttgagtgttacaacatatttcaggacaattctcctacaccccatcctattgccaagttcatttcatattctaacctttcacaagcttacaaagctttcattcttgcagtcacagcagaattcgaaccccaaacttacaaacaggttgctcaattcaaacaatggctgaaggctatggatgttgaattgctcgctctcattaccaacaacacttggaaagtggttcctttaccacctggcaaacacgcaatcggatgtcgatgggtttataagataaaatataatagcgatggcagcgttgaacgcctcaaagcacgattagttgctcaaggttatgctcaacaagagggtcttgatttttttgacaccttctcacccgtggcaaagatggtcaccttcaaattactccttgccattgtagctatccaa

SEQ ID NO: 163142 - DNA, 898 bp, Cannabis sativa
tttctatgttaatttatggaatttcactgaaatgggggttggttacgactacaaaacaatgcagaattcaactgtgttccctctaggagaaggtccccggagtagccctttgacaagtaccccaccagtgaagttgctgacaagggtggagcagttgaagctactgacaaaagctgagaaggccgggttgttatctgcagccgagaagttcgggctctcgctgtcgacaatagagaagcttgggctgctgtcaaaggcagaggaattgggagtcttatcagcagccactgatccaggaactccaggagcattgttgaccctcagcttagtgttactggttttgggtccttcttgtgtttatcttgtgcctgaggattacccttgggagctagcccttcaagctcttgttgttttgctttctgtgattgggggttctgcagcttttgctgcatcaaatttcgtatctaatttgcagagatccaattgattaatgagattaaattgaagaattaaacttaaaacagaaacggcctctgatttcattacgagttctatcaaattacatgcacagtgagtgagcccgaagtgaggtggtacatcttatgacagggtgcaattaatcttttacaccactaataaatgaacaaatatatgatttttgataattgttgaatatttcttttcagcatttgatgccatgacaaaagtgagaacctgtaacaagctgtaattgaatcactcataactataaaatgatttcagccagtgagccagcgtcctattaacaacaacactacagaatattgcattctcaaatcattagcccaaatatatatatatatatactagcaaaaaactacgtgctaggcacgtatactaaatttatgctagttttttt

SEQ ID NO: 163143 - DNA, 983 bp, Cannabis sativa
  modified_base (819)..(819): a, c, t, g, unknown or other
  modified_base (860)..(864): a, c, t, g, unknown or other
tcttttatgttttagtttttaggttaaaacaggttagaaaaataaaaaatttaaaaactaaaaaaagaaaaattaaatgttcaggatggcggaggggtacgggtccaacctgaacccaagcatgtgtagaaaacaaacaaaaccccgcccgatgaagctgataggattgcacccaacccgcttgtaaggaacatgtttttccatgcagcttggttcgatgggtcaggatcaggtcaaactcgacaaaaatgttcacttctaatgctaagtgtacacgatgtaaatttttagtggtccaagtaatttttattgtttaaatattataaaaataatttaaaaaatataaaagagtaaataaataaataatttttaagcttttcttttattttattttttccttttccttgcttcttccttcgcccaaatttctaggtgaatctttctccctttctctatctccttccctctatgtggcgccagtagccagctcaagtgagtcattccaaccactgacgaccctaaaaccagaaagcctgagttggtttcggtcaaaccttactaatcagtcagccataaaggttgacccaatagtagaatttgaacgagaaattattttttaacaaatttataacaattccaagtgtttaggagttagctaactagccattactctaccttcctccacagtattatttactttcaagaatcctcgatcaactcgaatgattcattgtcgattccgtcaatcattgtcgttgatctcctgtaaagagttcttagctttaatttagaatttagcagataattagggcttaattntgaaaattatttattagtattgaattatttatttatgatgnnnnntttgaattcagaatgcatttttatatgatatatagaaatttcatattttgcatgttttgtgtctggcaacattagaacgcggtgtttggctattagaatcacatcctagtatttttagt

SEQ ID NO: 163144 - DNA, 2451 bp, Cannabis sativa
cctaattatttagggcattacagtaagtggctgaagtaataactttttgctggactaactttttaacaataggcaaagcatcatggatgactttccaagcaacaattttaagttggagaggcaattttagagacaaaaaagttttcaccaaattttattagttcttgaggtggaagaatggtcaataacgtccaaagattcaaagtgataaccagatttaacaatacatactccgttgtcattaaagtactaaattaggcaatcttgttgtccaaagaaacttaaaaggaagagagataatatggtcaacatccaaggttgaaaaatgtttcaacactaaagggaacatcccattccctctagttcattatgtatgagaagacagtggcatttgaggagccaatgaaagaaataggttggaaacaagaataacttggaatctatgggtccgaaaggcacaacacttggttaccactactgattttccatcgtaaacctttgattaataactctttttctcagattatacctctccatgtcattgaaggctgatgcctaagagaagcttctaaaagagctgattctaaaagtatagtcggttaagtagcgaaattagcatttcgtgaagacaccaagcttattttactaagagagactgattgtaataaaaaaatgatctgaatcctattcctccagacaatttagttttgcacatgtagttctgattcttccaatgtatttttgagctatctttgttagagtcccatcaaaagtttgccatcgttgattttaattgagtacaaatttctttcgatagctaaaaatatggcatggcatatgtaagaattgattggagaactactttgagtagtactttaatcgattagacaactactttgagtaaagtactcccgaccgctaatggagaacagtttatcatgccaagagtgtatcaatttctaaatcttctctttgatattgctaaataatttcattttgtttcgtccattaaaacaatggcaatctcaagtaacgctcatgatattcattaggaggcatgtttagtcttttatggaaaaagtcttagagggctagaatagtatttggactaaaagacattacggattttgaggcattgaagagctaacttgaggatttgtggtaaagatttaatactcttttaataataatgcaagactactctatggcttaacagaatagaaggctttcatcttaaagtagtagatgtgaatacactattttttaaaataaaatttaattacacaatcatctttatttaagtggcctaatatatttattttcaatttcttatatagaggtaaatgtaatcacatagttatatatgataaaacaattatcaactatgtcttttttaggaatagggtaggtgtatgtagaatgtatgagtttgatctcaaaattaattaccatatttcttatatatgtattaagttctcaagcataattaatttattgatgtgggactctcgaaaatttacataggaaaaagattttggtgggaattccttacgggtgtttagttatgccgataaagagtttgtaaaatatagctttcaccgataccgttgctaaaaaaaaccaattttgccaatgatgtatgagttgggctgaaaagtggttttactaattaaagattggcggtagtatttgtcgacgagaaaaagcaccgataaagtttgaacgacgcaatctgttaacttttgtgcggggcaaaattgtgcatgcaaagtggtttttcatgtatccatattgagaaaaaacatcaataaatgtgagaaaatacttgtttctacacaacatggtagagtaaggttcactaatagagattgacacgactgatagtctttctcctcgttttagtaatctttcctccattgttttacgttataatttatagtattaaaaataaaattcaaatatttttattgtacttgtaattattccttcttatgagtgtgataaataagtgtttagattttattttcggcactagaatttttttaaatgtttttgaaaatctataaatagtcctaaaaaactacaacatacacaattataaaaagaattggactaactttcttttaagaatggcaaaataaataagggtgtattggagacttgcctaatgaaaaaattcattcaaaattaggaattattttgagtgatttgataaaagatcgggtaaatttacagttgctttgaaaaaataatatgcgtttctaaataattacaacgtacaaaattacaaaaaaaaaatatactaaaaaactattttaaatgaccaaacaaccagaatgctacgttgcggagttttggtgagttgattagccttctctcatcactaacatcacacactcctgttaaactatcacatagattatgagttatccaaacacacattcaacatta

SEQ ID NO: 163145 - DNA, 1338 bp, Cannabis sativa
aattcattatgagcctgcccaaccaagtgggtcggaccctcaactaataactgatcaaatgcaacctataataatttctcagaactctaaaagagagatgaaaaatcaactgggggtattcaaatgaaaggaaattatgaacaaagtaataaggacagataaaataaatgaaagtcataattttgcgtcggaattagttaatgttgtaactgcataacattgtggcaagaattggagaaggaaggatcataaaattggatgacccaaacagagcaaccataagaaatgcagctaaatctcctttcactaaatagattgtcgatgagcccaaaccaaaagactttattatcccgacttttttattactcaacgaaaaaggagattcattggaaatgtaaaacaattttaatagaagatggcattggagacaaacaatctggctatcagatgcaagacattctctacaaccttaacagattaacttcgttatggtttaaataattaaaagaaggatacattgattcattcgatgatcttgcacaactcttcgccacacaatacagagaaaatgctaaaagcacgacggagagaaaggatctatatcaaatagaacagaaagaagggggaacattcttgatagttcttacagaaattcttaaatgtgatgtatcaagtaagtgaagtaactacaagagacacaataggttaatttgttggaaatttgctcaaaggatcctttctcaatgagcaactcattctttcttagccaagaacaatggttgaagttatagaaaaagctgagggagtttcaaggtcatggagcaatgagaagaagagcaaaagaagaaagaacttgagagcaagagaaggtaaaaagaaggaagagtttatttgatcagtacaactctagaagggaacactccctagagagctggtgaaaagtggtatagaaatccaaatgcgaggcctagacaagatcaaagaggatacatggacaaaaagccaagaacagagcttgaaattgagttcgagcttaacacttcccctgctcagatttatacggagaacaaagaaaaatctatatgaagggagacttacaaggtgatagcacctcttgaaaggagagatcaatcaaagtactgtgcattccacaaggatgtagaacataccacaaacaagtacaaatctcttataaggaaaatacaaacaataattaaagaaggaggattccacctaggggtgtgcagaaagtcatccaatccaatcccaaccaaccgatccaatcccaaccaatccaatcccaaccgatccaatagaatcggatatccaatcataatt

SEQ ID NO: 163146 - DNA, 2979 bp, Cannabis sativa
  modified_base (82)..(104): a, c, t, g, unknown or other
attagggcctttaatgcaataaacgaagagtttattcctcaaaaagaaaaattggaaaagtgaaataataataataataatnnnnnnnnnnnnnnnnnnnnnnntaataataataagggtaaatagtgatataagtatccaaaattttgaatttgtaagcgacataaaattaatgattttttttagcaagcataggtactcaatgtttataaaactataactttctttcagtttcatcagtataaactctattattgtcttaaacatgacacatataaaacctagattctaaattatttggtttagagtaaatatgtagtattggttactttcaaatcttcttttactgacaaaaatatagcaaaattataatttattttaataataataataataataataataataaagaaattgcaagttactactcaagcatagaacaacaacaataataataataaagaaagtcaatcaaagtgagagagaaagagagagatagagagatggcgccgtagttacagtaaagagcaaaccgaaggaaccaaccaaacacaagcccaaacctgtcctttgatagtctccaaaggatcatcactctcttcaacacacctaatcagctactcttctccttccctataactatattaacacccttcactctcttcaaccttccccaaatatctttctctttctctagatttctccgccatggctcactccatttccaccctctctcaggtttgtctttgctttttagataccctttgtttggttctcgagaatgttgaggaaagtgttaatctttttctttctttattggttttctgatattcaaatcaacttttgcttaatgggtttgtttcgttttgaaggtttctgtgactcttcccgttggaagtgattgctccctcaagcgatctgtgtttaaggtttgtttgctgatcaattttttttttttttcaattgaagggttttgtaatctagtatggacaaatacctgtcgttttccagattggacaaaacatgattttgtaattgaaaacattcaatttttggatatttttgtttgttttgttttacaatagattgattgttttccctattcatgttcagtggtattagttttgatggcactttttaaagttgttcctctataatgattttaatggtcattagtctcaaacaaaatccatatgaattaataatttgtgtaaggacaaatgaattctaggttggaccataaagaatttaatataatctgagccatggtgtatatgctcttctatatagttgatgatttctcaaaaaaaaaaaaaaacttgttttatttgttttttgcagaccaatactctaaactttcctgataaatctttggcacctacattatctttgaacttcaagacaaagaatggggtgtcaagagatcgaaaagtactgtgtatgtctgtgcaacaagcatccgcgcctaaggtcgctgtttcgcctttacaccttgaagatgccaaagagcccccgttgaatttacacaagcctaaggaaccttacacagcaaccattgtttctgttgagaggatagtgggcccaaaagcacctggagagacttgccatgtcgtgattgatcatggcggcaatgtaccttactgggaaggacaaagttatggaataattcccccggtaagttgtcaagatcattacgtataatcttcgcgttagatctcattgtgaaacattatgctaatacaaacaatatatttgttttcatcacagggcgaaaacccaaagaaacctggaatgcctcagaatgttcgtctttattctatagcatcaactaggtatggggatttctttgatggtaagactgctagcttgtgtgtgcgtcgtgctgtttactatgatcctgaaacagggaaagaggatccttccaagaatggggtgtgcagtaactacttgtgcaattcgaagcctggagataaagttaaagttacaggtaaatgaatgtcgagtatggttctgccatgaaagggttgtttttgcctctagaactttagttatggaaggtactagttaggggtatttctttcaagtaggtttagaaaggaaccaaggaaattgaaagcagacattattggctaacttatttgtgtatggtttcacttgtcatgttcattttattttggtaaagattgatgaaacatgtttcttctttcctattattgcaggcccctctggcaagataatgcttttgcctgaagataacccaaatgccactcacataatgatcgctactggaactggtgttgcaccatacagaggctatttacgtcgtatgttcatggaatctgttccaactttcaagttcggtggccttgcttggttattcctcggggttgccaacaatgacagtctactttatgatgaagagttcaccaaatatctcaaggactaccctgataacttccggtatgacaaagcacttagccgagaacataagaacaagaacggtggaaagatgtatgtccaagataagattgaagaatacagtgacgaaatctttaaactcttggacaatggagctcacatttacttctgtggactcaaagggatgatgcctggaatccaagaaaccctcaagagggttgctgagcagagaggggagagttgggatgagaaactttcacagctcaaaaagaacaagcagtggcatgtcgaagtctattgatactacatatatttgttgaccacattaagcatctccattgctatctaggcttacccagataatgttctttcatctcatcccccttctgatgagattcaaggagtagtttgagtagtagtactgttgtcattcatctgtattaattgttgaataatatgagagaagaaggatttctcgggggatgaaacaaattgagaaactattttgaattggccatttatgagtattaatataatatgcttgtactgcagctctgtgta

SEQ ID NO: 163147 - DNA, 1911 bp, Cannabis sativa
cttggctcctcccttggttgctttggcggtgtccattgctgaaacgaaagttggaagcttttctctgaaatttaggttctgaaaatgatcggagttggagggaatatgattttgttctgcgttgattttggtgggtacggtgggtgtgagtttatataggtgggatgaaagggactgccacgctggcaatccgcgaggtttcttttggaccaatccgatgagagagattatggattgaaagggtatgtaattgaaataatggatggcacgtgactttcagacactctagctaaaaaaatggtctgccacgctggcaatctgcaaagtttcatttggacgaatgggattaaaggtacgtgattgtggggtttaatgaagagtattgccattatcaaagaaaaaaaaataatttattatctgttagggtaatcaaatctaattattattttgtactatctgttttataaaaaaaattaattaaactttttattttgttagatgataaaataaattttgtattttctaaaatagtataaatagaaccctaaattaatttctaacaaaataaaatttaataaaaatttgatataaatgtgttatgagaaaactatttatattttctatattgttaagaattatcttcaagctagttatcttaaaaaaaaaatagttgtcgaaaataattaagctcagggtcttattttaactattttataaaatatatggtctattttaccatttaacaaaataaatagtctaatctgtaacttttgcaaaacacgggttcaaaatagtatttaccgaataattaatcagagaaataaatcggtttaataataatttattttattcttaatttgtgtgggctatactaccattttcttttctaaaatttattaaataattgtatatgaatcaatatcataccattgattgtcatttcgtttaagtaaatatattcgaaaaacattcgtattgttattgctattaataagtgtatacgagtcggtttgattggattattgtgtattttaaccaacccaatataaatattggggttttgcctctatcatataaattaaaaacttggcctaaaagaattttctatccttgcccttttacttcgccttgactctacttggacttcatcagtttccttttcttgttctcgatcatccatcgtttaaaatgtttgcttaaaagagcttggtccaatcccattatctttgcaaggaaatatatgttcaaagaatgatggattctttgattccattatcgtattggtgtctcctgaaggaattagacttcaaagtgccctaagttttaagttcaacgcctccaacaatgaggcaaaatatgaagctttacttgtcagacttcgattgtccatggcaatgggagcatcccacgttgaggtattcaatgattcacaattagttgtcaaccaagtcttatgagaatattagaccaaggggaaaacatggaatcttacatctctgcagtcttaataacaactttaaggattcaaggagtataagatcagctaagtcctaagagagaaaaatgcccaagcagattgtttagttgcctcagataaagaaaaataagaattaggtgtagtctcaattgactaccttcacgagcctagcatcactgctcacgtataggttaaagtcacccatcaagaacccacttggatggatccaatgatcaaatatttgaacactagagaacttcctactgaaatggctacttgagaatgctttggtaccaagctctgagatacatcatgatggacgacaagttttgttggaaatattttaccaggatcttagatttattaacaagtatgttgtttaacatcctaatatatgaacttctaaaacgataataaataaacacatataaagt

SEQ ID NO: 163148 - DNA, 2727 bp, Cannabis sativa
agttgctttctcagcaattttttctccatggaagatcttaaccaagatgttcttgagagaatcctttcgtggctaccaacatccacattttttcgcctaacttcagtatgcaaaagatggaaatcagtggctgattcggaaagttttaagcttgcttgttcagacataccatcaagagatccatggttcttcatggttgatcctcaactcaacagaatggttgtgtttgactcagctgaaaagacatggaaaaggcttaatcaaccaactctccttaagaaaagtcctaaccacaactcaatgcctgttgcagcctctggtggtttgatctgttttcgaaatttgactggagatttcatcttatgcaatccagtttcgggttcttgcagccaagttccattgctcgattcgcctttacaaaatcaaaatctccatgccattgtgatgaacaacaacaaaatcaccttagtgtttggtgagttaccaaagctgtcattcaaagtctacaactcgaatactaattcgtgggaagaagagatcgaattacaacaattcaaggatgaaaactcagtaacagacaatgaagacaatgcagtttacttcctaagcaaagctgggaatgtagtagcaaccaatatgcaaagaagcccatgtaagcaatactcatcagtcataacaacaaatcaaaatggtgaagagattgtttatttcctaagctcaacagggaaagttgtgtcctgcaatctcaacaccaagacatttttcgagtttcctagattgttacctgtgttctgtgagtactcaatcgatgttgttgaatgtagaggcaaaatgtttgttgttcttttgtctgagttctttgagagtgccagcttaagagtctggtcctacgacgaggcttcccgagcttggctccaaatcgcggctatgccaccggcattgtcacattgctggtatggaaagaaggttgacataaattgtgttggagctggtgatcagattttgatatgtttgaactctgcagaggtttttagctatgttgtttgtgatttggtgagcaatgattggattgagttgcctaagtgttgtgttgatggtaaagctgtggatttcatgtctgcattttcctttgagccaagaattgaagctttggtttgataaaacattttatttgacttgttgaagattttagaattgacatctttcattgtcataatatttaatttaattttaatttgttatgtattttagattctttgacgaaaaaaaaagaagatgccaactgaaattggcttgtaactgaatttagtaagagtgattgtttgattgacatagtaagacaaagttataatctttggttgttttatgattgtagtgttattgtaatgaggaaagtttttttttttttttttttaataaatttgtttattatttatttggattgtttgttatatttctattttattctctgattttttttaattaattttaaggtatatactattttgtgtgtttcgcaataggatcttaaattcaattttctgcaatattttttttaatataaccaatttgaagataatttctaatatgaacagatgtaaaaaatataactagttttgtcgtaacatttctaaatcggattattattaagttttattttgacaaaaaaacagtttatggtactatttataccattttgaaatatacagattttattttgtcatttaataaaacagagagtctaattaataacttttgtaaaataaaatctaaaacaatatttatcctttattttttatatattttatttgtcataataaaagatatgtcaattgtcaaacacgagtagaattttgtttttactttgaaaaggaaaaaaataatacataagaaaattaggtataaaaggagaataatttcaattatcaaaagttttttctttattaatttattatttctttgttttgggggagttttattttgtaatctatttgattatttttattttgtataaaataaatatttttaatttatcccaatttttcttttaattttttcttgcttctcacattttagaaaaatacatacataaaataaaatacattttaatattcatacaaaattaaaacaaaaatatataaaatgttattagactaataaataaatgcagtttctacatgactaagctaccaaaacatcgttaatttgtactaagccctaaatcactcgaatttattttttgaatactctttctccaaaagagttaggcaatcgcttaaaagttagtttggaggagtaatttgagatagtgtctgcaacatttgctagaggagtttattgtatatggtacaataagaacctttgttattttgagaaacaatgttctataattgattgtgtagagaagataattcagagatgtattaaagggagattatctttgattaccaccaagaaggcctctgctaaagagaggagagttattgagcttgttgagcttttgtaatgtggttgtaagttttgagagagtctaattaacttgtgctaattttgaagttaatttgtaatagtttcgattaattaatttactttcaccataaaaataaggttaaatactattagacttgtgttttacaaaaattacagattgaattctctgttttgttaaataataaaataaactttatattttctaaaatagtaaaaatagtatcttgagcttaattt

SEQ ID NO: 163149 - DNA, 4744 bp, Cannabis sativa
agtgggctcacttgatcaatattatcattcttgtcattgggcttagtagttaactcagcttccaacattatcctaacaaagggaccggccccaggcccactacaatcgggcaggcccactccaacctcagtattaaaaatactcggcccaatagctgccccacacgaattaataggaccagcccatggaccacctgatgtggaaataacattcccaacacataagttatttcctaatttatttaaaacacctgtgggccccatctgtacacgcggcataggaagaggagagaagtcatctcccttacctctagacataggctctaaacttggaaaaatagcagacccctttccttttccatttgaattacttctaaccccattagcaaaaccagaatggcttcgtacaccatctcctgaccgagtcttgggaacccattttttccttgatagcacagctttcccagacgacggtcgagccgtcccactcaaatttttcctcgagcctcgcaccacatcgagcgtctcttcctccacggtatcaccgttaccattgccagtcgacgtcccaacaggaggagggtgcacaggcagtatcgccaaacactgcgccggcaccgactgagacaaatcgctggaaaacacatcatgatatttggaagcaggggatagccatggaccaaacatgggaaagggggcacctttgaggctctcgacagtcaccggagaagacagagaacgtcctttcctttgatgaaccaaacatccacaaaaataacagaacataccaagtttttcatacttgaactgcaaccattttttcatcccattagctaaatcaaaatagcatccagaaaccagtggtttatcaatattaacctccaccaacaccctgagaaagaggctccatgacattgggttgtcttctaacaactcaactttcatcactttgccgatcaaactgcccaacagatggccgtttgcaatagagaagaactcatggggtaagttgtggatttgaacccataacttgatgctatcaatggacacacacccctcacagcttggactccacatacgaagcgcaaaggtataacctttgaaggaccaaggaccatgttccaaagcccaatccctatccacattgttctcaaaaccaagcttaaaatagttcacaccagagtcggccagagaactcactacaacccttttctgccatttttttgtcacctcatccgtgacatctccagcatccacaaccatgggagccaccaccttaccaactaagcagagagaagacaatatctttagggaagtggcactaggggacagagaaatagaagcctccatgcacgtaaaggcttttcctttaagagatacattatgagtattaactatatccatacctacccgacagccgccgacaaaaggaaggagaaataaaagctacacaatacaaaaggaattttccccaccttaccaggacacactcacacaaacttacaaaacacacacaaaaacaaaacaaaacaaccccaaagacagcaaacaaaaggaaacacacgcttaacacgagaggaaggagcagacccaaggaaaacgagagaatgacaaggaaacgggacccaaaaaaacaaaacacacacggaagaaacactgggagaaacctaacaaggatcaaaaggcagggagaccacaaacttaggacaggagcaaacacacaatgagaataagtagaagacccgttctcaggaagagagaatagttaaagaccattctcccaagtaattggaatcaataattaccaaaaacatatttagtagcttgtaatgatcatataaatggacactttattctttaataaagttctatgtaaatatatacatctataattatcaagagggtaatattaccatatttatagtggagtaattatgggattaatttataaatatataattatttaatcaaaaagttttgattagtaataatacaatatttattggagcttaaaattataagttcataagttctcaagtggctctatcaacatcatattaacataggagttgatacatggtaatttgacaattgtaggagaattttttcgtcacgtcaaatatatatatttttacgataaatgaggttcaatgattaattatagaattaactattaattattaattttggatttgaataaatatattatttctaaatttatgaggtgaaaaagaaaaaaggattaattttgaaattaattattttatttgagttggagaaaaaaaaaagtaaaaattattttctatttatatatttaataatgacaatgtaaaaggaatttgatattttgaatttagaatattattatgttctattttaaaaaataaaaggttgaagtatttttgagttaattatcaaaatatttactccatatgtgatcatatggactaagtacacattaattattaatatttgaaaaataccaattgttaaaaaatttgaattgaggaaaaaattgagctatgctaataattaaggtacgtacctttctacaaaaagagccatgttcttttacaacttgtctcctcagtatttcgcactcaaattcatcgagcacatcgatcacgtcatcaaaaacatttttaagttgagcgagccagtttttaagctctctactttttccttgcttactttccacatcaatgagcacatcgccgaggttagacatgatttgttgaagctgtttgaggtcatctttcatgctccatgccatgttaaactcctcataagaaatggaagctagcttattcaacacatttaaagctatactggaaactagctcagccatattgaaagaacaagtgattgaattttctttcttcacaacaatatttgtgggtggtgagaaagaaatgttcaagtgcaattatttgtctatatgtatatatatataaatatatatatataaattattcttccttatgtgacaattttataatattttgtacacaagtaaagaatgacttttttttttggagtgtatgcaacgttaaaaaccattccttattcttaaaatgttaattggcttcatagcaaaatcttctacaatgaagttatatatagttgaagaaatataagtgatactattcttaatttttttttttgttttttgataaatcaaagatgtgtattgttcaaaaacttttcgtaccacctaatagtattctccaaataagaagaatctaaatatctttaaaactttacaaggtatcaaactattttttcacacttctagttgctgtttttggtcatatacatgtaattttctttttcactgtgtttttcactttgataattacatattctacattagtattagaattttgccataaaactgtgtttcttgtgcaccatatttcatagacaagggctgcaatgacagcagcaaaaattgatctcttcaccttacttattcaccttataattctttttaaggtagtggcagtcattctccaattcagccatgatttcatcttttccaagcattctaagaaaaaagaacattcaaaaaataggtgtgccactgtctcatcttcagtgttgcaaagaaaacatttagaactctcaagttctctatactggaacctgtcttttgttttaattcttctcaagtcttgttttgtttgatcctttcgaaactaattttgtaagaaaaagaagtttaggtgatgtttgttttgatgtaatgtaatgtaatgagaatagtaatggtaatatgaattgtaatggaataagaaaaataagtgtggtcttccctaaacctctcatcccaattacaaatataacatatattatttgattcttactttcttgaggttgctcctttaataccatactcacgatctctaccaataatatctgaagggttaacaaaagagtgagccatcatattgttacgaaaattataaatagtacgtaagtgcacgtaatcaagtagtaagctcacacaggtgaggtcgaaccacagggaattggattgagtaccactagactaaatctatgtttctatttggcaaatcaatatttttcaagtttaataaccgaatcaaaattcaagaagcttaaatagacaataaaagttaatcaagatgagaagatagggaagagaatcctattgataggtttacccaattgttaatgcctaattactattccagtatctgttgtgaatgacagattattcaaattaacctagctcttttcatatcttctaggttctaaatcacatgctctctaattactctcttaattagaatcacataaaatcagcattaagcaataatctaaattgtcacataagtcatgcaaataccttcgttttacataaacctaggttgtccaaattttagcattctcaattctcacttttcagatttttaattgacatcatagaccatgcaaaagatgatcaagatttaacatggaaataacacaaataaggataatttcaatatcagaatgaacaggaatggcaattaacattaactagggtaaactttaacaaacattcatcatcttccctaaatggaagactagctcatgttcaataccattccaaaaacagaatttaacataaagtaattgaaaaggaaggaagaaagaaactgttggtggaatgaatctgggtctccactttgctcctccagccgctcttgactgctttttaggtctccaaattgcttccc

SEQ ID NO: 163150 - DNA, 1425 bp, Cannabis sativa
agagagagagagagaggagggagattgggagggggttggtgtggtgatgacgagtgagagaaagagtagtttgtgaaaaagtagtgtggtggtgctggtccatcatatggtggttcgtcggcgagttcgggtttgaagggatcaaaggttgagattggaagagagtctgaggggatcaaaggtttgagagattaaggaatatgatatcgcgagttgggatttttatttaattccctttttcccgaagattttgaatcgtcaagcaaagtatgcgccacagccaatactttgtccgacggttctaaaccgtcaagaatagtggtttattttttttttaattttcctatgtacttttaaaccattgcctattttatacgaatgttaaaatcgtcgcctatactatactataggtaacagtttttaacacttagttaattttttagcgacgatccctgaaaaaaaatatttttaagaccgtcgtgaattctgctttttgtagtagttttgattatcacatcagtgtcaatttggtacgttgataaatcatgagactaatattttgaagtagataatcgtgattatttttcactgtgtagataacactttaattatgagtaactatatgttcggaatttaataaaatttatatattaaacgtataatcatgaaactaatcatgtgaaataagcaacataaaatgatttatctttcattgattagtagataagaatatattgaaaatagttttatttagaggacaaaatccttacagtctcatctccgaatttaacaattgtaaaatcaacattcatacgctcaatcttttcaataccaagatgctcccaaattcttttaacaaagccatcaaacacatgaaaaggagagttagcccctaaaccaacacatacaattgcagactgccaatttgaggattcaatcaattggggcaataggcttatcttctttcaaaggattttcatagtgtggaacttagtacctgaaatcacactttggtggttactgaattttgccagctagattgtttgagactgttctcgaaatctcttacattcattttccttagcccaagagtcaggttgtagcttcaccaacaggcaattgttccttcgacaccggtgtacgcaattcacccaaaaatttcgcaagagcttcagaccttgtcagaatcttcatgccctgcttctcaattttgttgtcccccatcgatttgcccactaaaaccgaaattagcttcttaccctcacctaatttcaagatcgattttatatcaggtttttgaatcacgtttgcctcagcaccatggagaaagagaactataattacctcgcctatgaattattatatatatatatatacatctttatatattaaaagtgcttatctaacggtatttcttggtttaac

SEQ ID NO: 163151 - DNA, 3568 bp, Cannabis sativa
ttattattgctgaatagcttctcttcgaccttgaataactagcatctactgcaagtgtgcaaccccgagaattagaggagccctctccctcttgtatcgacctaatcatgagatgacacgtgtccaccaggtggccggacaaatgatgtcgtaaaacaagagacgacacctgagaagaacataacacaagaaacgacagtcgaggttgcacaatacaaaaagacaataaaaatagtttaaaaaaataataaacaacattttttcccttcaactatgagggtagtagatttttacccaaccaattaattttttttttgcaaaaattctttctctctagttatatttggttcattttttaaattaatttacttattataactatgagttacatgtagaaatataatactcatagttattataagtaaattaattttaaaaatcaaatgtacctacctactaactagagggtgtggactgtagaatatttgtaaccatcgttatagttatgcagaaaaaattaaaaagggcaaaattggttatttaacagtgaaacgacatgtcgtgcattgttcaggatattttggcaaagagagaaagaacaaacaccctgactgaagagtctgagacttgaagcaaagcagtcttaacttagagacgctactagagacatgcaaaccttatcagtggcttcttcttcttcctcgtcttccttaactttcggactgagacttagggcttcatgggacactcaacaaatggtttcttacaaccccaatgcccccaaaaaccccaagaaaacccctcccgtctccaaaaaccctcccccgactgtcaccttaactgcttcaaccgcccgaatggtcgattccatttccgaaattctcaagcgcccaccggttccaccgcctcaaggtacttccttaaccatataaacccacttcgctttagcaaaggtttatgctttttctgaactttcatgtttgtaattctgtttggtcacttcaaaaattgccgaggaattattttcttagccttcggaggatgttgaatttttacagctagtttcgtttttacttgcgtcaagtggggttttaggggttctctttgggttttaagaatatcgttatattatcattttcccctctaagctataatgagattttgattttgattatggatatggtaattgggttttcaataaattgttccttgtttatgaatagggttttcattttgcagaaatgaccaaaacggatgatttatacttgggatatgaaaggtggttgcctagtcctccaaaagtgaagaagcctcgttccatttacaatgcagcagcattagcatatcttggcgattgcatttacgaggtctgtttatattcaacttaaagtcttaattaatgtactgactctcctttgaaatcatcataataagtgactgaagtgcacagtatcagatttgttttttctgatacaatataacgtttttgtttaactagtatttcttgtgaattaacttactaatatcaagatttgctaaatatgcagctatatgcccgcaggcatttcttgtttcctcccctgagtattgaagaattcaatgatcgtgtgatggcagttgtacggtgtgaagcccaagtatgaaaaactattaaaaccattcgattatggccttgcatttatttttttggctatttatctttttattggaagtaattgaattaacttttttatcatatcaggatgcattgcttcagaaacttctcagtgataattacctaacacaacaagaaaggttagtagaagatttaagactctctttttgttaaaaattgaaaaaaggctcttaatatgatctttgtcttctaagatatcaagtagagatagatgtatggcttccttatgctatgcttgcctttgtttttccttttaaagtgacctaagtaaattgggctaaatctaaaagcattcactattttcttttctatatactaaaatatctaatctaaaccgtctcatttaaaagttcccttaccttaaacgctacattgaagagtttttgatttgtatgtctccggttctgcagtttagaaatattgtcctgttgatgttggaagtacctgttgagttgtttctatgcaccattttaaaatcttcgcctttttccatgtttcaccaattggagagacaatattatactatgctgccatgatgggttaccgaagaagaattatatgggttacgtattgtattgaaataattcctataccataatttattggagatattctacttagacttgtaaatacttgctgcagggatgttcttcggtggggaaagaatattgggaattcagtaaaaacacggacaaaaaagcgtgcaggtgtagcagtttacaatagagcatcttcactagaaacattagtaagttcccactttcgcaaggcttcttatggcctattttatattaaatagcgatggtgttgtttgttgttagctgtaaatttgactgatatattgttatccttttaaaaattgtatactatgtggattgcggttcttattgaacactatttgctatctagtagataatttgattgtgctatattcccagaagaaaatgagaatagggaaaaaaaattgtactgttaatgggcctatgacagtattatggggaactattttatctaattaatgtcattgggcttaatacatagtaatatgtacggagaacagctagtggtaagtaattaaggatttgttcagagaaatcacaagtctgtactccctaggaagtagagacttttttaacttttcaccgatctaattgctcctcgtatttgtagattgggtatctctacctgacgaatgcaaaacggttggacgaaattatggttaagattggattctcaactgactcctcgacacagttgattttggaggaatcagtcggtaagttgctaatcattttctccactatttttgcctgtggttgctatatttccatgaccttattatttcccatgttgtacctctgcattgtagtttgattctgagcacatgagctataactctacctgtgttatcttaaaattaccccatttgtagttgagtgaagtatccttcttttctggcctagataaacattgttacactgtgaccaaacaatctgcttttatttgttattggcaggcaaaagcgcggacagtattgcaccaaggctttcatgaaatgcagttttgccttaatacttttggtgtacatgttataaatagttgttgtacctcatacagtatgctaaatctgtactttgaacaaaaagatatgtaaaattttgagtttagctaatctctgatcttaatttagcaataatttgtttcacttgcaaaataaaattgtttttaggattgtgtataaatcgatcaaatccaattacaatcgactgtcaaacattgtatattaattgtgatcggattggattggatgttaattttgaatatctaattggattagatcggatgttggatggggtttccaaaaatctaatacatttagggcttgtttggaac

SEQ ID NO: 163152 - DNA, 874 bp, Cannabis sativa
taataataataataaaatgtatgtcataactaatattaagggattatatctaccagccttaagaaattaatgaagtgtatatggtcccatgatcatgatgattgagttgtggtacttgaagaaagagctttgattatttgcttaggttttgataggttaatatcttgtaagcattcccaacttgtcagggtcagaatgaattttaggccccactaattattttagtaccttattcatatcattttatggtaatgaaaattttccactgctaaaaggtcttggttatgttttttttcctctttatcctcttcctgtttttagaaaggacatcttctatctagcttgtgtatgtttttggtttccaaattgagctgtcttattagctattatagatatttgaccaaaacaattcaaattgtctatattagattatctatgaaactttaaaatttcattgagatcaaataaattctttcaaatcgactagtatttacatattaggctcatatatacatatatttatagaatcatgtataatagtaatgtgggtgtatattaaattaagataattggagagtaaatcatcatgtgtcattcatcactctaatccaaaaaacaatatgtatagttaatttgagtcccatgtgccatgtttcagcaaagtgacatagattacttaaatttaattacatcaattgccaaagaacacacctaaggtattgagcccctttgttggacccatcataaccctccttcctcctaatatataggatgagatatattaattataatatacatttatatatactaggtgaatgtacgtgccgagccacgtattgctagttttatttaagattttggtctttttaagatt

SEQ ID NO: 163153 - DNA, 2576 bp, Cannabis sativa
tctaaaattatgatacaatgggcaccaagaaaataaatgtttggattagaggactttccaaattaaacaaaaataatgaaaggtaaatagtactaaatactaattattaattaattgtattgataaattgatataaagtgggatttgataccctcaaaggcatatatgttggtttgaagacagaaagaaagaaaagcagattgacttatgagaaagaaagaaagaaaaaatgtgataattaactcaaaaggcaaaagccaatttgctgacaatagagtctaagccatgcaattgtgccaatatacactatttggtatatgtgtgcacatgcatacactttcattgcttctctaatttatattttttttacatatatattttcaacatattatggttaagttgacttttttttttttgggttagtgttgatgggcttttatgaagaagtaaaacaagcactcttatcatcatgatttttcttacaatatttttagtggggtgcaccatgggacaccaaccaaacacaccctaatgatgccaactttaatgtacatatattctaccccataaaaaccccataggtgtacccttctcttctccccaaccattatatatatccctacccaaaacacccactaatttatagagttcatcacaaatttttgtgccaaacattatggctcttattaggatcaacacttctactactactacctttcttctactttccctccttacaatattattcctcattactctttcatcaggtaaattatctatattataatcatcttttattattgtatgtacatattatatataaatattcattattatgtaatttttatattttggcaggtagagttgaagggttcaaggtggccacttctactaatattcccattcaagcacttcaagaggtacttaattatattctatgaattttcaagaaatgtgtttgattatataattaagttttgctaacaaaatgcatatttttttgtattatttggaaaatgagaagaagggtataattacaaatacaaagattggtaggaagcttgcaatgattaaagttgaagctgtacttgattatgatgatgctgaacctaatccaaggcacgaccctagaaggagaagatcaaacccttaatttaattattattattattatattaataatactataaatatatatatatgctattattattatatattattatatctagacatgcatgaacctaaaaatcccactagctctttctctatctctctattcagaggttttggtattatgatcaaatatatatgatgaagagatatgttttatgttgttatcatctaaatgatattatagtttagaagtgttttttttatatatattattattattattattattattattagaagtagcagtattagtagagactacttgattgtaataatatactacgtgggtatgtaatagtacaaggcatgattaattataattcaaagtatgaaacttataactacatacatattatacttgtgtactttctattaagaaactgtactttccaaacgtagcctttatatatacataaacaatattaatttaacttttaattaacctaatagaccaaacttggtttgcacgagcatgtaaaagttagatatatttacatatataaatctataaaagaaaatattttataaaaaaagataattaatgctgaaaaaaaaatacatcaatctttttatattgaaaaatgggtctatgttattaattaatattagtttgccattcaaatatgttataccctaattcttatatttcatgatcatcgactactcagtagccattgatatctcaaagtaattacttaatggaacattaagatttattggttatttgggttgtcctagacaataatcttagtacaaaatcatatagcactaataagttacaaaatacaactgtttgtttgtaactaagatatggtaatcttatttatcagaaaaaagaaagttgtcaatttgcacaaagtatctaaaattgtatttttgaaaaaatttatttatgaattttttttacttttttacggacgtttatttttttcagttactatttatttttaaataacgttaatttcaaattgcaaaaacattatatataatgttgttacaatattttttcaaaacaactaaaaataacggtccgtatttttataaaatatagtaacaataattcgtaaaaagaataatagtagattcgtgaccttaaaccatctttaatgtaaggacatgcaaaccaccttcaatatcaagaaattacaaattttattagttttaatatatttctgtgcacaaatataatttttttcaaaaaaattattttatggaaaaaattgaagaaaaaaattttaaaaaaaatgagaaaattaagcaaacataaccaaatactcttagggtaaccagttaccatagggagtgtaaccagttaccataagaagagtaaccgtttaccttatactgttttcgtatattttttaacttttttctaaaattttctcataaaacaacttttt

SEQ ID NO: 163154 - DNA, 2186 bp, Cannabis sativa
aaacaaataaattaacaaactaattaaaacaaaacaaaactaatgtagcatactgatcattttatttgttttatgtacttattcttattttgggtcagattaatgctaattactactaatatatacacataaaattactcagttttattacaaatagattattaatacccaataatgtaatagacaagggaccctcaaagacatgcccacatcatctccacccaaatccaagctgtcataaaccaaaagcaattcccattattaggactacaaataagaccacgacccgctcttatgatcttcaccattaacatttatatacccactaaaaactactaagcacccagtactgttcgtcaaaatgcctcatcatcaccaaaaatttctcctcctcttcttcttcttcctcgtggcaaccacatcccacgcccacaacatcacgaaaatcctagccaagcaccccgaattgtcgaccttcaaccagtacctgagccgaactcggctggcggccgacatcaaccgccggctgaccatcacagtcctggcggtggacaatgcaggaatgtcatctctcatctcaaagggctattctctatacaccattcgcaacatcctctcactccacgtccttgttgactattttggtgcgaagaagctccaccagatcagcaagggctccaccttgacttccagtgtcttccaagctagtggtgccgccccaggcacctccggcttcgtcaacatcactgacctcaagggcggtaaggtcggatttggtgttgaggacaatgatggtcatctcacttctcactttgtcaagtccattaaggagattccatacaatatctccgtcattgaaatcagtcaggtaaatattatatatttgcatatattttgttaatgtgatatgcatacatacataaattatatacatgagattctgtcatttcaatttgctaaagtaacaatacaaactacaaaactaaggataatagtcaaagtctttagagtttggaggacagactgtaaaggcttgtaataattgagaaataattaaggtataatattatatagaacaaaattgatttagtttgtcttttttcaacaactacaaaaagagataaaaaaaataaaaatgttaatttgtattatataatattttctgaccataattataattaaaattcctcaaatatagctgttctgatcatctgatgccgtgaccatgtgctttttaagattttacttttgctattattaattactgtccaacatgttattactatggtaagtataaatatgatgagatttaagagctaaatgcatcgatccttttagcaagttcataacatataattaatatcatataataattaaacatttaccatttgattgatcaaattaattaattaaattcaggtgttgagttcggccgaagccgaagcgccgacttcaggaccaagcgagttgaacgtaacgactatattgtcaaagcaaggctgcaaatctttcgccgacttgttaatagccactggagccgacgccacttaccagtccaacactgagtctggcttaacggtgttttgtccaacagacggtgttgtcaaaggtttcatgccaaagtacaaaaacttaacgactgccaaaaaagtatcgttactgttatatcacggcatccccgtttaccaatccatccagatgcttaagcaaaataacggagtcgttaacacgctggctaccgaccgtgccaataaatatgatttcacggtgcaaactgacggtgaagacttgacgttagagactacggtggtaacgtcgaaggttactgggacgttgattgacaaggagccgttagccatttataagctgaataaggttttgttgcctaaggagctgtataagccgactgaagccacttcgcccaaatccagtagcgatgactccgacgacgaagaagccgatgccccagagggtgattctgatgatcagacggctgacgataatggtgccgttggaataaacggtgggagaatggctgtggtctttttgagcttgtgcgtcggatttttgcttatgtgattaatgtttgtacgttagtaattaacgacgtcgttctctaaaatcaaccatgttcataaacacacgagctcttcttgggaggggctttgaattcttttttttttttt

SEQ ID NO: 163155 - DNA, 1085 bp, Cannabis sativa
atggtaaaggcataccatacctgtatctaggatcttcatcaccagcactagcatctataacaccaaggttccatgaaagtgaaaccaccaaaattaaaatagccaaaaaacgtcgtaacatcttcctgttcaagcaatttattagagtctcacttcggctggtgatatatactcaatccacttattaataaggtgaggccaatcctcccctaacaagtcaatttcgttacgcctaataactttcctaatacaatttaaggtgaattatatcattatgattttccaggaaaattgaaaattgaaagatgatttagggattaaataactatcggagaagtgtaaaatcataaataactaatcaagaaacttgatcatcatctctctaagctcatgtagataaggcagccttaatacttccatcaaattcccaaacacaaacaatgtacagtcaggattcaatttccgatttgggcaacaaataatcgatatcatcattaatcagatcaacttatacacatatataccacaagaaaaatcaatgtgttacgaaacatatgcttgagagaatcaacaaaaaaacgatatatgtcaaaaactgtaagaacaaacaatgtagaagaatcagtaatagtaccagctgctggagagatcgaaatggagatggagagatagacgagagggaacatgagaagcggttcaaccgctggagtgatcaccggagcaattaagcagctagcttaccggtcggtttttctaatcaaaacagaaaaaccaacttttgcaaaaagtaacttacaaaatgaaaagaaaaaaatattctcacatgtacaaatttcattcaattttccattttacattcaaaatttacactcaaccattaaaattcttgaatttatgaatttttgtgtagtttattcaattttattaatttattgattatttatgtactaaattatatcttttcaactttgatatttatcgaaagttaattagtaatttttctccccgaacttttacatatactaaattatgctcctgaattttttttgccgttaaaaattcctcctgaattattgagattgtta

SEQ ID NO: 163156 - DNA, 1180 bp, Cannabis sativa
tattttcgaaattatgtacaaatatttaggttgttttaatgtatacaccagtcatgattcctcatacattacaccacctgtacacttgttaaacaaggagtataagtggtaaattattgggtaatagttgacatagatttttcttatatatatattgatgcttgaaaaataaccaaataaaataagaataaaatgagatcatatgataagattgaagtcaaagcatttattaagtcggtcaatcattaagtaagaggaactcaaacgtatctatcaagtagagaccgtaccgtatgatacatttaaaacagaagttaatgaagttattttgaaactagtattcctccaatccaacggtgagaaccttgaccggggtcatggtctttgtattgtggagtgtgactggcataaagactgtgaaggaacttacatatggagcccaagtcggcgcacgcgaactctgaaaaattgcagtaacaagctaaaaggctattaggaagtgacacgtggcatacccccattagcctgaagattaaacgagagaaatgattaaagctgcttttgactttcttcttacccacttctcccgttactctcttttgatatttacccatctgtgtttagggttttttcataataatatttttcttttacataaaagagtcaggtaccaaaaatgaattcgtgttgggaattgaagtacttttcaaatagctatgagtacggcactagtaaggatatgatgttgtggcagggggtctatatagctaagtaataatgcttataattaaagtggtacagtggttgtttttaacattctccaatgctaaaaaaagtttggtttcaagcaattatttatttatttttattttaatttaaacttttacatgatattataaattaatttttttaaaacatatctactaaaattatttttttaaaaattttaatatattttatttatttcaaccatataatattaataaaattttaaataattaattaaatatatttataataataaatagtatcaatttatttatatatataaaaaagagatataagacgatgagatgatatgagactctacaatatctctaattagtattatttgttctcttattttttttttaattttttattaacttcataaatcataattccaaaatctatatttaaa

SEQ ID NO: 163157 - DNA, 1945 bp, Cannabis sativa
  modified_base (1788)..(1792): a, c, t, g, unknown or other
ccttgttgatatgatgatagtatggtgattgattctgttgatatttgctacttgcttgatttgagggctcaaatgaaatcctatatttggacagagacccttcaatgcgttcattttttttattaatagagatgataagaaatagtactgatagggaaacattattgatatcataatctcgttaaacactactaattttggggactcatatgaaatgttataattgaagaaaaacctttcttcttttttattattggagatgataagaactgttacatcatttcatgatttttagtaagcattttacaattagagtggaacacttttgtgtgaaaactttcccacaacaagaactcctctaatagtttaaagaatttctgcatataaatttacatgtgtgttgttttttagctagcgtttggtaatcatagtgagccatctttttgttacaagacttaccttaatgaacatgtttctcgaagtcgcttcaattttttcctgtaatactcattatgaacttaagttataaggtgagatgctattctcatcaatactcattatgaatgtgatagcttgtgcataagaaacatgtgcaagaattccaaggttagcataatttattccctttcttttaatttcttagtctatcactttgaggccacaataatttaaataattggtttagtcataaacaaaactgccaagaaactcagcacatgcttcaggagctgctcttgatagtctagttaccattcttgaaaatcaacacactcatcagcccctttcactccaactttcaccagcaaattccaactaataagaaataacacaaaacaattcacaattcctatttgtatatgtaatttaaacaaacactaaataaactccaaaaatcccaacactacaaaaatttcaactatagactgagaaatcagggaaaaattgctttgataaaactctacaaatgtattgataataccatatcctaaatactatctctttggttcagcccaaccttaagaaagcagctcaattatactctatcccaaatactatttttgattttctataaataaaaaacaaaatagaatgctatttttggcattcttttggccatacacatattttttttatgagaatttttgaaactattttgattatatatcatttattttacaaaatacaaagttgaaaacttaattcatctaaaagacatgaatgaactttcaaaacaaaaaacacatgaatgaaatattttatattttttattctacatatatatttggttaaagaagggaatctaagagtaaaaaaaggtatttaatgtagctgattaatctggtcccttcacttgaataagtttctggctaattaatttctgccattgaactttaccagtagacaatacattatcattttactgtttatttgtgcaaccagacaaaccatacatacaacaaaaccatttattcttaccatataatcctcatatgaaagcatcattattctagaaatttattatcaaaacttaattaatatatatgttacgaaaattatgaaccaagtatacgcagtcaagtagtaagctcacgcaagtgaggtcgaattacagggaattgaatttttaactactaaattatatttatgattctatctggcaaatcaatactttttatgaattcaataaaaataattcaaaaacttaaaataacaaaagaatattaatcaagatgagaaaatagggagaagaatcctattgtcagtttaccaatcgttaatgcctaattnnnnnccttttcttgaagtgaatgacaaattataaattaacctaactctttttagatcttttaagttctaaatcccatgctctttcattaatctcttaattaaactaacatgaaatcaacattaagcaataatctaaatgtcacaaaggctatgcaaa

SEQ ID NO: 163158 - DNA, 3478 bp, Cannabis sativa
acaaaacccaacaagtttcccatgcatggtttcataaactaatattagcactattattctttaagtttttatgttctaaggctgacaactccctttttgcatgtcacactgctcaacacacactatttgtattagtgtatgttgatgatatttttgttatagggagctcaactgatgtaattcatgccctagtgtctcagttgcattcttcttttgcattaaaatatctcggtaacttagcatacttccttgggattcaagtgcatcatacacaatcaggtcttcatctatgtcaaaagaagtgcattgaggatcttcttaccaaagtcaatatgcaggaagccaattcttagtcaaaacctatacctagaggtgaaaaattattagcttttggtaataatcccatttcatatccttttctgtatagaagtacagttggagcacttcaatatgccacaattacacggcctgaaatcttatatgcagtaaacaaagtatctcagtttatgcaaactcctttagagtctcattagaaagttgtcgaaaagatactgagatgtatcaaggattctttagaccatggctttctcattcagccatcttcctctctctccctcactggtttttgtgatgcagactgggcatcagatccagataataggggatcaacatctggcttctgtgcatatcttggtcctaatcttgtctcttggtcttcaaagaaatagaggactgtttcgagttccaacacagaagctgaatatagaagcttggccaatgctacagttaaagttatgtggattcaagctttattgatagaaattggttttaagcttcagcatcctccaacaatctagtggacaaccagagtactgtgctaatgttagccaatccatttttgcactcaagaaccaaacatatagagcttgacctatactttgtattggaaagaattttgtccaagtaactctttgtcaaacgcactccttctcatgattagatagctgaaattttaacaaagcctctttccagcacacggttgttccttttcaaagacaaactcaacttagtgttcctaaccaagctgagcttgtgggggtgtttaagactcattatgagtctgatattttctgttatttatacagttagagttagttatttgttagctttttgtcttcttgttttggttagcttgtaactaacttatacttgtatatatacaatgagcatatttctcatatcaataacaaaattgattttagctcattctctctttctctctttctttctgttacattctgttactctcacacatatcttgtctcttctcctgcaacttaatggtggtttgcttgtgttaagtgtacaaccaaagtcacacatttgactcgaaatgggaaacatcttaggtatttaaggatgaacactatctccataagattgatggggttttcatcgacaaatttctcctaatgctgaactctactggtcggatggccgccagcttctgacgtctccccatttctcgcagtgccccgctgggcatgcactgtgggaggtgggttaacgtcatccatgacgacatcttaaccttgggcaatgggttatacaacagtggtttttctggtagccaccattgttataaatacaacatagcttcaaatctttcttcaactctcaatgaaagtaccaaaatatttactgagatttttgaaagtcgaatataaaagagttaagaaattaaactacgtaataaaaaataaagatggatgtttttacgtggtctgggtgttaatgaaccctagtccatgagtcaatcatatttgactaagtagccttaatgtattatagtggagttctttacaggcttaagaaccatagcttcttgctatagtgtttacacaatgaatttccaaccctttacatgagggtataatgtggtatttataggttagaatctgggttcaaatatatctatgacccgctagggtttgcatgtaagtatgacccactaataaggtaaatacataaggtatgttacctttgggcccacgaactgaggcccaacccatggggcggaggcgattcgtatgcttggggaccacgcgatattgatagatggcttgcgtgtgccgctcttgtgtactgtagtgtcataatagtggttgtcgaacaaaagggagatttccttttggtaggactcgtatccttaggctcaaacacagggcacaatccttgattcagtgggattcgatgtcactgggtcatcacgtcatcatgtacaaggattttgggatgcctcttcaactgcccttccatacgtatcccagatgctcatccgaagggtctcaactgcttcttcatattcgggcaggatgccctttcggatccaaagagatccaatcttggatataagtatcttgggcctcaggaaggtttgaggcccatccttccatacaaactagactagtagtctcgctagggcctttgaccaaggcttaaatgagtaatctcgcattggaaatgccacgtatccccttccaaaaatacggataacagcatttatctacaattttgttgttgtactaaaacaccaatgttattggttacatatttcttaaatgtacagtaataaaatttttagaaaaaatcactcaatatgtgtaattggatatatacattattatgtttgcgaaagaatgtacatattatttgttgctattacaatgaactataatctttttgatgaaaaaatagcaaaagaattttagagaaattctccaagtttttgtagcttttgaacaaattagagttggaagaaattgatttgttgctctttataattatctattgcagcaatatgttgagaggaacgaaaaggttgttgagcttcaatggtgattttgaaggttgtgtttctgtttagatcaggttaacgaattttttatttttagagcttcaatcatgatcttccatgattaaaatcaaattttttgttggttgattatttgtttttttttttttttttcttgaaagatcagttcaatttttttggtagatctgtaatggtaaattgaaagatggaagatcatgtgatttgttgatcagtcgctgtgtttggctcgattattaaaatcggttgaagattctgatgagttttttgtttagaattcatggagcttcgaatgtagagttgcagagctataatggcggtggtgaaaattggttctcattttttatattttgtgatagctgtatatatatgatttgttataagggtgtaatgtgcataaaaattgtaattttgttgcaatttaggtatattaataaaagttaccattttttttaaggtaaacactattttggaccttgcgttttacaaaaattaccgattgtaccttgtgttttgttaaataacaaaacagactctgtatttttcaaaatggtaaaaataggaccttgagcttaatttttgaca

SEQ ID NO: 163159 - DNA, 2494 bp, Cannabis sativa
gctagctcaattatgcttatgcagaaaagataatgtaactagagactaaattacagcccaagattacatgccttaatttaagattaacattcaaaatctggttttagtttcattagtattgagttccgaaaattaactttaggctacctttggaaggagaaaaagaagttaaggaaatatgaatattttagtcataggatcggttacactctaaagtttctctaatattgaatgaaatgaaaataagttaaaaattgaggattttaaatccattgcttaacaatttctttcctcaaaacaaccaatctacccaaaatccatccaataatctccctctaaacacactcaggaatatacttgctgtcctcctcattacagccctattctatttctagtaagcgaaagtcaagtttaaactttaaagagtttacaaaatctacttaatgtatcaacaaaacaatgcaaacttctttgaaaaatgctcacattaaaactgaaacaaaaccgacactcctctattggttaaaaagaaatctacttcaatgttatgaattaaataaaagcatttcaaaacatgaacaggatcaccaataaaacctaagattcttttcacacttactatagcaataaaacatgtataaaattagcagcaaaagttgaacttttcttaagagtgatgaaagaaaaaggaagctcacctcacctcatctcaaactttcaaaagttgcatcttattagaaaaagcaatggcaatccaatcaggctgagcagcagaccactgcaactggttaatttcagagccagcagagtacatagaaatgggatcaatcccattaggtccagccacagtaggtaactcccaaataagagcttgactatcatccccagctgaacaaatatgtctataactctgaggagcccaagcaatagcattaactccagcacggtgtctctctagctcagccaccggcatactaggagacctaatatccaagatcacaactttattactatccatcaaaattgttgccatatacctcaaatcctgtttattccaagccaatctaagcaaaggggtatcaggttgaggactctcatagatgattgtggagtgttctttatctctcaaatcaaaaattctgactgacccatcagccgaaaccgaagcaaaaacccttgcttcaccccaagctatatcgtaaacctctttatcgtgagcaatcaattgagtttcaaccactcctttatcaatatcccaaattgtacaagtggtatcgatagaagaagttccaattctcctaggctcgatctcgttccaatcgaaagatgtcaagggagcacagaactcgctggacttactgttgttgagaacagagatgggttcgatcgagttatcacgaacctcccagagtcggagataatcgcctgaggaggcgagaatgtcggatgatttttggagtgtggaagggtgaaacattagcttcgtgggaggatatgggtggtcaaaggaaagcgaaggttgggaatttagggttagggtttctgggtcgaaggagagaatatcaacacggttagagatttcttcgatgaagcttccgacagcgattcggtggtttcgggtttgggtttgggttgaggaaagagccatggcgtacattgggtaaggggaatcataggttaccgaattgtcgggtctgagatgggattcttgggtggaattctccattttctcgggaaaatttggtgcccaattttctgggaaaagatttgggttttgggttttattaaagattggatttttattttttttttcgaagaatggttgttgagtttgaggaagaaagacaggtagcgtttcgttgtagaaacgacgtagtttcgaggaaatgaacagaaaagctcttttggtcaacaaagaccttttagaatattctactccaagattttgtaaagtaagagtcaaaaaagtataaattaaggaagacaatgggaagaaattcacaagaaaaatatcacttcattgaaattgtgaacattctttaaactagaaaactcatatatttcaattgctaattaggatttttttagttggatatgttttaaattgtgttatgtacattttttaaatagttaataattccctttaaactaaggagattgttggattcaaaaatttgtgtatgattttattcaattttgcttatagtaccccatgtggataaaaatttaggtagcacgatttactgtacatttaagttcgggaagcataatttaatacatgaacaatatctgctacattagatgtctagttgtaaaattgaacagaaattctccaattcaacaatctcaattgttggggaacgacataaaaattcagaatataatttagtacatgtcaaaatttaagggggaagaatcttaattagtctttttaaaacaaaaatacatacaatattatggttctccatttatgataaataataatttattgtat

SEQ ID NO: 163160 - DNA, 1283 bp, Cannabis sativa
ggctgcatgcagcctcgtgtctcgaccatatgcccacttccgcgcgcgcaagagtatgcaattataccatattatcgttcaaccaaaggacctgtatcgtccctataaatcataaactaaagaaaataagactatcataccatgtcgtacctataaccaaaataaaaactaaaacactatggagcccagtatcgtaccatatatcagactatcatcttcaacctagttatatctaacctgcaattgtatttctgaatattattccaacctgggactatcatacccttatcgaacaacatcgtaccttatcgttcgagttatatctaacctgcaattgcatttctgaataagggacaatcagacctatatcagacaccatcagaccactacgaaacccaaaaaaaaaaccacagaaatgcaaaattgaccaccattatcacaaatttagtttttcctgtgctaaaaatataagaaatctaaccaaaacctacattccactgtacacaaagcgaaattgaatctttatcactaaaaatcacacaaaaaaaattaccaaacattttcaaacactaaatattacaaaacataccaaaacaattaattaagactcacacttaacatcttattcgtttaaacgatgattggtggtgaatcgagagttgtgagtagttcgacgattgtgggtattataatttcttgcttcgatgtgagttgtccgtcacacgagggattcatgggtctctgaggtgtttgatttcgattttgtgggtaatctactgatagtttgggttggcacagtggtacgacggtgatggatttggttgccacagtggttcaacggtgggttaggtaagaaaccgcgagagggaaagagagagaacgacatagagggaaagagaaagaagagagagagagatagactgagtgtttgaaatgggagggttaatttcgagtataatgaaaagttgacccaccctactaattttgacatactttaattttggttattagttttaaccaatactaaccatggaaaattaaatttccatttggtaattgaataaatcacatgtttggtgtgattttatcaaaaaaatgaaacttgtgtgtatgtgtatatttgtccagcattgcttatgtgtgagtaatttatgatagggatgttcatcaaactgctcaaactgcccgcaccgtaaaaaaaaatacaatttaaaattctttgcagtgcggtcgcggtttgaattttttctaaactgcatggtgcggttagcagttttgaattg

SEQ ID NO: 163161 - DNA, 4251 bp, Cannabis sativa
  modified_base (2402)..(2415): a, c, t, g, unknown or other
  modified_base (4188)..(4192): a, c, t, g, unknown or other
ttgagattacttataaaataatgaattaattgtggcaaaacctttaatattttcattttgcttgcgcatttaattttcaaaacttaaaaatttttgtggcaaaatcttaatacttctcttctgttagcagtttactatttttattcatagttgttaattgtcatgctacattattcacgtaattacattacttaaaaggtgaaaataatattttaaaatgacaaaaaaaaattaaaaaaaaaatcaaattaaaatgagttaattgtggcataatctttaatactttcatttttcttgcacttaacttgacggtaaaatttctaaaattaggaaacaaattagcaatttattgtttccatctattttaagtgttaagtatcatgttggattgttcatgtgtatatttatgtggacacggtatccacatggcacaatttattggtccacgtaaataaatttataaaaataaaattaaaaattttaaaaataattgaaaaataaaaacttataaattaaaaaatatatatcttttaaaaaaaaaaaaaaacttttttttcctttttttttcttcttcattcttttttgccaatttgttttttctttcacttcttcactttcacatataccatcactaccaccaccctccacaatccaccatcatcgcaacaaacaccaccactttaccctattgtttatactttatatccaaatcacaaacagaaaaaattaaacaaaactcaaactaaatttaaaaaattaaatctaacaaacaaacacacttatatacacaaaaaatttagatctacaactttgaaccagatctgagatctctactgtcactaatcccaactatccacttacgagatctccacatgaacccacgaacccatccatccctgtcgaaccaagaatatcatccccatcatcgaaccactaacccacgaacctgtccccatccccttcgagccacgaaccccatcgtcgtcctcgtcaaacctgcacaaaaaaatatatatatatatagagagagagagagggaaaacaaaaaggacgagttttgggggcgtagatctcgattttgtagtccaaacgcatcgccgggagtgcatctctaccaccaccgacgacttcttcgtgagtgcatctccaccaaaaaacgagagagaggggcgaatatataagttttgggggacgaagatttcgattttgtggtttatttcaacaatcggtcaccagagttttaggtttgctgtgggaagatcccatcgagagagtgagagagtgagaagaagactggatagagagggtaaaatggtttgggaattagggtaaaatggtatttaccctttttatttataatttttttaatttcaaattaagtttttttatttttttacgtgaactaataaaattatgtcatgtgtataccttgtccacatatatgtatacatgaacagtccaacatgtcacttaacacctaaaatagataaaaactgtaaattgctaatagttttctagttttggagttttaccactaaaatttgaattttaagggtcaagtataaccaaaatgaaagtattaaaaattatgtcgcaattaatcttatattataaaataatatacttttgctgtaatttttttttttaactaaagtcatatatgtaacaattataaattttagttaaatttaattataactatccataaattaatattgattagattgaaatgataattttttttgaggtgaaccaatatttaattcgaaaaaattttaaattttaattttttaaatctaatccaatctgtacaaatgtattaatttatccgcactttgatgattcgatcatattgaatatattttcaaaacacccatacacatgcatatatgattattttacagagctgataatatagtcaatatatatagacatagtacatatctagtgtcacttatacataattatatacaatgtaccaaattattttcaacatatttgatgattagtttattgaaattttaattacgcggtgcctttgattcttgacctaaattatatgctaaaataataaaaccatcatttattaataagaactatatttttttccacaaaaagataaaaattaaaaaaaaaaaaaatagatgattaattaatgaacagacacatggtcatgtgatttaatagtttggaactacatatatatgtacggcctaaattggtatatatatatatatatatatatatatagtactacctactaaaatggtatatagtcactcaggatcggccttaagcgtgggtttagctttaagttaaaacgggttaggtctgcgcttattgttcacttattttagagtctgaataaaaaaaatactttttataaaatatatatatttttnnnnnnnnnnnnnnaatactatttatttttataataaaggctcacattattattttttttatttatgacatattttaactcaaaaccactctatagtcactatatataaacatatgaataacgtggttgatatatttttaattaccataaagtattttttaattaatttaggtaaaaaatcaacataaagtacatgttaggttaaagaaagtattttaatttattagattattatttaatggttgtaattattaatttaaaaattaattaaaaataattagtctgatacaaacctaattttattttatttattaatatattttgttttctaaaaaatattaattaaaagtaaatttaattataaatgttaattaatttttgttaaatattaatgatatgcataaaaagaaggtgacttgatacatatttttaactaattgtatttatttgattgggatttaatttacatttaaaagtcactaaatgcaatagtcatgacaaaaaattaataattaataaacattaaaaaataaaacgacttttaatttttattaataataaaaatggccggccatattaattctcttatataaataatatacggtgcttccgttcatatttttaatatttaaatagttttaatcttattatatatacatatataacaagtacaatgtcattttataagacaccttacaaaataatatgtagttagtaaattaaaaataattcatttcacatatgtataaaataaaaatgtacgtgcatacaaaattatttaaatattgttttttgcgtattattttttttttctaaatatttcaaaaatctacaaatgtcttcaataaatacgttgtacgctatcatataaaaaaatttctcataatttttggaaaatatttgatgaccaaatacgtttcttaatattcatatatctgactttatttcatatagagacaatacttaattattatagacatgaaaaatagaaaaatcacatgggttactaatagtaaggactattataatgtaagtttaaattatttaaaacactatataaaggcctttgtgcataatcacaaatacccaaactcaatcacaaaagcataataataagcatatattatcacaacagctagctagctatggctatcactaccctctctcatgtttcttttgcatccaatcattctctcatcaatgataagtctttggggctcaaaagatcttttttcatcaaggtttggttggtcttcttatttatttttgtatatatatatactttgttttagggtttcattaattaattgagtattaatcttgatattaatttgttactatatgttagggtttctctagtgcacctttgagtttggcttttaagacaaattttggacaagcactagagaatgtctcatcaaaaaggctacttactactcctcatcatcgctctcgtcatgtagtatgcgccataccgcaagataacaaggttcctgtggctccattagagctcgaaaattccacaaggcctcccacgaatctatactcggaaaattcacttcacacggccaccattctctctgttgacaagatttctggcccaaaagctcctgctgagacttatcgtattgtgtattttcatgatggctttcttccttactgggagggacaagttttgcgtgtaatgaaagcggtaagatttacaatctagatactctttcgagattcttgagttctcaataccctaaaatatatatgacatactcagtgacggacccagaattttnnnnntgtgggggcttatttatcattaaaaaatatttatacttatattataatcactcttacta

SEQ ID NO: 163162 - DNA, 2393 bp, Cannabis sativa
atccttctaacttcacacctaactattctctccatctcttctactctgcatccttcccactctccacaacaaaaataaaagggccctattattatggataaaaggcgatacttccacaataattgttattaactaagaagtaattagaatagagttaaaggcacaataataacatttttcttcttcaagaaagggacaaaaaaatacagttcgattttacttgtttttaaaataggtatgaggagaaaggtgaaaagagctgtaaaagttggtacaaaacttttcagaaaaagataagatgccaaagaagttccatacctagctttaatttctatttttagttttgttaaaagaaagaaccaaatggacaatttactcaacttgtaattgccctctaacaaggcatggtatttgggtttggctaaaccaaaagtcaaggtcaagctagccccacaccattaaatgtgttatggataaaatgccacaagggaagaggtccacatccaccatgtgtaataagtccaatgacccaccaaaccatttttttctaactctttaatttgctaatgtaacaaacatgtctttgtgtagcacacattgtcaaataggaggaggctcactccttacctaaaccaataaaaaaaagaagaagagaggactgctatagtcaatcccacaatattatccatccatttattagaccccacttagattctttcacaggattatagcattagccaatctgatttagtcaaatatgccgttaagagttggttccaaatattttcaaatgtttacatataacgaatattattgtgcaacaaaaataaaaaatacacattacataaacttttaagtatggacacattatatttgagctatgataagtattagtacgtatatgaagaattattggattaggaaggtagtagagttataatagcttttcaaatatcagtatttaacaagaaatgaacaaaagataataatgcaataattatgcatttcatttctagggcctgctagaaaataattgcagccacttcttcacaaaggattagctaaactagctttgtgccccttcagtgcaactagggtcaatctacttcattccaaacgatcaaggactataattcatttcccattttgttacttctaaccatactcaggtcatttactggtatagctagatgtttgacaagataaaagaaaataggaacaaaactatgatttcacagatgaaatatgtataaaatgaacttaactagcaaaaataaatctgggaagaaaagctcatttttacctctaaatatcataaacccttttcagcaaaagcattactagctagcttgaattactacgatgatgtgttagttcttcaatcagcttatttagatccaaacaagaagaaccaccttcttcaacagctcttttagccaactctgcaaatcccttgactctgtttctcattagctctgactcttctccttccataaccctcctaacagctctttctatagattctctcttcacaatgtccccaacccttctcacaactttctttgcactaacttctactccaactctgagtacttcagtcaccaacttttcattgtaaaactgttctgccgcaataggccatgtggccattggtacccctgcagagacagcttccagagtcgaattccaaccacaatgtgtcatgaatccaccaactgctacatgttccaaaatcgaaacttgtggtgcccatcctcttactatgagtccctttccattcattcttccctcaaatccttctgccaaccactcttctttaaccccttctttcttctccctcttcacaacccaaatgaacaatttgccagaagcctcaagcccacttgcaatctccataagctgttcatcattgaagttagcaacacttccaaaactcatataaatgaccgagttgggtgtcttggaatcgagccatttcaagcactcgtgtctatcaacagagttttcagtctcctcacgagcccttttgttgtacaaacaaaggggtcctatttgccatgacttaacccccaaaaccttcctgtaatgatcaacataaccagattcaagctcgtaaaagctgttaacaagaaccccataactaccccctatttccatttttctagtagctttatacaaactagaaaactcattctcaacaacaccttctctcaaaaagtcaacgggtagtctgtctctgttgacctcgatctgatccggtagattaggaatggtactaaaaggctcggaatcagaagccaccttcgtttggggtccgtacaaaaacacacaaagagaagcacacaaagagaaatagcctgtggaatggaatataagagttgggatcccagatt

SEQ ID NO: 163163 - DNA, 4043 bp, Cannabis sativa
ttcttcttcttctcattttcaactacacatttaaactatccctaaaattatttaaagaagaaatattttcaaaaaaaaaagtgaaacctcaccatcttcagttgtcgttgaagaatcagcccatgtttttttttctcttttttttttctacaatattctttataaatggctataactcgttcttcatcttctctatctccttttgtgaaaaagttccaattacaggtcctaacgcttcaaaaatagggttgaaatctgtcttcataaataaaaaaggaaaaaggaagttaaatgataatttttctaatgataattttgttgagcccatactctaacagaggaaggatcctgctaagaagaaatctaaaatcgttattggagaggaaatcgatgggagtcctattgttgttggttaaaagagaaagaatgaagctcctcatttgattgaggtttgtatagcatttttttagttttgccatattttaggttttatctcttttaggtatggttctagtattttttttaaaaaaaattatttcttagtttgttctacgtatgttatgttgcttaggtcattcgagtttcatttatatttcatattagttgattttaggtttcattttcatttctcaatttcagaaccatgtttctctttttaatagtttatggtacttgctgttgatttttatttttatggttttgaatttatgtatattaaattcttattgtagtgtgatttgttatttttattgtttttgtttataaattttttaggtttcatttatgattcattattttttagttgatattcgtgatgatttatagattgttgcaatgtactatgtatttcagttttctagatattttttagttgttctggatgaattttttaagtttatttatagttttaatacagttttgaaactctatatgttataaaatttaattttctatttttgtgtttctgtatatctatgcacgattcgaaacacaaatatcatcctttctattattgcagatctaggtgtgtcaattattgcacttacggtgttattaagaacatcaagaaaaaaatttggaaattgtgatgaaaatgttttgtgatactcaattaggtcatttcttggatgcctctgaggacaaatttcatccccaagttgttcacattcttttgttgaggaaagttcaacaagaaaatcagaaggaattttgggaaagttagtcactgggtttttggtcgcctcgatattatctttttctataattcattgaggactgaaaagatgaatgcgacagtcaagaacgccataaaggcttattcatttttgcttccaattttctttaatttacttggtttttggaacaagagggccactgttccagatcttaattttgatgttaaagctccaataagagtaatggagatcgctagtctgcttgatcaggaaaataagtgaatttttttttgtgttattgtattttagttgttgatgtgctttagtatggttgttttaactattttgattactattttattacacagtgagtgtggtacttctgttgatgcatttgatgagttctttacacatggaaagatattctgcaagattttgattactatcgcaagaggtttactgtgcttttgttcgcatatagtaaaaggaaaaatgatgaaattattaattgtgaggatgagaagcctaagaagtcaatgaaaaatgttcaaggaaagaataagagtctggtgattggggactgatttctatagctcgttgaatgctatttttatttttattgtttgttgttataatgctagatgttatcaaaacttggttattgatgttatagttttaaactgttttttctttctgtttaagaattgaatattggattgctatatttattagagacaatgtattcattttgagttttaatgcatatatttttgtgcaagtttcttgtttatgaagatatataaaatattagattcaattgtgggaaaacttttattcaacatgtttaataattatatctaggaaagtagttggagaaatcacttgaatcttttgaattatgtgctatgtgtaacaccttctatgtaactatgattcaacggttgggaaattattgaataatcaacatgctagtcaacgtagtaagaaattttttttaacgtctaattaatgtttcaaatatggtgttgctaatgatgtacgtttctgataataatttgaatctgatgacattcaactataaagcaacttctatgtaattttttaaaaaccaataatgcatgaaatgtaatagcaatatattaaagtaacatttctaattgtaaaagtttatagaaaaatttaaagaattcaatatttaatgttctctcaatatttagtcgcttggttatcgaatgtttctaattgtatcctttttggctacatttgctgctcctattctattttttttttatttctcatgcatctataaatcttcttttttttttggtcttccgtatcacacaaaatggaaaccttatgaaatcagattcttttaattttatttgtatgtagaagaataggcttggatcgttctttatcctaatagttggtaaccttatttcacttagtatttcagttgcaattatgtattttcttggttgcattatgcgacacttgtttcaacttctgtactagttgttcatgtttgcattcctttgagataaattcgtcactagcttcgtaagttacaaaatttaattttgaatcaaactctccattgtaaaatatgagtaattgaattgggccccttcctgaaattttcaaaatttaattatggccagtcaactgtacaataattaattgaaagtaaaatatgtgttgctagacatttcctttacaacattaacacaactataaatgcccaatatataatataaaaaacttaccacaatagagattgttctatacgagtcgcgtattgcgaattttgagccctaattttttacacgtaaatattttcgcagcacaactattatgcagcggaattaacacgtagggacaactatgtatggaaaatgtgattaaacatcattaagaaaagatttaacaaacttttattgcactgataaacattttcgtgtacattaaaaatatttagtgaagaaacaactgtaataatactttaaaccaacgttaactcaaccaatattaaaatataaaaatattgaccatattataaatattttttattagtattttattgaattgtcgatatgaaatacaaataagactaaaattattgtagcattatcagttcttaattgttgatacgtctattatcagagtgttaattaaactcacaaccaactataatgtaactatatatatataaataatgttttaagatctatgacgtgagataaataatgaataagatcgtaattgaataaatttagtattaaaattctaaaaaaaaatggttaggcaagaaccataatattacctactgtagtgatatatatttggtcattatatttgatttttgaattgattgcagaaagttgagatttatttcttacaattaatctacttttatgaatctgtaaattaaatttaggagtattaatttatggaatttgaattataaatcagggttggattgatgattcatactagtttttctatagattttttctctgtcagttatggttgcttttcgattagagtttgttcttcttcttaggcgacgtcaccagaattaatggtgcctcctcgtctgttggagttttttcatcgttgtcaacctcattgcatcgcacgaaggtttcaatcccaggaagcgcgtggatcttgcgagttggaagtgtgtgtaagaagtatttgcataatttttttattggactatataattgtttatttattctgtccacagttttttgtaatattattactttttttggttataactgaaaaaacaattaatgggagagccacctagacgtggagccctatataatatataatatataatatataataataataata

SEQ ID NO: 163164 - DNA, 2315 bp, Cannabis sativa
cggactcccatcggactaagccaaaaaaaaccaaaaaatgacatttttatgtggtgccatcagacccatatcgggtctccatcggaccccatcggattcggccacaaaaaaaaataacatttttaggggtaccattggacccctatcgggtctccatcggacaccatcggacttggccacaaaaaccaaaaaaataacattttagggggtaccatcagacccgtatcaggtctccatctgaccccatcaagcttttacccatgtcagctcttttttaaaatacatcgggctaacatcgaaccccatcgggctagacgaaaaaaattgtagaaatcaggaaaaatccagttttcacaggcagtaaacatttttaacacaaaaaatagcaaaataacagcaataatccacagatcaagcatcaaaacaacactttaaactaaatataataacaacaaactagattacacaaacaaaaaaaaattatccatgagttagtgtatgatgctcgtccaaaaatgagagaaattatgtggtgagtcttgtgtagtagctgctagtgtagtgaggtgaaaagaatgagaatagagaagagcgaaaatttgagcttcccttgtgacgtagctttgggcagcaacaacttagagaaaataagagagagagaaagagagaagaagtgagagggggtgaagtaaataaagaaggtattttgagcataatagaaaagtggtcatatattttaaatattgggtattgtgagttttgaggaaattttttaactaaatgcaagcatagaaattagaatttcccttttaatattgagatctccattcgaataataagatattttttgaatttaaatataaaattatttaaactgtttattcatttcatgaatatatttttcaaataatgttacaaattaattttttagtattttaatcctataatattacaaatttattacattatattttagttatttaaaaaaaatattcaaatataaagaataattaatttaaaaaaaattaagtattgcattttttgatattgataaatcaagatacttaacttgaagcatataatcacatgattattttttattaataagtaaataagattacattgaaatagggttttatctagggcataaaatctcagcaaacttccatttgaactaacataaaactattagtatattttcattaatcttatattcttaatgtgcttctcaaatatagtctctgattgtgtcttcataaatagatcaactagatttttttcaatgtcaatcttctccactagattgtctcctctcgccatagactccctaatgatatgatattttctctctatggctctttactgttggcaattgcaacatttttgtcacaaagcaacactagtggcttatccatatttgaaataatgccaagctctgtaaaaaactttttaagccagatcaattctttagctacctcagcggccgctatgtactcagactccatggtggaattagagattgcagactacttgatgattctcgaaatcattactccacccaagagtaaacacaatcccacatgtagacttcatatcatcgatacaatcttagaaatctgagttagtgtaggctaaagtgttcaaagcaccacccttatagactaacatgtagtttttggtccatatcaatacttcagaatgtgcttaactgtcatccaatgttcttttcctggatttgattgatacatgctcacaattcccaccacatagcaaatattcggtctattgcacaacatagcgtacattagacttcctactactgaagcatagggtatttttctcatgtcttcttcccaatctggttcaagtgggacattatttcttagatagacgtataccatgtctgaaaggcatataatctcctttggagttagtcatagagaagcactctagcaccttatcaacgtaagttacttgtgagagagcaagtgatctgttcttccggtctttaataattttgatccaaagaacataaatagcttcacacaagtctttcatctctagctaagtgctaagccattccaaatataataacttctgacattgtttctaatgatcaagatgtcatccatataagggaccaggaatactaccacttgattcttcttgagtaggtaaacacaaggttcatcttcgttttggttaaaactaagggttttgacggtctcatcaaaccttttgttccaggaacgagaagcttgcttaagtccataaatggacctattgagtttgcaaactttcttttcctgccctgg

SEQ ID NO: 163165 - DNA, 2247 bp, Cannabis sativa
attatcagcacggtttacttgatccaaactgttaacagtttctaacctcgaaaaatcaactgatgtgctgctgatggttactggtggaggcaatgaacaagatctagaaccactctttgattttgtagctttctctctactagaatctctaccatttgaaatctctcttacttgttcatctaacatctttatctgttgccagaaagaactaaaggatccacctgaagaatccacggatttttcttgttctaaaccgtttttcttgctgtggaaatcctttatgggaattggaggcaaagagctaaacctcttaacattaccaccaccaccaacaacacaagaatctcctttccatagatcacttccttgtatcaataaattctcaggaaacttgctttcaacagcaaccatatcactgaatcccaagctcaaaagcctgcacttataagcctgaacttggaattcaagtgaagcaatttccatctccttggaataaattagatcctcgaaaatcgcaagagactcctcagcatgataaatcttttcctctgccaatctcttgtactgatttgcttccatcttcacagcagctttctctccttgcaaacgtagtatcatggataaagcttcactagctgcactagctgaagcttccctttcctggtccaactctgcataaagcttttgcagaagctgttgctgaagttggagtgtgtctttcagaactattatatcagtttcagacatttcagaaaatgtactctcttcagccatacacatatatctttggtattaaaaacaatcaacttctgattctgctgggtaccatagaatagaaatttatctcagcaagaatcaaaaaattccagaatcatatcatgacccatttcagaaatcaagtctaagatctcaagagagagatatatgaactcagtttggactaacataacaatatgaactcaaagaaaaaacccagaaatttcccataaattccattttaaaaaggttaaatcttttaacagtgattcaagcataaagacaaatatcttatgagcaaaatgtagacaaaggaaaacagaaaggaaagaccattgtacctgaaaagcttgagcaaacccaattgagataatttccactgaaaacaaatttcagcaccaaaacaatatttcagaagtaaactccaaaaaaataaatactgaaaaatcagagctttaaaactttgaaacgaagaaaactaaaaagaagaactttttttttttttcttattatgtatattgattaatgagcaaagaagaatcccagaaaacgtacaaacaatatagaggtcttaagtaatcattaaaaggaaaccgaatttttctaatagggaaattaaatgagaataaatccttagcttagtaataatttaagaaagaaacccaagaaaattgaataaataaataattaaagaaaggccatgattacaaattccctgtaccttataagatttttgggattgttaccttaaagagaatccaagtaaacatgaaaaaccacagtgtacccacaaacagacaaggctttctttcctgtaataaacgttgtttttgctttccttacacagcaaagttggtactcaaacattttcaattcgtttcataatttcattccccaaagaaaaaagaataataataactataaactgaaatagttggtgtgaagaaaaaaaacacgcacaggttttaatatagtaaaacggataaaaatgaaccaaaacgcggtcgttttgccttgtcaataatgactgtaataaattttgtcctaaactcatttaatatgtaaatttttattcttatttattaaattatgcctttaaatttttaagactataaaaaattctctatgaattattgagatagttgaatttaagaacttaagtctaacataaatcaaaatttagaggagatgattagatacatattaaaatttgaggggcataattttgtaaatattaaaatttacggagcataatttagtatatagacaatcactaaattattaaaattgaatgaaattatataagacttctaacaatctcaatagttcaaggaaaatttttaacggtaacaaagtttaagaaaaaatataatttgatacatggctaagttaaagataaaaattataattagcctaatatctatattacttacggtatgtcctaatctattttaaattatatatgtttttgaaatttttttaataatttac

SEQ ID NO: 163166 - DNA, 1409 bp, Cannabis sativa
attaaggaagtgagatttatatgaaggaaattattgatgatattaaaaaccaaaggaaagcaagacacatatatagctttaagttcatagtcaaaaaaataatcgatgagtgggatgaatttattattatatttccaaaggttatcattgtttttaatttctactattaagatagtaatattcggatgaatattctctaattcttgattgatcgatcaatacatcgagtactattagctatattatatatgatcctattaactaaataattaatattataaataatactgctttagttattagaagaaatatataattgaagaatattctttaagaatgtccactctctctcgtgtatatatatacgtaatggctttattaatatgatgatcatgtatatatatatataagtacatctttttatcttcattggatgtgttagtcaattattgaacaattgatccatgacaataaatattttatatattatatatattgtttccgcctatagaaatgaaaagtaatactaagcatttatatacaatggcactgaaaattataaaaagtttaatttaatttgattgtcaaattaatatatatgaagatctaattaccttattagcttataattaatgattacatgtgtaattatagtgactcttgcattcagaaagaggcaacacatctatatagccaagagtgatcttgtggccctatatatttatataaccttaaatataattaattaagctactatactgtattgttatacttatatatatagtatattgatgattaagctatatatatatatatagtgggttgttcgttttccttaaccgatttccaatatcttttcttttgtggaaaatggtccctatatatatatatttatagcacaatatgttatacttgaattatgtatatatatagcttcatatataattaacagatggactataattaatattggacacattaattattaattctccaaagatttggaacaaattggactatatataatatatatggctggcggcttgctccatatagtcaatccaaaacattcattaattacgtactaattcataaatgtccttataatttaattataaatatttttactctttttttttttatttttattttttacaaattaagcctaagaacaaacttttgaaaaaactaaaagtttttttttttaaagtgtgataaaaatgtatttggtaaaccgtcaaaaaataactttttgaaaaatttatagagaagttacagaaagttaacgctgatacaactcaacttttaattaaaaaaagctattttaattaaaagaatataataaatttatttgtactaaaattataattacttatttattatatattagaaaaataaaaaatatttaa

SEQ ID NO: 163167 - DNA, 970 bp, Cannabis sativa
taatcctttatttttcatttgtgcattggacctttcatgtcttcttttgtgcagaagcttcttttgtaactagttgctagttactttgacataatttcaaaaaattagtaaccatatactttctaattgaaaaaaaaaacagtaactagttactcttaccacttacttagatttaaaatttcaccaagtaaccaattatgccttgtttaggattttaccaataaaaatttgtgggggaatagaatattttaaagaaattagaaagcaaaaatattttatttttttaataatttacaattgtttaataatttataaaattatgatactttttataaatttgaatctaaacatgaaaaaaaaaaaagtaaataaaaacaaatataatgtgtttataaatgttagttgcaagcatgcaaaagatgctcacaaatttgtgaaagttatttataaatttgtaatagttgttcacacatttgtaaatattgtttttttttcttattttttttgaaacctttgtaaatattgtttacagaaaaaaaaattatacctatctacgaaattacatgtcagaactttatacttcagattgctttaattggaatttgatcatcggtaattaccttaatgattcccatcacatagataacatcacctagtgtaaattagccttcagataaccctttcaactggaggttgtgtgagtttcgaacacttaaccaaaacaaaaaaagatgccaataaagacgatctctaccaatatactgcacaatacgattttttgagtatatcattttgagaaaaaacattttttttcattattattcttaattttaaattatttagttacagattctgttgaaattgatgaaaaaaaaaacaaaaagaaaatgttaacaacacgttgaatatccaaagatattatctatgttcattttttttttaaaaaaataaatctttatatataaaaagt

SEQ ID NO: 163168 - DNA, 1634 bp, Cannabis sativa
gaagatggaaaatagttttctatatatatagaaaaaaataaataaaagacacataaaaaaatgaaaaaaaaaccacatattaatttaaaataaaaagataccataacttacttaaaacaaaaatttatccatatatatctaaaaatttaataaaaatctatagtacaggtaattttcgaattttaatttattttacacgtatacctccactagtctctaccgtacaactcagtctcattataacactaaaattgagtcacttcaaaagctacatgggaagcaaacttaatatgcaatattagtttaagtataacaaatataatcttgattagcaagtttatttgatcaagattttcacccataaagagataaaatctgccctttttagcatttataattctaagagttgaggtccaattaatttgagtctactttcttcaaagagttttggcttgaaattggagaagaagcttgtaagggtgtctagcttttttatgatactagtaagataccaattaaaatgaatgaaacaactatttttttgtctctaaatgtgaatcctaacaacgctattgattttaggcctataaatattgcactatactgtataaatacatctccaagttgatttgttgtagactttctctaatcttacctactttggtgcatcaaagttaggggactttcatcaagcaaaggtctattcatcctatggaggaaagatgctaagcttcgatgtatgattaagatgaatttgcaaaaggcttatgacacaattgagtgggcttttgttgaaaaaatgttaagtgcattagaattttcgttcttctttattgagttgattatgacttgtataaggtcccctcaatttgctataatgctcaataactccttttatggttttatcaagttcaaaaggggtcttaaacaaggagaccccatctcatctttgttgtttgttcttagaatgaaatacttatttaggattttaatcaaaattttccaaaagccttaatttaaatttcatcatcgatgtgatggcattaagcttactcagttgtactgtttcactaatgatctgctctatttctaccatggggacttcttttctatttatcttttgcttcaaagtttccaaaggttctcgaagacaacagggttgaaggctaacaagagaaaaatgacaatctattttagtggcatgaattccctcgaggtccaccgtttccttggtatgtcgggattcataagaagctcaataccattctattatttgggaatcccaatttctctaagagaattttcacgactatatacaatttaattgttgaaaaaatgactcaaagattgtggagctggtgtacaaggtgttgattttatggtactaaatcaagtactcaacggaaaggtttcatattatctgattatcattgtaccatatcctaatggatctccatatgcgtgtacattaaataaaaacaaaaaaatagtaagtttagagtatacctctcgatgactattaaggtttcctcgaaacttcttgtaaagttgtatccttaatcaagttgatgaggaaattgcaattagactcacaccagtgtctttcaaatcgatccaccacacacaaggaatag

SEQ ID NO: 163169 - DNA, 3121 bp, Cannabis sativa
ttatgtattttttaaaaaaattacacagtaaaaataatacaaatttaaacacacattaaaattaaaattagacgcactagatatcatattcttatttaccaagagtacgcatgctttatattacacaatagaacattataaaattaaagcatagtcaatgctacataataaaagtattacaaacttaaacatacatttaaaaattaaaattaaacacaccaaacacattaaatgaaaaaaataataacatagatatgaaccttcaaagataaaataagatacaacaattcaataatgtggaagactatttcctgatctatcgagatagtcataatatggactataaacttgtgagtcatttttagttctttcaccttgatcttgaggtcgttggccttcatcttcaatgtcgtgtctcgaatattgagatgctcaatattgtgatccttgatattgtgacccctgatattgtgatccctgatattgagatccctaacattgtgatccctgatattgagatccctggtatagatatccctgatattgagatccctcatattgagatccttctcattgttctccaacttcggatatttgtgctctttcatgtaaattcatctttttttttactttgaatgtactgacgaacctctagatcggatatagaattcaaatccgtgaataaaattttttggtcagccttttttctatgacgttcatttatattcttcttactcttttcaaaaacttgagtgagttctttattttgttccattagtttgttgaattaaccattacctaattgtttttcctttaattttttcacaccacatggtcttttgttggataagtattgatttcctcattgttcatgtttggatcaaatgaactcatattggtggatgtcgatgttggagactcaaaattgtgagatgataatttggatgaagtgaaattaggaccttcgtgttagaatctacgtggtgcattgatgttgtcatcattgagaacttttgaatacctttgatgatgtgtcacaaatgatcaaatttaaaacttttgtcgtgttttttatcttgggttaataacatttttgcttgaattaactgttacaatataaattaaataatagcgtcaataaaaggtaaaagaataagataataacaattactaaattataatcacaaacacttacaatgtctcttgctgaagtaccacttggatttttattttcaatttggttggtacatctccttaattttgcaactgcactattaatagtagacatttgagtttgcaaagatcttactggttgaggtttattactaaattttctatctttgtggtactctgattcatctcttgctaaaaaattattacctgtttggtttcttcctataattggttcttgagaaatgttaacatagacacgacgcaagtgcacatcttcctctactgagtaagaagaaccacgaatgatttttttttttttttgaagaaaatgtagctatttagaatatgttgaagagatctgatcaaatggaatgagaagtgtgagattatatagggaaggaaaatacactgtaacagttgagatcgtggtcaaataatttcagcggccaagattaaaccgcgagatttcttatcttctaattttagattcagaagataaggatgtgatgtgacaacacactacaacagttgagatcgtggtaaaataatttcagcaaccaagattaaactgctagatttcttatcttttaattttgaattcaaaagataaggatgtgatgtgacaatatactgtaatagttgatatcgtggtcaaataatttaagtggccaagatggagacgaaggacagagagagacaagcaaacttttgccattcaacaattcgtttaggaattttgatataggtctaaagtgattcgagtaagactttgagagaaatcatgggttttttttaattaatatcttaaccaaagtgtgtcggccctgatccaaaattaaaagtactagggcgggtggagtggggcagcgacccaaataaaacacatttattgtgggttaggggttgccctgtcgggtcagagccccatcttgaaccgcaaaataaacccaccttgccatcccaatatggcaaaattaaagggagaaggttgaatatgattacaagaagcagtttaaacattattaagagaacaaacaaaaatagggttgaaagacttgtattgagattgtgaaccagtagttgtgggggactgcaactgagttggttgaatgacattaagaccacgattacgatgatcttctattataatagccttggagtctcgatccttaacgaaatagtggttaggatagaactcaatataggcattattatcaaagaaaaattcagagacactaatcaaatttttggtaatttgaggaacatataccatattgttaagagtaagggattcggaagaaaaaggaatgtgaaagactttcttaccaatattgtggatagatagacctgcaccatcacccatgtgaagttattcatgaccaaaatatggttctttatgagtgaaagtagactcatcaacagtgcaatgactaataacaccagaataagggtaccaagaagcatcaagcacaatatctgttgtggctatgttatgttggcaacaccaacaccaacaccaagaaattccataaatcattagtaacatcgagtagcaagatgacctggtttggagcacaactgacaaacaggtcgagatctagaaggatttgatgttgatggtggagaagaacttgatataataccttgaccaattgaagaagtggaattattggagaaagatccaccttgagggagaaaaacataagggttccagctagtatgacctctaccaaagggcatgccatttagattgaaggaagatctagaatcattcaaagaaggatattacaattcctaacaatattagcataattaagatcttaaattgtaatttcctcattttaagcctccattgggcctttacacctatggaatgatggctcttatgcacgagtacgtcactttggatgcttcatagaatgacgactcaccctacaaaccaacacga

SEQ ID NO: 163170 - DNA, 2353 bp, Cannabis sativa
ccaggacaaagaagggatccccccagaccagcagaggctgatcttcgccggaaagcaacttgaggacggacgtactctcgccgattacaacatccagaaggaatccacactccacttggtgctcaggctccgtggtggtatgcagatcttcgttaagactttgactggaaagacgatcaccctcgaggtcgaatcttccgacaccatcgacaacgtcaaagcaaagatccaggacaaagaagggatccccccggaccagcagagactgatcttcgccggaaagcaacttgaggacggacgtactcttgccgattacaacatccagaaggaatccaccctccacttggtgctcaggctccgtggtggtatgcagatctttgttaagaccttgactggtaagacaattactcttgaagttgaatcatctgacacgatcgacaacgtcaaggccaaaatccaggataaggagggaattcccccagatcagcagcgtctaatctttgccggaaaacaactcgaggacggccgtacccttgccgattacaacatccagaaggagtcgactctccacttggtgcttcgtctccgtggaggcatgcagatttttgtcaagaccctcaccgggaagacgatcaccctcgaggtggagagctcagacacaatcgacaacgttaaggccaagattcaggacaaggaaggaattcccccggaccagcaacgtctgattttcgctggaaagcagttggaggacggtcgcacccttgctgactacaacattcagaaggagtcgactctgcacttggtgctgcgtttgaggggtggtatgcaaatcttcgtgaagacccttacgggcaaaaccatcactttggaggtggagagctctgacacaattgacaatgtcaaggctaaaatccaagacaaggaaggcatccctccagaccagcagcgtctcatctttgcggggaagcaattggaggatggtcgtactcttgctgattacaacattcagaaggagtctaccctccaccttgttcttcgtcttcgtggtggggatttctgaagtagtggaggttcggtctctgcttttcggtgtggtgtcttttgatgggcttgttattaatccttttgctgaacaaagtgttctttattttcagttttaaagttcttactttttaatttggtccagtgagaccagttaatgttaaaactcccgttcttgccataataaatttagtattttgttcacaaatattttacgttggtttttgatgatttctatttgggaatgcgatattttgttgataatttcaaagcaggaattcaaatccttttctctgatcacttgtagtgtagcatgaggtgcttgctctttattaagttatttattatttgtatctttgtctcaagattttaacttagaacaaatttgagtggtgatagtggttaattgtgaacatatttatgattctacagttaatacattgttctatactgtattgccttttgaaggttttgggtgttgagctttagttctatggcttaaatgatttatgatgattacacactcttgcttattctattagatgtgttatctttatacatcatattaccaagttgctcatagattgaattgctcgctcttgatatgtatatcttgtttatttttgtttcaagattttcaacttgaaattttattgagtttttttttttttttcaaagatgactgcactgttttattgagaaaaatgagtttgtaaggcctttgccattgccaagtcttaatgttctgaataaaatgctttcgttgcgttgtcctgtcatgtctaatattagtgagcaattcgttggctctctcttttctagttttagttttggttatggcactgtattgtacgtattgtgcaactcttttaaagcttttggcttcttcatacttatcattataatggattttgaccttgtaacaacttgcatttaggaagcatgtacacattttttatttgggagaagaacattgatctatgatcagcgatcacaccttgtgtaaaacaacattgtcgatgcttacccatattatttgcattatatattatgtgtatgttgtatacataaatgaaacatacctatcacctatcatatcctctgtggtttatcgaaggaaaagtgggttggtcgaatgtcaatttcatgctgaatctgaaaaagaggatggggcagcatgaacacttctgcaaccgtcctcttgctccaagcttctgttatattattttatataatataatatgtagattaaataattaagttataaataattaagtgtgacaatattaattttgtcaaattgtaacataca

SEQ ID NO: 163171 - DNA, 2802 bp, Cannabis sativa
aactgcagtagccaccacagccatggtggttatggccgacaacaaaaaggacgatcaactagagggtcaaactcgaacccaataatgggtctccacaactggaccaaaccgtccatgcatgcttcggtcgtggaccaagaatggaggaggactggcagccaaacgccatgatgttgacattcgaggtcaatctcagggactgaaatcccttattccattcaggtcatggacgttgcatgtccttcatgtgtagcatgcacatgcatgcatgggcatgcgatggttcatggggcacgaaacctgaagccacattgtggttgtgcatggtcggggttcctccatgagagctcgcatgcatggggttttgtggttgtgcgtggttaggtttcgagattagaaactaagctctcatgccatgagtattacattgtaaaatttttatgtaaaaaaataattttagaaaataaaaatttacataaaaatttctatgccccataattggcttacattattttataaaaaaaaataatatctagacaaaaataatattgagacctacacactacacctaaatttaccataaaattaacaatccatcacctctcatacatttacaattatattaccatccattcacatacatatcatatacatactatatataaatgcataaaactcataacatttaatgtatatacataatggaaccgctcttgatactaattgttgattttatggtactaaattaagtactcaacgaaaaaattatatatttaattatcattgtaccataactcactgtatgtataaacattaaatctgaaatattaattacatggaaataaatacatcttgataactattagggtatcctcaaaactttttgtaagtttgatccaataaatctcacatcgtagtcttcaaaatcgatctaccacatacaaggagtagtgtgggctactagaaaatagtgtataatttgttattgttaaattttcaacgcatgagcaagaactgttcttgacaaaaaaataatttttcttctctctggtgtaacattataacagtgtagaattatattatgatttctcaaattaggcttctatttatggtagttaatattcaattaattaaatcatatttaattattcaattaaatatctataaccgaatcagttaatgatatttctgagaagagaatctctcaactacttgagagaatatctcaaccaacttggagagaatatctcaactactttaagaaaatatctcaaccaattgaaaatatctttaactactttttaaattttaatatttgtctgaattaattaattaacccaaaaacacaaaagcatgactcccagtggggtgtatgcactatgtttgaacacagtgcatgtggcgcctcctatgtcttctttaagacaaggaatgtgccttttatcctaataattttttcctttttccttatttaattaatttagaaaataaattatttattacaaaaataaataagtattattttgctgattcaaaatagatttttctaaataatattatacaactctttattactacccttgacaatgtttcaaggtggtgattcaggatttatagacctataattctaagttccaataaactatattatttattgagtctcatcaaccaaataatcttgttaattaattccatgattacttcactataaatatggaattaaactattatagaattatatttactgagtttcactgcagtgtctattgatataatcaaattccagtgattagtcctccctatgtcggttcgtaattagttttggtcaaattatcgttttacctttctaattacttatttatcctttagtactgttaattcactagtgatagtataatttagatccaatctaaatttgagtacaacttttttaacttcagaattaacacttaaatagaactaaaattcaatctgctaggtaagtcatatgattctaatattattgtagatcatgttcccaaccattgacattattaaattcccaaaatagaagttgtaagtgttcggtaaatttagtgcaagtatacacaatcgaatcaagtaatataatgatgaagtaaagtatcgttctcacgagaattgattatcaattactaattaattaattctttgtttctatttgattaataaaaattattggagaaaagtaaataaaacaaaacaataattaaaatttaaataaataacaatgataaaagcaagaattattataatcctcaaccaccttttattttacttcttaacgcaattacccaatttgtcttcttcctattcaattgacaagttgaattaagtaatttataatctgattaaaacttacaaattcaatctatgtgaaaactctatatactcttatggtaaagtttaatcacaaagaaaatattaagcgaaataattcattaaatcgtacaaatgatctaaatactttcgtcttaaaccaatttgtattcataataatcagggcatatttaaatctcacttttcaaaattttgattcaaattcataaataacggttataattaaagtaaattgtaatttgagtttgtgtgaaggctaatagaattgctcaaattatagtaatggaatttatgtttcttcaaaacctaatatatgagtcattattaatagaagaaaaatattttaatgcaatgaataatttattaaggtctgtttagtagatgatataatgtggtattgtattaagggtgcgtttggaaagccacaatgtaattggatttgtg

SEQ ID NO: 163172 - DNA, 3257 bp, Cannabis sativa
attgaaaataacatgacgagggacaaaaatgcgatcggaggatgggtgaagatagaggtaaccgttgtgtcttctgctgtaacaaaggaaagtacatagcaaagatcgaaactcaagtttgtgactattgtaagggcaaagaaatgggaaacattcgcatccaaacactcaaagaagagaatagttaggaggcttatgatatagtagttgataggggctagaatagagaagagcacaagtagggagtcgattaattaagtaaatggttgtagagaaagcataaggcaaaaagtgtaaaggcatatgagaatgagctaagagactgagactagttttgatcacatgacgatttttgcattcaacatgaccattttgttgcggcatgtgagggcatgagagatcatgacgaatgtcgtgttgggtaaaaaatgtggaaagggtgtgctattcaccaccccagtcagtgcgaacagcttgaatgttgctttgaaattgagtggaaaccaaatttttaaaaatgagaaaggcttggaacgcttcatctttggtagtaagtaagtagaaccaagaaaaatgagtaaaatcatcaataaataataaaaattatttaacatcagtgataatcgtgactggggccggatcccaaatgtctgaatatattaatttaaatggcttagaagcccgagatatagaatttggaaagacaagtctatgagatttgcctaattgacaagcagtacaaaatgttaggctatctcttttcggaaaagaaaaattacaaaaagatgaaacacgagaaataatgtcttgagacggatgacccaggcgagaatgccaaacatcaataaaggatttggataaaaatagcagttgttatgggggacaccaagaagcaagcaaagaaggcgagactcaaacaatgccttggtcaagtaggcctttgaggaggattttgtggttgtctgtgtgtttgaaaatgaaataagtaggatgaaattcgacataggcattattatcaagacagagttgagaaacacttaatagattttcagacaagtaggagaatgataaatctgacaaagcttgagaaccggggaagtagaagatggtaaaaatacagaacccacatgagaaatagaagccaaattacctttgcccattgtaatttaatcagaaccatggtacgaagtggtagattccaagagattcaagttcggagtgaagtgatgggaaatgcccgagtccatataccaagttggatcatgaaccacattggagggtgaaggagttggtaacaggggagggttgtggggaggttattgctgggtgaaataggtattgaacaaataagatggttggtgtggttgatattgaagattggtgcgatagtagcaagaaggagttgtatgacccactctgaacatatttggcatttgggtggtcgagaaggtggtctaggggcagaagcaatctgaggggttgtgagtagggttggcgggggtggtgaaaggaagggtgagtggggtgggagttattcgagtaatttaggtaatttaggttggtgtaaggataatttttgttaagaggtttgggagaaaactaagaatttggagatggagtttttgtgcgctgtttagggaaaggtaagttggcaaagttggcttgaaaggagctgatggaggcgacttttgtttgtctttccaagcaagcttcatcgctcagaagaagagcatgaacttcctcaatcgttggtttgatgggacaagctaaaattggtgttgcaagcacattgtactatagacccaaaccatttagcaaatacactaaatgttcttggtaatagatcgattcaccaacaaacacatgggtattacacagagatttgagtttctggatataagcggacgctgagaggccttcctttttaagattctacagcatcgtccaaaagtcagagctccgagcaaaggaagcagcagtgtaggtgtgttctagagaaacctaaatttctgttgctgtggagtagttcacaatttatcccaacatagaattggagaaagaggcataaagccaactcatgaggagtctattgtatcgatgccacaccgtgaaatcagtgttaatttgggaggagttcaaatcgacaaactgaggcgggaagataatggtgtcgtcgatgtatccttcaagcccatttgtgataatgatattttccatttacattctccaaactaggtaatttgattcatcaagcttaactatgattgtttgattgagagaaggtatagttgagggtagcagaggagatgagagatgcagagggaaagaggaagaaggtgtagtagtggcggttgtgttattagggatatcttggtttgtgattatagggtttagattagggtttggtgtgtttacttcatcaatttgtggggtagaactcgtactcagtattaatgccatggagagcttgtcattgctatgataccatgacagaaggaaagcaaaaaaagattattttccttaggtgaattggtacaaagtacatgggttaaataaccctttgaataaaggaaaaacaattacaagacacatgtcttacagagagaagaccaaacaccataaacttaggaaaagcaaacaattaaaaaaactcaaattaattattggttaacattatgggaccacattcaatatttttagatctatccatatcccatcaaattacatatcagatgttagattttaccacccgatctaatctaattaattttagtcatctggttgatccaacatccataaatgttggattaaattgacttttctattggatgtatttcatgtatatctacagcattttttcagatttatcaaatattttagacctggtatagttttaggattcatctaatgttttagattaagtaattccatccaattcaaaaaaaaaagaataaaattttaatcttaatttttatatatacatatatataaatatatatatatataacacttctaattgggtattacacattgatggttactaaaagagattaactataactattaattttaaaaatattaaaccattagattttgatccaatggcaaataatgaaagagaaatttgagtttctatgcgagggatgactctgagtacatatggtcgactttaacgaataaattgaagaacataaataatacgattgaactagaacctaaccatctcaggattgggatcatttgatctaagatcaact

SEQ ID NO: 163173 - DNA, 849 bp, Cannabis sativa
aacattgcttgtcatcaaatgaaataacccctttgaagacactggcaaaagcaccctttcctagtagcacaatttatatatttagataagagtaatttacggtataaatacttaagtttaactcctgtttaatttttgggggtaataataagcttgaatattgtcattttcaatttttcaccattcattgtcgttttagtaaaattttgtagttacacgtttacactccactccccaaataattgaagagattaattttttttaattgaataatgttgttgattgttgtgaataccagctacagtcaaactcatatgacccgttcaattgaataatataaaaattagacctttgaaacaatatcagttgactattctcataacataagacaagctcctttgactattctcagttgactattctcataaaagttttttcttacagagacagatttttttaattttctcaagggccacgactctcaggtgaaggtcgcagctcttggattgtctctaaaaaatgcttctgtaacttttggaggatcgtgaccttcatgggaaggtcttcgacatgtaccaagctaagatattcgatcttgataatttcatcaccaaaaagacaaagttttcaccaaaaagcaaaattgtctacatctcaaacctgaaattaacataaaaacaaaaacaatcgtaaacccgggcaataaaacataaaaacaataaaaataaactaaaaaacaacctaaaaataaacataacaaattttcccaaacttaacctttaccagccctcgagtaaagactaagttaaacaaacaaaaacaaacacacaacgaacaaactataagcca

SEQ ID NO: 163174 - DNA, 1631 bp, Cannabis sativa
tcgtgagtcttcctttacacttttctacttttcttgtttcgtcattttctgagtttttaagattaatataagaattttaggttttacaaattacattaagactaagagattaagcaaaactaaacaggtgccatggccgtagcttcgtgttctcatcatcagcagcagtttttgagagccaatatggtggtcggggtagcactggattattaaaaggtccaaatccaattgaaatttcagattaatcgtcaaagctcaaattaataataataataataacagcaaagtgcatgaagaggatattgtcattgtgggtggagaaattgctggccttgccactactgtatccctccacaggtacatgtataccttaatttttaacaaatttatattatagaaacataattaatatatatataattaaattaatcagattagttgttggatcattagtgcttgaacaagcagagccactacgaattggtgggattgcactgtctctttacaagagtgactctgttttccttttttatatttttttgtgtgttctgaaaggaaaattcatgaaacaataatttagggaggaaaaaaaattgaagaattctttattgatatttgtgtttgtttagttataattactggtaaataccttaattaggggatctctttgttattttattatttttttattatacgcatgagcattataattatgttgttgtcaaggattatggtgaacaccatgaagcccttcatctggttcagaaacatgtcaaggcataatgatctgtaacactcagaaattgatgaggttactagtttttttttccaagtcttttatggactgaccatgttccaaattaatgggttttgcacttagggagtttctgattatttcttggttttgagtacacttctgcaaatttttgcattaagcattataattatgttatttttttgaaataatgtgatgtattcatattgaagttgtgaaatgatttaagttgctcaccaaagtgtcacaagactcacaacaaatattgggaattatgttttctatatcaaattttttaaacattgtcttttctttatgccttataccttatgaaattcaacaaaaaatgtcttcttccaattagagttcattatagttgtgatgactaaaattttgctttgaagacaaataaataagtgaataaattaatttattgcttttatttctattttatactattactttgtagttttaatagggtttcggggtggctctatttttggtcaaactgatactataaacagtggaacacaccataaattttaaccaagttattgagaattgtaaaggaatgttaaaatgagtgtagtgtttgagaactaagatgataccaaatgcattgatttaggttgtatgcatatttgagaagttatatatgcgtatatatatacatatacaagtatgcttacatcatatgttgatatcaatgtctacaattggacccaaaattatgtccttcaatcctgccatgttggattgttcaaatctttacccaaaaaaaaaacaggcatatgtatgtgttttattaattttctcttaggctcatattagtatagatatttatatgtacataaag

SEQ ID NO: 163175 - DNA, 2181 bp, Cannabis sativa
tcacgaagcaccttgacattggatcttaccgtgactggcctgaggaacaaagacaagaatggctattgtctgaactaagtggaaagcgcccacttttcggcccagaccttcctaaaactgaagaaattgccgatgtcttggacacattcaatgtcatttccgagcttccctccgacagctttggtgcctatatcatttctatggcaacttccccctctgatgtgcttgctgtcgagcttttgcagcgtgaatgccatgtcaaggagccgctgagggttgtcccactgtttgaaaagcttgctgatcttgaggctgctccagccgctgttgctcgtctcttctcaattgattggtacagagatcggatcaatggaaagcaagaagtcatgataggctactcagattcgggtaaggatgcaggacgtctctctgcagcttggcagctatacaaggctcaagaagagctcatcaaggtggccaaacaatttggggttaagcttacaatgttccatgggagaggtggtactgttggaagaggaggtggaccaactcaccttgctatattgtctcaaccacctgacactatccatggttcccttcgtgtgactgttcaaggtgaagttatcgaacaatctttcggggaggagcatttgtgctttagaaccctccagcgtttcacagcagccacactcgagcatggaatgcatcctcctatatcaccgaagccagagtggcgggctctcatggatgagatggcagttatagccacagaagagtaccgctctatagtcttcaaggaacctcggtttgttgagtacttccgcctggtaagttcgacattctatctttcatagtgatgtttttgtgctaaaagaagtttcatactttcaaatttgatgctataaacctgataatgctctgcaggcaactccagagttggagtatggtcgaatgaacatcggcagccgtccatcaaagcgaaagccgagcggaggcattgaatcacttcgtgcaattccatggatttttgcatggacacagacgaggtttcacttgccagtgtggcttggctttggggcagcatttaggcacgtaattgcaaaggatgtgaagaaccttcacatgcttcaggagatgtataaccagtggccattcttcagggtcaccattgatttagttgagatggttttcgccaaaggagaccccggaatcgctgctctgtatgataagctccttgtctcagacgatctttggtcatttggagaaaaattgagggccatgtataatgaaaccaaacagcttctcctcaaggtataacttaagctacgaactctttagtaccattatatcagcaagacagcaacctttgctgtatctaatgattgtgaaaactgatactgtaacattgtttgtattttcttggtaggttgctgggcacaaagaacttcttgaaggagacccctacttgagacagagactttgtcttcgtgattcgtacacaacaactctgaatgtgtgccaagtttatacactcaagagaattcgtgacccgacttatcatgtgaaaataaggccacatttgtccaaagaaagcatggagtcgaccaacaaaccagctgctgagcttgtgaagctcaaccccaccagtgagtatccgccggggctcgaagatactcttattttgaccatgaagggtattgccgccggtatgcaaaacactggttagagaagacacggctttgttttatatctatacgtatatgtcattgaagtgagatattttccttgtttctacttacgtctttccaaacgctcgtttaagttggtatatgatattagtaataataataatgtaagacaataatttccatattgtctgttttttttttcctttccattatatcttgaacgataataaagtgttcaagaattattatttaattaggaaacaaatcacctttagcaagtggttgtattttgtttagtgataattaaatgatagaactatatgaaatttcaaagtttgatattttgataaaaaaaatttttattaatacgagtaattattttattattttttgtactcatgttaaaaaattaatatcttcacacgtaatagtaataaaatattaaagattgaggagtcatcacaaaataaaaatttaaagaaataattacata

SEQ ID NO: 163176 - DNA, 2821 bp, Cannabis sativa
ccaacgtggaccccctccctgatttaagacccattgtggataccctgtcgggtcgaagccgaatgagttgttccccgttcccggatcttctgctgacttccaagaggtcaggaacctgtccactccagtgacacggttcagcccaagtttcatgaaagggagcatggtgtttgttgggtgatcaaaactctgccataaaagagtctgtgcagagttatttcgaaataaaacgagattcccaatgtctaaaagcttagccatgcagttattttctgcagggaccgaaacattggctgaccaatgaggagagcccctgcttttattaccatagataacaaggcctccatgactgtcaatggcaagaactcccgaggtatcatttaaaggactgtccctattagctacccaaacgatggtttgttcatgaattttgtggtaccatattccgacgtaccggtttcgggaattggccggactaaaaaacccaagtgcgaatttatccggggttgagatgagaaggtccccgtccttgagtggttgatttgaggtaatggtattgagggaaaggcaggaagagaagggtaggagaaatagaaaggaacagatgcatagagtttcagagaaattcatggtacgtattggctactactctggtgaattagccagtgagtgtggagctcaggttaatgaagaggagttcatattaagcagatattgatctttcacatagatcttagtcagagggtggagattataacaagtacacatacgtataggaggcagttgtggctttaaatgctctgttggacaatacattgatcaaaagtcgtcgtaaataagttatgatattgatgtcatttaatgctctaacctttaaatgaagaaaaaaaaaatcaagaggatacttgttctgttggaagagctactgtggtatgaaatggaaggatataattaattaggctgagtttttaacttaggttgctactacagactctgagttttaggatttcgtgaaccatttccatacgacatttaataaaatcaagcaaaatcttggttacattttaaagtactaaaatattttattatttcaatagaatgattatattattttaaaataaaaaaaaattattcttgcaaaaagaaaaaatttaataattttattattaattttttttatatatatattttaaatttcatttcattctattcttaattttatctttcattagtattagttaatcgatgtgttatgttatttattaattcgttgacaagaatctgaaacttttatttatttatttattttgaaactgaaactttcattttctagtgctctgtttctacatgcatataacttcattctattcttgaaccattgatctatatttagttaccgtaactgtgttctgttaagctattgaccacttgattgacaagtagaattataattgttttctctctaattaaataccaaaaaaaaaagaaatataataattttattttcttactgttttcttccattaagagaattggaaataaagaaaaacgtagttcaagcaacaacaaaattgtattatgacgttaaaattttttacaccaaggtataatttagtcgaattacagtgctatgccagtttacacaattttctctaacttttggtaatctctctggactttctatttcagcttgaaatgttttgaggatgtatttcgactagtctggcgtgatcaagaacttattccctttttgaactcatttctctttatgtcctcgcgcgttcttccatctgcttctgctcttcgaactccgtacgctccacctttaattccttccttccagctctattctgcttttaattccttcaagctctgctctgctttttaagctgatcgagctctgtcttacttcttctgccctttcctttaagtgaaaggtgtgtttaatattattccggtcacatcattttattatctcttctacatttttattatgagtagaattttccagctactaaattaacttttatctttgtttatttaacatgttaacatatgtgatgccctatttacataaaactaaaaaataactcatagtcatagggattatattttttgtacatgcctacatggttaataatatatctgtttacaaaatatggattttaatttacagtgttttttggcagaggttttgcacttttcacttgtggaaacaaaattttggaaatttcaaccagcacaaaaatagggactttgttgactttctaatggtatctctgttttttttttttatctccttcctcactcacaaaataaataaataaatgaattgatccagtaaaaactttataagatatcatccgctagtaaaggcttatatataagataatatataggtagaggctatcaacgaggctggaccatggtacatgtgacatcatttacagagtcaagtccttcactagttgatgggtcttcatttgcagtgtaacctcttttaaatacaaaggcaggctgttttggggtaggaataactgcttcattacccaacatgatagcaacttctaacatggtgggtcgatcactggcactgtcttgcacgcataatagccctattgtcatgcatctcaaagctttatcaccatataattcatccaatgatgagtccattatttccaaggctctgccttcattccacaaatcccaaacctagcttaaaacagaagtttaaggcattatagatatgtcatcgagctgttaggctatttttagcctatgttttggatccgatttatgtgcattcttagctgtgttggga

SEQ ID NO: 163177 - DNA, 1073 bp, Cannabis sativa
cttctaaaatgtacctaaaggggtccactaatgcactctttatatgatttgggaatttagtttaattttttctttatagtcgtttacgttgtaattatttaaaatatcttataaaattttaaaagattcgaaaaaatttaacacgttgaaattgggttcaaacaatctactgcatgcgagagacttttattttatacgcgggtgaagtagattgtttgaaccctatttttcggcgtattaaatttttttgaatttcttaaaattttgtaagatatctaaaataacttctacgtaaacaactataataaaattactctaaaaaattatctcaaatgccgaaaatgataaaccattgatatactatcgataaactatggcaggttaatttcttttttttgcatggtattttaattgattattaattgtttatcgatggcgggctgatatacatttttttgctttgtattttaattaattattgatagtttgtcgattatatatcgatagtttatcaacgatttcgtcttgtgtgattaataggcccaagatacacaataggcccagaatgttctggtggaaaatcctctccgatggcctgctaactagaggaaaattagggcctatgctctcgctttcggacaccagttgtccgttgtgctgttcggcggtggaattctcctttcatcttttttgggactgcccctttgctcgtgcggtctggttcgggtgcaactggcaggttagaaccggtgaccttaatatccatgattgggaaaattaattgaattggctcgccactgaggcacataggcctcctaatgtcagttaccacctattccttggaggggtggcgatcatttttcagtgtatctggagagcaagaaatgctctcatccatgaaaagaaaactactcccttgcccgtcaccgtgatcaacatcaatactagactgctggaacttctaaaagcacaatccggttcgactaaccaacagagtgaatggctttctcctccggttggttggatcacctgtaacacagacataacaattggcattaatcggtcagtaggag

SEQ ID NO: 163178 - DNA, 1914 bp, Cannabis sativa
tctactcattcataacaaaattttggcaaatttcagatgcttaacaaggagcatgaaaaagctgaagactcgaaacctgtcgctgtgccatctgcagcaggaagctagattttaatgccaaaggattttattgaagaactcttcatcagactgcagttttacaatgatttgatcttcccagtagtgtaataggttataatttttgcagtctgaattggatggatggttacagagatggggcatatttgtttgattttaactctatgatttcctctcctagaacatgtgatattctttcatatatgtcattggattttgccaaattgttaaaacaaaaatgttctttctacatttataattgtactcatccaaatggcaaccattggtattgatactgaaccaaactattgaatataaacaattgacaaaatgtattagaaacaatctattttataatttctgtcatctatatccaaattcttaactaaaagaaaaacaaaagttcaacttccgaatctataatgattcagacaagaactgcatattttgtattagcccttttcattcacttttcttcatcctcatcatcaggctgaactgattcttcaaattcagcatccatgataaccccatccattacatgtacaacaattttgttccttttgatatctactttttcagaacgaactctgttaaccactaacattccatccacatctttggaaatatacaatacaaacccagatatagaatcatacaaaatctcctcaccagaagatacatcatctgtgataattgtccttggaactgccgagaatcccagaactctagaaattacagcataagtatcatcattcatcttctcaaccagactttcgtttttccttagccttaaatctcgttcaaaagctctctctgaaggaacaaaaacagtgaaagcaagatcttcaggcaacatttcaatcatcttctctccaaatttcccaatagagctagagtctaaactttctctggtttttgtattatgatacaacccaattgcctttctactatttgacacctctggaagcctaagaacagaaattagaaccacaaaaaggcagccaaaaagcaccaccaaccatacgaaggagatcgaagtcttcaaaaaccgacctctgttcatcttcataattatccgattattttgaaagcaaatgatttgcaactaaatgaagtgaaatttcactagttctactgtaaaagttagatgtagtgtcaaaaacttgctttttataagtaaatctaaaatccaaaagcgcgttttcaaaacttcccccaaatctttaaattattgatgaaaaatgatcgtgagcttgaccgaaagcaagaacaaaatcgtacacgtactccctcatagccaccacaggcatcgatgtttaacaaacaagctcgctctaagaaaacccattacgccaatcatgcaaaatgaaaccttttcagttaattgttaaggagtgagtatttcccgagctgcctgcatcattcctacaaatcaatagccgtgtccgtttggttcctgggaaaattgaatcagaaagaagaaaaacacaataatgtaggaattgaaaataccttactcattcggaaacttagtaaattcatttccgatttccggtggatagatctgacaagtgacaataaaccactgacattttctattggactcgggacttgggagagagacaactcaggttcagctctctgtgatttgatttgaggttgaacgctgtactctttctctattgaaccaattataggcacttctccaataagcccagtctgaccaatactgggtcccgattgactattgggccttttatgtaatatgttgaaaaaaaaaagaaattataaatattgtctttttttattttt

SEQ ID NO: 163179 - DNA, 3869 bp, Cannabis sativa
atgatgcggaatgagatgtatcatcatggaacacctttggatttatctaagctgcagaagcaagttaaggatggcttcattgagcataggagtttgctgtagtcaatttttggttcttcgcaggatcttggcagtgtggagaaggttcgttggggccttccgagactaggaagaatcaaaggttatgtggattttgcaaagtcggatgaagaaggtgcggtagctgctgtcttctttgacccgtctggctctgttctggcttttggagccaaaaaagttttggtctcctctgtgttacaaggggagttggaggctatgcggtttggtgtggatcttgctactaggcttcacctggggggtttgtgtatcctctcggacaacctccatctggttcagtctgtcaaggcgaagtcctgccctttttggaatctgcatcttgcgtttttctctcttgttggtgctttgcattcggggggttgatgtatgttgggtctctcggattaataatgcggcgcactctcttgctagatggggtttgttccaccagtgcaatgggttgttgcggttttgggaggtgagtccccatgtgctcaccaatcttcttggtttttagttttaatgaatgtttggttttcagcaaaaaaaaaaaaaaaaagaagatatgaggaaaacgacaccgttcgcaatgcatcctcatttagtgaacaccgaaaccggaacaagagaaaaggagacaagaaaaccaccgccaccagttcttgatttctcagaatcatacataatcccttttatcttcttcatcaccaaaaatagggtttagggtttttcatattcttccattcagtgacctttaaactccaccatttatcatcatcatcaatggcgaccgaattggttgtcaacacggagagagtccagaaattcttcaacgacctggaggagcaaaagaccatcctttctacctgcactcagctattcacaaccatatccacccacttcaattctctccaacattccctttcccaaaagtaccaatccctcgaatcaagaatccaagctcttgaatcccattcccgcgacaccctccagtccctcgacacccgcgaggcttccattcccgaacgagaatccgcctccctcgcccgcatccaggagcagaaggaagctgctttgtccgagttcgaaaagcaaattcccgaaaacttggaactttcagaggcccttaaatcattttcccggaaaatggattcggcgggattggtgaaattcatcgtttccaagaggaaggagtccgtatctttgagggcagagatcgttcagtccttggcggaggctgtggacccgcctagactggttcttgattcattggaggattttctgaattccaagtcggccaaagctggggttactgataagcgatgggcttgtggattgcttgttcaggctttgtttcctgacagccattcggagaagataggacctcaatttgcgagaactgtcgtggagagagcagtcatgattttggagcagtggaaggggcagatggatggtggtgaatcagaaggcttggctttgggggctgccgaagctgttatgtttgtgcagatggtagttgggttcgggttgaatgcgaagttcgataaggctttcttgagaaagctaatgctgcagcatgcttcgaggagggatatggcaaaactcgcagctgttttagaagataaagactcaatgcaaggtaaggttggtttttaatttagagaactacattaagtagcttaataaaccttttgcttagcagtgatagtagatatgtgtagttacatttgattgactcctagcatggtgaaattgtagaatttataacattacatgagaattcacactttaaatgattgatatacatacaagtgaatcctgtatatgttacaaaggtactgtgaacagtaccattacagtgagtataacagaaaacttcttgaaacttattgtctaaattgctactggaaacctgtctatttctagtgcaatgaagtataatatggacaatgaggcaaggcaatgtaagtaggttaagagataaaagtttcaaggcactggaaaaggaatggaaagtataatcatagttaggcagagaaaggtttgaactgttatacggttcttttataggatgggagtttattatgaatttcaagtggagaaaaaaaataaaatgaaggacaactcttatatattcaaaagtgacattggttgctcacatctgaacttgtttttgtttaagtaaaagcttttgaaagttccaaatgtttactttgaatgcatataatcgagacatttttttctgactttgcagagattattgatgagttggtgaagaataacaaagaagtggaagctgtctattttgcttgtgaatctgggttggctgaaagattctctcctgttactttgctcaagtctcatctcaagaacttcaaaaagaatgttgccaacatattaaagaatggaaacaatagcttggttgcaacggtttgtctatattctgacatattttacaaatgtctttttgcatgtagtcacatgactgcactttttaagattttataatccaagtcgtatcatccacaggaggaatctagtaatgtggagttaaattccatcagagcaataatcaaatgtgtagaagaccacaaattagagtcagaattttctgttgaaagtttaagaaagcaggctactcatctggagaaagccaaggcagagagaaagaagagttcaggagcctccagtaaacctcaaaataagcgaggatacagtgccagcagcggccgaggtggtggtggtggatcatcttcttttcgccaatccaaagctgccaagtattccaacacttattcctcttttagcaggaggaatgcgaatcctcctccgccggttcatcacagcactgctgcaagatattctggagcatacaactaccctgttcaagctgtgtacgacacaccagctccagccccagccccatatccgtcctcatacggggttccccatgctcaaagccctgtcgcaattcctcaacactatctctcggccgacaacttgagtagtactgcctttcggagcagtggctcttacagtggtctgaccaactacagaccatatgattatgccgaagcggctccacatacttaccaagcgtcctcatatccaaaatagattaggagcggaaatggcctaatgataagagccttgtaatattacttttcttttctcttttctggccaacagatgagagaattttgcttaaaatggccgactttttaaggttaaacgcaaaagttggtaataagccctgtttttatgacagtttcagaaagggcttttcccagcttgcaattttttcattctattttaaaatgatgtatatgattattagattacgattactgaacagtgaattagcataatatagagtagtatttttaaaatttctttctaatatagagaaaggttttataaaacactaaagtttttttttttttgaaaataatttttatattatttattaagagtattatagtaattttataataactcatttttttccttagtactcaccaagcaactaagaaataaacaagttttcaagtaattttatgtcttatgttttcttaaaagcgtaaaatatgcaatcgcatgtggcagtggttgggacttctttggaaacaaggaggttgtataactacaactattgttttcttttttttttttttggtaatttttggctaaactacgatttagtacgatcaattcctagactgaaattttagggactaagtgcatgtttgacatcataactaaaaaattgtttt

SEQ ID NO: 163180 - DNA, 2618 bp, Cannabis sativa
tgtcattttgcaactcttctttctatgtgctagtttgatgaaagaacttcagctgtcgttcaacgaagaatgctttggcaacgaacccaaaactctagcactcaattctcatatcggagagccatcaattcgtcaaacggatcgttatcacttttcgagcagcaattaaataacgtgatgcggaattccaaccaatttttgattggatcttgctcctccactgcttgaaaccatctccaagcaacatcctttaaacatgcttgagccacagcaaccttcttgctttctagggtctgataagcttggaaatattcttctatgtgaagaacccaaccatacgggtcaactccattaaagagcggtagtcttggcgccgtgacggaggtcacaagatcatgctctgataccatttgataagaattttctatcatttcggtacaaacagtagcaaagtagagataattgagatgatcaattgatattagaagataaaagctttgctgggtattcgagagacccagctctctcccaagagctaaaagctcacttaactaaatcattcaccacccctttaccctccctactcactcatatatgtaacataaattcctcccattacaattacccaattaccctctttatttattaccctaaggcctaacaagagattaactcacacaaaaaaacctaacattgagaagagcttgatcagacacaccacaagccttctaagtacaacactctgagaagaactagtctctccttctaaagatatatacctaagtaatcaatctctaaagctaaacatttctctaagaatgaactttataaaaaatgattgtattttacatgagttgagctatgttagttatagagtaacccaactaacttaactaaccccagtggagagaaaaagagagagtgttgacttagtgactaaactacatttcaacaaatataccttggtataggcactaggtctttgaatactttgaagataggttaaaccttttgcatatgatgaggaatcaccctttatcgcttatgttcaagtctagacagtgtctagcttgagtaacatttagtcaaaatgtttgttagattgtgatcaatgtacactttcttcacttgaaccttccttttggcaataatgtctcgaatgaaatgtagttttttgtcaatatgttttgactttttatggaacataggatttttcatcaagtgcaaagcattttgattgtcatagtgaacaaccatgtcttctgatctgaatcccaattcactattgagaacttttagccaaatagcttctttttgtaccaaccatatactttgcttttgtagatgacaatgctaccaccttttggagattagattttcagctaatgcatccacagtagggttgttcattaaacttctcacactgcataaactgctcgcactgcattacactgcataaaaagtacagtttgaaatcctttgcggtgcagttgcaatttttatttttctctaactccgtggtgtagtgcggttggcgattttaaatttaataattatagttcaaaaggcaccacattatatattacaaattatcgatttttacaatgtgagttttattcttttttttttttatctaagaacaaatatatgtaatatatgtatacattgcatttttttcttagagacaattccacaacttgataattagtatatatatattataatattaaaattttaataagattttttttttgtattgttaaaactttatagattgtttgaaaatttttattataatgttcgataatgatgatagtgtaaaccgctcaaaccgtaccgcactatactgtatttttgcagtgtaatttttgcgattttaaaatctcgcggtgtggttgcagtttgagaaattagaaaaactacatatacggtttggtttgaataaaaaattacaatctgcaccactcgcactgcgaatactcctaggcagcaaaaacaattgagtcatttatttattgggaagcacctagagcaattaaatttgctgttttcgttgtattttccttagttgttatgccatttgttgtgcatctaaatacgtatttagtcttggacatctaaatgcctatttagtcttggaattttatgtgaaatgaagaaagtagttttcaatggagattgaaattctcttgaagaatgtgtatttttttttaggattaagtgatatattctctcctaagagttgcattttatgattttttttttgtttttatatatattttgcatttaaaaaagtggaaaaaaataattaaaaggaataaaaaaaaatacatcaaccacaaccaatatatgttgataacgaaaatgagtccttcaacctccaactcgatcattttaaatggacaaaggtcccacgaaattccggtgaaaaagctgactataaaacattatttaagatgttttttttttcttgatatttttcaacccataaataatgtaaatttgatttatataagagtaatttacaatataaatacttaagtttaattctcagttacagataaataattaaatttaatttttaatattaaattatttacatgaaaaatccattttac

SEQ ID NO: 163181 - DNA, 1086 bp, Cannabis sativa
atagaatggccagaaaattaagaggggtggagctcggctcgacctgacataactatataactttctctttgttgtttattaaatacttcaaaaaatttacattatgctttccatgccattttgagctctcatcactatcaatagttagatttgactagttagtgttcatatattaattacctaaaaatattcaaggggcaactaaaaatacattttctcggactaccttggccacacgctatagaaatgaggcaagacttagttacatctctttgtggagagagatagacaaactacttgagtttgaacaagactaagtagacaacatggggtttggccacttaagaggaaggaataagaacccacacaattgatgcattaattcaatagctttatggaagtgtagaattcagtcgaattcttgtatgttaaattgaggatatatattgatggtagaaaaatgttaaaatttttaacaatattttagaagattagctgaaccatgttaagattgataaatatattgctgtaataatgttatattaatgctaggatgattgtacatttttaaaattaagttcactacattatgtatgtgggaaaggggagccacaaccttaggaggggcaagccgtgtacgtggacgtcttatgcatttgggacgtgtgaactaagttatgcatgcattcttgctgcttgttggttctatgattttttttttgaatgcaaaataaaattttattaatttgctaaattagtcaaaagacaagattacaattcagtaggaacaacattcctactgaaaactcgatctaaaaaagaatatgactctctagcaaagctgtgcgtagtcatattagcagatcgtttaataaaaaacaaagaaattatttaaaatagatagaagttgtcgacagtccatcaccactctcccaagaggcgaaaccatggtgatgtcactacaagaaatgtcactttcgccccaacacatttttgtgctggcaaaagttagtattgcgctggtaaaatagaatttacttgtgatgtgttggcaaaaggggattggcaaatcaatgttggtattag

SEQ ID NO: 163182 - DNA, 1922 bp, Cannabis sativa
acgggaaacaatctaggacccaaagatgctgtaatagtactgtgaatgttgcttttgtagagttcctacatggaaaagagaaacaaagtcatgcttatgagatacatataaaataaacacatacaaggaatattaaaatataattaaataatatataaatattaatataaaaaagaaaatatggaagtaaattaaaaaagtgagatacatataaagtaaacacatacaaggaatattcgcaagcatcactaattcaactgcttaattatgaaaaaaacagaataagaaacatacagatactgcagatgctcaagcttctcaagttcgaaacaaaatgccctgacaaatttgaatttcctaactccctgccaaatataataaaataaattgaaaattgtgagcaatgaattatgaacgctcacacaaaattaaaactaataggagctactatattatagatttagaccattttcatttcactctctctccaaaacatacaatacaggaacaacaatatttatatctcaatcaaaattcttatttgttataaataaagggcatatacaccaagatttcagggcccaatatgcttagcagatcaaaataaaactaacttcagatgggattaatatacagaaaagaagtaacaatatgaaccaaattaattacaattaccaaaaaaaaaacagaaaccgcaaccaatgaaataaataattatacttcaagaccgcagacagaaaaaatttaaaagcattagaatcaacaaagaaaagaaccaactttaaaatggattgacttaatatacaacaggaatacataattgctcaccaaataagcagaactgcaaaaagaaaaaaaagaaaagaaaaagaaatacagggtatgaaaaacaaattaagtttcaagaaatgaacttgttcaagaaaattacttgtacagataactagatattatagcaacagaaattaaaatgaaattaatttttataattgatcctaaaacaggaattgttcatcaaattctaaatgcttagaaacattacaaaaactattacacaaacctatgtgcaaaaactgagaattatcaagcagtatagaaaagaactcatgcaaaattctaattatcccaaactttttctttcattgattatttctctcattgttttatggctctccaaaccctaagagtcggcatatacataataaagcactcatatgtaatcactaagtaaatcaccatcattttactaaagatcaatagattaaagtcctcgacgaaggaaaagagggaaaaatagagagagaagagaacaacttacccagagaaagggccgatcgagagactgagagagctccgatagatataacgactgagagggctccgaaagatataccgccggcggagagaatgagagacctccgagagagactggcgacggatcctgctgataatgagagaaaacccagtttacttttttagggtttagcgaaaaaaaaaaaaaagaaaagagagagggtttgatcttctgctgcttcgaccactctcgactcgagcaccaccttagccgctgggtgccggagaagttgaacagagaaggtaagagttagtgaggcaacctgcgctgccgtcgtcggagaatcgagagagatatcgaaagggagaaaggtatttgtgctttctttttacaattgacataatgaatcgtctcttagggtccgtttggtaagaacaggacaagattttttttttttttttttgaacaagacaagatttgattatgctcaaaataaaataaatatacttaaataatataaaattatttatgttaaatagtaatttttttttcttttaaataagggtaaatactatattagatcctgtgttttgcaaaagttacagattggactctgtgttttgttaaa

SEQ ID NO: 163183 - DNA, 1765 bp, Cannabis sativa
ctgttctgcgcgtgggagattataggtgaattagttgcaagtggaatggagtggagtggtgggtttgcgtgcgttcctttacgtttttgcgggctttttacgtgctttgacttggtctctccattccctctctctttctctctctctctccgctaatctttcccgctaaaagaagtgtggtatttttgagattttccgaattgatgtgacaattttgcaatattaatattttgttcacttgttacgaagattcattattattaaaaaaatttaacaaaaaaactagacatccgttttcattaaaaaaattaattaaatatttatcttaatatatattttttatgaaattatcctaatataaaatgaccaaattaatcatcttcaaattttagttcttcatttaaaaattttacttttataaatttctactcattgacagttttttatctcaaaaaaaacgtctactcaaacatctttaagcatagatcaataaatgaaaattatttcaaaatttataatattttttatttttttaaaatatcttatttttatttttataattttatttaattttaaaataaatttttaaataataatattaagtgtaccaatataaatgtgtcatttgtacaatagtacatataagcaacccataatgacagttagctgaatgacaccttaaatttgctactgattcagtagtttggaggattttaccgtcgaaattctaataagaaaaaactaagtgtagggtgtattttctttttcaaataagacccaccttaggaaataaattaggtgtagttataaaaaaataatgttttaataaataaaatggacttatgctctgctcatgtgatatttgctcgtgtcataaccagcaatgtcgtgcacaaattgagttttcttgactaaatgtttgaacattggtagggtcgattcccggttacaatttcgacttatgatgatgacatctttcacgttgcttttggatgtgcaagtgacaaattttacgcaaagagccttgacattctcagaatacattatcgtcttacactcactaagtattctacaaaatgtctcaatggatgatatggtatatacacctttttgggtccagatttaccgtttacttttcttgagtaagacatgagaactagcagaggctcttagaaatattattggcgaatttgttgaagtttatgaggattccactaatgaaggttggggactaaggttcgtgttaagatttgtattactaaacctcttcttcgtgggcgtacgattaggttgcctaaaataagtgatgaattttggatagactttcactaagaacacttacctaaattttgctttgagtacatccgactcggtcatctgtttgagaaatgtttctcttttatggagtgaatggacaacatgaatgatgatgatctattttttggctcttggatgaaaggtgcaaaattaccaaataatggatatgatcgctacagaataaatttctgaaaaggaaatgtttggcctttgctaacacgacttgctaagaacattatatcatcaacaagtactggtttatcttcatttagtcagccacatccaagacacctacatgcaggggaattatttacaacacctagatgatacgtacacttaacccccttatgtattaatttttatatacttaactctcttatctttttcttgtagcaaaacccccttatgttttaacttttatacacttacccacttatctttttttttt

SEQ ID NO: 163184 - DNA, 3622 bp, Cannabis sativa
  modified_base (2269)..(2274): a, c, t, g, unknown or other
aaccctatgtcgtttgattctacaccgacagtaaatggtatgatccaattttatacctacggtttttataaaaaaaaaaacagcctctaaaggtaaattttcaatgggcgggtatttttagaccctttagccttttcataaaatggattgaaaaaaggaaagctaaaaacccattttgtagtagtgggtgattattttaggtgcagctatagtataagtatagctatgtatcactgtttatacatgttgcatggtcttatatcgggtttcagccagaactatatcttcataaacatcacagctacaatctagtccctgtgccaaacacttgaaattgttcacaaactacatatttccttcatgtcttgatgaggaacttgaatatcgtagggtagttcaagtgatcgatatatccgaacataggcttatatcaccataaattaatattatatatgtagccagtgatatttcttctgccctgtgacttgtattcttaattttcgtgtagtctcaatatttgcccccttcccatactttcaacaataatctcttttgattgatcttaatatattcgatttattgtagtcacacagtggcttgggggacatttttcggtcgtctttcctagcagccatgaatcgtagggttcaggacgactgggagcgactggttcgagcaatcttgaagagggaacagctcagagctgctggccaaagacacgagagagctcgaactcccagtgggattgcgggttcagttcccgcgtcgctacttaaaactactaacattgatgcgatcttacaagtcgccgatgagattcaattggaggatcccagcgtcactagaattagtaagtttttatttatttattttaaaatatatttcgtgtttgttgattttatttttccttatatattttttttattgttttgtgaaaagtagtgaagggagctagatcagcagggacagatccgttaattttaggagggaaacaatttgtttttacactaaaatattgaactattaatcaaatttaaaacatttaaaataaaaataacatgcaattataaatttcataattatattataggtaattttaattttatactcaaggaaaaattagtagatcaaaagaaaatagttttcatgcaacatctaccatagtattacttattaaattaataaaaaaatatatattttaaaataattctataaaattatggaagaataaaattaaaaaaaaaatatattaggaagaagatttgagtttcttttatagataaataaaataacatttaagttgaattgaaagtactcattattttttaatttcaatatttgtaataagtaaaaaaaaaaacaaaaaagaaaaatatattgatatagaacattaatatagtaatatatacatatacattacctttgccttaactgaattagaattaaagttatttttaaaatacattaaaatgaaccgataaaaagaaaagtttacattagccattaaaaaataataataattacattttaagattatgctccggataatccatctcaatcacgatatgttttatgttgtttgtattaatcgaataaaatcatgatacttttttcttttatgaaaagaaatcatgacactttgatacttgaaaaatgaacgctaattaagttgtaatgaaaaagggtggtttcaaaaacataaaataaaaagggaattgcatgccacagctactttttccctatatatatgcggctaagttttttttaccactgcttgcaaaaaaaaactttcttttaccactgatttcaacaggaaataactctttattttattaagttaatttattttccttaaatatatccctaatctctctctccttctacatctcccaaaatctaatttttccaacatttagattttctatctatttcctttttctctcatccgtaaattttaattttctgtctccttttttacctattttttttttccaaataaaccttcgtatcagcgtacgatactgtacatatatagaaaaaatggccgcctaaagaatatacttctacctggttcaaaaaaaaaaaaaaagaaagaatatacttttactttgtttattcagtaagaaaaacagaaaatattcctataacaatagtgattatttgaaaatggttaattagcattttgggccggaactttgacatgtatttaatcatgcctccagaactttgaagaccgtcaaaaatttcttctaaactattgagattgttnnnnnnaaggacttttgtctaattttaataaaaaaaagtctaacatgcatgaagattcaggggcatgatttggtacatgttaatgttcaagtggcataatttagtaaatatcaaagtctgaagagcatgatttagttcatggacagtcaccgaaatagttaaattgaatgaaattggacaaaagaccttaaatctaacaatctcaatagttcagagggatttttatctgcgagaaaaattcaggaggcataatttggtaaagttcaaggggcaaaaatcctaattagcctttaaaaatatatgtaagatgatgcttaggtggagcttcggaatacgatccgtaattctaaacttaaattaatttagaacaaacattgagaccggactaaatgaattcattgtgaatgatttgatcaatacgaactgttttaaattctctgatttggtcaccgttttaaaaatttcagtaacagttcaaactaaacgtataattattttatatatacttagtatataatttttggataaaatattaatatatgggaataactttaggtagaatattcatatttattttatatattattatgataataattttttattgttaaacttattaaaagtaaaaaaaattactgaaaaaataaataattattgcaaaaaaaaattttaaacaactataaaatacagaccatatatagttttgaacccaatcaatcttcttttaagtgtattggtatggtttggtttgatcataataagtttggtttaattttaactttttataaaattataatactgatttgatttgaaaaaattaaaaatttgaaccgaactaatgatgaatacgcctacttacaacctcccatttttatgatatatctgacactgtaattgattcacacgttctgaggaggtgtattctttttttaattgatttcataaaattaaaattcaatatttataatgtagtctaaaattagaatatgttaaaatttgacataaaatataatatggcgaaattttactacgcagtgttaattttttatttagtcttttatcaatcattattagtaccttaaacctttaatgattttttatattttatttatatatttaattaaattttaatagacttttaattaaaatttaatgcggttcgtttggagggtcgtattaagttgtattgtattatattgtattgaattgtattttatgcgatatttttatgaaaaactatatatgtgctattaatttttatggacacctaaatatataatatcaatatcaatatcaatcaatcaatatatataaataaaggaaagcacaaaagatcttaagtggcatcttatct

SEQ ID NO: 163185 - DNA, 1605 bp, Cannabis sativa
  modified_base (1565)..(1572): a, c, t, g, unknown or other
ttaaacacaaagtataactatagatgataacattaataattgtttttatctataatgacttaactcataccactacaaactaaaccgcctcaaataattggttttcgtagatgtcttaactttataagtcaaaatgagatgcttaacttcaaggactatattctggcataaaggctttattctgtacagtaagaaaaactacagtatgagaatgatacttatcttgaaaagatttgcaactttgggacctcataattgtaagttgcaaaccatatacaattaagcttataagttgcaaaccatatataattaagcttataagttgcaaaccatatacaattaagcttataagttgcaaaccatatacaattaagcttataagttgcaaaccatatataattaaggttataagttgcaaaccatataaaattaagcctagtaattaaattttctaattggcttcaaattaaggtttgcatacaatttaggaaaatttggaaataatccaataagactaaacagtatagtgttttgttaggtagagaatattgcatgatgacatgtatgactaaatggtaaggcatttcgtcggagataggatgttaaatgcaaagtgtaaggttttatcattggtaaccacatagcttggcttcatgtgtccaaaaagttacctacaatactcaatttttcggaagtttcctgaaagaaaacgtgtacaagctttgataattgaatgctagagcttacaagttataactttatgtaagttgtgtgcaaatttttagctgtctcctaaaatgcctacattgtgcacaagatattgaccaaactttctgagtataaacctttgtatcataaaacatttattcatcctatccaaagctaattttatcaaagtgtaagcattaaaacaccactctttgttatccctacaaaagaatcatgggatatttacacctaatttatgagtgaaccaaaatgtcctccataattaccatgaataagtagactctaaaaaccttgtcacgtcagtaatacatagtgaaattccaagtggttaaactcatttaatcagttaatgttaaaacgttatctacatttcattcagattcaaacatgtcaagaatttccttctggcatgaaaagtctcctcacttctataatgacaatccatctcatatttgagcaccttccaaatcttacagttcatgtcttggaccctctctctcactcacatataatcaagtaaaacagtataaagatgtcactaattttgcttcctaagataaattttacaatgaatatttctgaatatccaccacatataacagcataaccaaataaacaaattatctcttacaactcaaatcatgaatggcacatgtacctaatttgtatgtctttcacaacatcttattttaactcaatgaacattttagtaatgttccttcttggcaattggcaatctaaagaatgtttggcgtgtccaacatatgttgtttcaaagattctctctcttaatcaacataatgatatggctaattagcaatttttctcccgaactnnnnnnnntaccaaatcatgcccctgaactattgagattgt

SEQ ID NO: 163186 - DNA, 2736 bp, Cannabis sativa
tgatttttgataggagcagatggtgctagggtcaatggagtagagctagtagctctagtattaggtgcaacattagttggaagagaactagtggaagaagtggttgtagtagtgttgttatttgagttagactctaaagtttttgcagtggttgaagaataatcttgagcaggattgtgtggacagtgtagcatagggaaagagatgttcattgaaaagaatacctcttaagatgtaaatccttccagtaagggagagacatttgtaaccctatgtttgatactatattcaaaaaaggtacacttaatagacctatatttgagtttatttttgttgtaaggcctaatatttgggtagcaggcacaccccaaaatgctcagctgggaatagtctatgcttgttgaaacaaaagggtgagaagtgttttattgttcaaaataggtgtaggaagactattgacatgataaaggcaaaagatctaatagcttcatcccaaaaagataaaggcattgaggcatgagtaaggaatgttaaagaagattcaattagatgactgtgttttcttttgctacaccatttttgtcatggttagtaaggcaggataacctatgtgaaataccattagttaataggtaggattgaaaagcttggtactctcctctccagtcagattgaagagacttaattcaacattcaaactctttttcaaactatgttctaaaatctataaaagtttaaattgccttagatttcgctttttaaaaaaaagacccatgtatacttactataggcatcaatgaaattgatatagtaatgatatccacttgatgagaggacaaaggaaggtccccacggatcattgtggattaatttaagaggctagatgtacatagtttgagaatgagtaaaggggaacttatgaatttatcctttacaacaagcatcataaaaaatagcatatgtgttattattgctagaaatattacacattgaaattatttgtttaactatcctattagaaggatgagccaaccgattatgccacaaggaaaaattggttggttagttattgcatgagctctttcacgcatgatttataaaaaaaaatgagagagttggtgcaattgaaggaggaatttgaggagatttggactgaagatgagtaggaggaatgacatagagaccatgcctaagatgctcttccattacagattcttggagtccatatccttgacaacagggtgagtacgataaaattcaaaagaagcattattagcatttgtaaattgggctacactgataaaatttttgataatgtgtggatcatgaagtaaatgattaggagtgagtgttttagaggtataagaagtattgaatagtttcttaccaacatatttcatgttcatacatgcaccatgccccgtacgcgtctgctcaaggctaaaagaaggctctttctcagtgaagttgctctcattggcaatacaatgactagtggcccagagtcaggataccaagctggatcagatgtcatgttaaatgtagcaatatttatagagtattgatcaacattagcagctcctactccagagaaatcaaaattaaaacattgaaaatagtgagctgctatgtgacctaacttagaccacaactgaaatactgatctagagccaacaatgttagaagctaaggaagaggcattactagggagattcatttgaccacaacgaaaggaagctgaggaggaaccaccacctcaaggattaatatcataagggttgattagatccagagttgttaaagtcggaaggtccagatctagtggctctacccttgtttgaatgatttgtggccaagttaactaaatcaaagccacgatgatgattctccatcatgtgttcttgagaaagtaacaaggattcgatctcaacaaccgtgtaaggttgattcttagagctaaccgagatcacaaaggtgtcatactctgaaggaagacccttgaatatagtagaaacatgttctttaacaaagacaagagcaccaaaaagacaaggcaatccacaaataaattgatgtgaattaaataactattgatggagagtaaagaaaggtgcatgtcagctagagtttgagtggagaaatatacctcaagtgtattctagacttgagctgaagtctcactaccaaccacacgagtcagaacaccttcagtcatcgaggagagtaaccacgagtataggacttgatccttccgctcccactaattgtattagggattgattgtgtgagagagacggtcttgttcagagagaaatttcttaggtggttgaacaaatgaggaaatatagtcaaacatctagtgacctctgatagcggacaacacttgaggacgccatagcaagaaattgttattgtcaagcttgatagagatcttgtgagaaagtaggatagaatgaaaagttgtggctagagtagcaacagttgctaccagagtagattctgacgattgaaaataaaaaattgagatcgtaatgaaacaaagaaggaagaaacaaaattttttgaaagtgatgagaacactaaggctaaagatacaagtaaagttccagttgggccggtgacaagggcgcaatccaagagattcaaagaagaactcaacaacttagtcaacagagttttaaaataagaggagaccgcagtcaacactgaaggagaacaaagatttgtgcttctcat

SEQ ID NO: 163187 - DNA, 1668 bp, Cannabis sativa
ttctgttcaattactctaaccctcaattccatttctgtaacaaggtatttcaaagtaatgaacctgaattaattactttcctttactagtatagcgacaaactacacaatcttctacaaagatttgactgccaccttgcatagagtgggttggtactcaaaacacagtggagttgatttcttgagagagagagagagagagtagaaagaaagtgtttgaatcctacagaggagaaaagctttttttttgattcaattaggattagagttttttagtgtctcaccaacattgtgaatcaaactttatcatgctccttatataggctctctctaggctagggatatattagatgggcttagaaaaagataatagactctaagatcaaaccccttgccaaaatcaccttatggccgaaggaatttgattttttccatcttatttcattcaatgaaacatttatatatgtaaaattttgccacttaattatctaattaatctatctatttaaatatcaattctatctctttaatgattataaataattataacaaaatataatttaaatttaattattaattaacttacaaagtatcttaattaacaaataaacccttactactctcttcttctcaaattagcccaaccttattcgtgaaaattcttaaataagacatagtctattttagaattctaattgacttattaaaatcaattaattgagtctattagatagtattatcataaataatgtggggatcatgtgtctatgaaatcaagcacccaataagtagatccgaaattaattaagtaaatttcttattttattgattcctactgactccactataaattcagaattgcactcttgattacatagaacactttatatactaaatacagatatgctataattatccattatttcaatataaataaccaattatcatctatagaaggtttacattgagttgggacaaatttactattttatccttaaaacatttagctccttgtaaatgatattttagtaaactattataattattgaaatgagtactagcacttgattttccttgagttggtatacacaaggttcatcaatattgttttggtggaagtcgtacgcgttaatgattttatcaaatcttttggtccaagaatgagaagcccgtttgagtccatgagtggacctatttagcttgcaggttttccttcttgcccttgaactttgtaaccttccggttgctccatatatatggtttgatcaagaatttcattaaggaaagttgtcttgacatccatatgccagatctcataatcaagagtagcgactatggaaagaagtatcctgacggatttgagcatggcaactagactaaaagtatcctcacagtccacgcattaactttgggtctaaccttttactacaagtctagctttataagtttcaacttgcccatcaacacctcttttctttttgtagatccatttgcacccgatgggctacccatcaacacctcttttatttttgtagatccatttgcacccgatggcccagaagtctttaggtgtaacaacaatgtcctagactttgttcttcttcatggaatccatggcggttgaccattatttttgttcaggactagccatttcctgtttataggttaa

SEQ ID NO: 163188 - DNA, 1700 bp, Cannabis sativa
agcagtactcatagtgatactaataacaatagcaacagaagaagaagggcaagtaattttcgcaattcgcttcttggtatgatttctgctgcaaatgttggtaagtatgttactatgttatgtaagatttaataccaaaacttgtagaaaatgaaagaaaaatgttgactatagttctataaaattgattttaaaaaccaatagtgggtgtttggccatatattttgaaaactgagttaaaaaaatccgggaacattgttttttctagtttgattttttttttcgtatacctatttttttctcttcattagtcctagtcgaggttccggaatgggtccaagatccgggtttcgagccaggttcgggggttggggtctagggttggcgatttagtccaggactggggtttgggatcgagtctgggatctagagttcaatagggtcggtgtcgagtttgggtccggggtccaagtttaggtttagggccgttgaggctaggtctgaagttggggtttggggtccaggctcgacgtctagagtctgtgtcggcttgggttgggttcttgttgaggtgtgaaaatagtttttagaaaatattaacctaacctatcatgtattttgaaaactacaaaagttatttcctgtttacatttcttaaacacaattttgaatcatcatcgaaaataatcaaataattttgttgatacattcaaataaaaaaacgtttacaattaataaactagatttattttcataacctacgttttccaacaaattccatttattagtattaaaatagaaaaacagaaaacaatgtcaaacacaccctaaagctctatcttacaatttcgatctaatgaagtaatgttttttttttttttttttcaaattatgcagaagagagagaactaattcaaggccaaagcattgtgaatagcaacaacagcaatatgatgagccaatacagagcaagagtcacaattagttgcccagaaagaggtgaagttggtggaaaactagtgtttttgccagaatcactttctgaactaatggatattggtgccaaaaaatttgggttatgtcccactaaagtgttcacaaaagaaggagctgaaattgaagatattgaacttgttagagatggtgatcatcttgttcttcttggtaataatgttaactatcccaattgagacatagctaagagaaatttttggttataaacaacataaataatcaagtatagtataacatgagctaataatgtgcatagataatgaactaacatatgccaaacaaaatgaaaattaaggttttatgagaataaaacaaaaagtgtatctcaagttttgatcatgagtttgctttcaaaaaaaaaaaaaaaaagttttgatcaatgatcatgagttgtttcttatttttagtgtatattatttgtttcttgaagaagggaaaaataataataattaatatttttacaaataattacagagataattagaaaaaaaaaaagaagaagtcccttatgttaatgttaaatttcattttagagcttattaaaatactaaaaaatttcggacaagcatttgtgatgctataagggaaatttgattttttatacttaaaaatgttcaatttattttttttaaaccaatacattttacactacaaaaaatatgacacttttttcaaaattccaaaaa

SEQ ID NO: 163189 - DNA, 3314 bp, Cannabis sativa
aaaaaaaataaatagtatcaatgccactattaatgcaataataattattagaatgacatccatctctcttcaattatatattcaattgtataatatttcaatattttatcacataatatgtctacctcaacaagtattttctaaatttttgttattggagatactctaagagatgataaattttatttacggaaagtttgtttagataatttatatgtagtataattgattctaattgatggtaattaattttttcaatctcgctatggatatagcagattgtataataatcctttataatagaaagtaaaggcaaaattgtgatcttgactttatatgaaaagtttgccgattgattctgtttgacctgtcactttgtgaatatgttgttgtaaatcaagattttatttagaaaagttttgtactactgtagaattgtatttgtggttgtatctaaagtttctatatgttataaataggacctaatatagcatacaaacaaattggtctcttcaagtcttgttattttatattttcataatttgtgtgaaaagtgtttcttgtgagaaaacctagagtattctactaggttttagtttctgtacttttgttctttgcctattcttagaatagggtgaagagcctcattgaacaagagaagaagtttacagaagaagacttgtccaagacttactttgggaggaagtaagcacgctcacattaaaagttgaagggagttaattgttcggtgtgttaagaagcgagattggccaaggaaattacaaaagatcgcggaaaaattttagagggagttcaaacttatttaagtcaattgtatttgtaattattatgaatttactaatgtaattttataaattttaagatgtacttttggatgataattagtatattgaataataagtaatttgtaacattttaattattatataatttaatatttatatatttaaatttttaatataaactttacatttatattagaggattcaccacctcatgaggattaaaatgcttgaccgggatggggatggggaggaatcccccttaattcttcgcccagtactatgtatccctaattctaatgcaagattagaaaaaatttagattataaattacaaacataaattatactaataaacttataaaaaaaaatactattatattaaaaaatacaaacataaattataaaaaataaatcattaataaaaagtaggaatgaaaatttggtagataataagcaggtaatgcagcacccaaccccgtccccgtaacctatttttgccccatccccgccccgcctcacttaatccccgatgggtttgaggtaggggaattcccattggatatggagacccattatgtacccatcattaagattaaaacaataatattaagagaaaaataatgtaatgtaattcaaaattaaaataaaaaataagatattgattttaaaataaacaaacattctatatatggaaaaaatctttattacacattaagttagggaagattaatagtcaattttgtaaatatagtcaataactttaatatgtaataattagaaaaatatataaaaaatttggaaactatatatctaagtcgaatatagggtaggtagtatcacccctgaccccgctctgaacctgcaaattacacctcacacccgtcctgttacccattaaggcaggtaatccttgtcccattcgagggtgggtacctctggggaaaattttcatcactaataaaaaggcttgtacttagatgagataattaatatattgaataataactaatatgtaataatttagtttttatataatttaataattctaaacatttaaatttttgatataaactttactaattttatattaagagattcaccgtcccatttcccatagggaatatatgagaatgaggattaaaatttttaatgggcatggggacgagaggagcactcttcgctaattttccccctcgtatgcatccttaattccaatggaagatcagaaaaaatttaataatttttttttatcaaatttttaatacattttaaatttgattccatgcctattcttattttaattctcatttatattcctatattttcattattttcaatatcgtctaaataataatttcacataatttaatttaataattattataaaatatcattataacactattaatacttttgttttatgagaaatgctaaaggccactagtggtgtgtagcactatcctatgtgtcaatagcgctattggtccaactaagtatcaggtcttatataatttaatataataacttttagagagtattgctagccaatcgcaacacgacatatcaagaaggtgctaaacactactgatgcctaatagcaatgctcttgttttattttacgacacgaaaaactagtctttttttaagggaaaaactaattattttaatcaaggcttttaatcaaggctcttatataatcctcctgttctctttccccaatgttttcgcttgaagaaagttcctcaaaaccataataatcattgaaagcggtttcctctttttgtattatatagtttttctttaatgtaaaagtctcttttacaggtttcatatgatgtgaatatcaagtatttacacaagtgaattaatgttaaaaatcccaccaaattaataaaatttatcaattataatattcaccataattttttatattaatgagaatatttactattattatggtaattgtattcttgaccaaatttacatttattaacaattatcaatgaaccatgttttagtcataaaattttgagtattgttattgagtattagtggtgtcttgcattttacattaaactatatgggagtcgatacttaattggactaatagcgataataacacatagaagagtattaaacaccactagtaccttttagcatttctctaaaaatttcattcacccattagcttcaaattttgattatttatcatatatttaatatgattttccaacattaataacatcaatttaaaataatattttaaacttcttcattaattaaaataatattaaaaaatgtaacaaaaatagaataaaatatttttagagcttctttaaactagtagctagctacattaccatccacatcaaaagagctaaatcaaatataacaaaaaaaaaaaaacattatgtaatttttcttgatgtataaatgtacaaaataaataaataaaaggaaatttgattttctatacttagaaaataaaaaaaaaatttccctaaaccaa

SEQ ID NO: 163190 - DNA, 1794 bp, Cannabis sativa
atatatgtacatacctatgtagagaattcattctctcttctgaacaatgatgatgaagctaagctactccctttgatctctcttacactaacacaaaattccttcacacttcaatgtttgttcatttcatacaaaataaaacaagtgcttcaatcaatcattctcatatgattcagtgcttaaaatattctgcgaaacatagccagatgcttttagttcaaacgaaagaagctcaagcattgaatatacacactctgcctcatcatgagagtgatcaccagacacaaattcatgaaggttacaatcaatttcaatggaactaaatcccggtgtcttctgtattccccgagccttcatcatcttcctaaccttgcctgcaccgtcccattttccaaccgcggcatatatgttcgctagaagaacatagttagagtcacccccgggatccaactcgttgagataattcattaatctttctgctaatgagatatcaccatgagttctacaagcagccagcaatgatcccacaacaacttcattcggtttcattggcatagtttctatcacatttagcgcgttttctaatctcccagctcggctgtagagatcaacaagacacccgtaatgctcaatcctatacctaattccatgaacttttttcatattttcgaagagcataagcccttcttcaactagccctgcatggctgcatgcagtaagagcaccggtgaagctaaccccgtcgggcttgaaaccttcgttcaacattaaattgaagaactcaagtgcttcctcagcgtgcccattaatagcaaatccaattattatcgagttccacgaaaccaatgttctttgaggcattttctcaaacacttgccgagcaaattcaatgcatccacacctagcatacatatcaatcattgagttgctaatcttgatattgtccttaaattcacgatttatgataaatctattcatccataaacctaaaccaatagttcccaaatcagcacaagcagcaagaacagagattatggtcacataatctggttcaacaccagagacttgcatctcacgaaaccactccaaagcttcctctgaaagaccccttttcacaaatccaccaatcaaacaagtccacgaaattctatctctctcgggcatttcatcaaacacttcaacagcattttccaccttaccatttctcatataaccatcaatcatagtattccaagacaccgaattcttcaccttcaacccatcaaaaacgactctagcgaaatcaactagaccgcatttcgcgtacatatctacaatcgccgttcccaccatgacatgaccagaatccaacccaagcttacaagcataaccatgaactgaagtaccaaaagacaaactcttgcgaggaaaatgagcacacccagagaaaagggtgatgaatgtgatgtgattaggttcgactccggccaatctcatccgagaaaagtgttgggcagcttcagctagttgaccgtttcggcaaagagtggctatggaagaggtccatttgacaattgggtcaatgggtttttggttaaggcgtgaagagtgagagagggagcggttcttaggaggaggttgattggggaaagagggttgagtctggggagatgagtgtggaagtggaagaggtggtggtggtgggggtggtctgagtgtgttcgccggtagactcatcttcttccgaacttgactctggaaattgattagcagtgattaaaatatagcatcaacttattaactgctaacattttg

SEQ ID NO: 163191 - DNA, 1336 bp, Cannabis sativa
atcaaacccgtacgtagattactataactttgtctaaactctaaaacaatttacatggaaatgctaaatatcccgaagtatatcagaattaatctaaattatcagtgtctaataccataaaagataatatattattattggttcaatatgaaattttacataattttatttaataaataaaataggaaattattaactgcttactctaagtcatatcggtatgatgttaaacactttaattaaagtgcttaatagtttatatttcatgttaagtataattatagtgttattatttgttttttatgctgaagaagttgcacacttatttttatgaatattttgagtcacagattaaaaatagatgtagaaattatttgtatgtagtttgcttaaatgtactattgtaacatgcatatatataattatttttttaaacaaataatagtttaatcaatatttccaaccatgtattatataagaaaattcgattgacaaataatatattaatattttaaaacttaagcaagtcctaggatgctggtgtggtgccctagctaccctctcaatttattaattattattttcataatataatttcgtttatattttagtgatttattattctagggtatgtttggttagaaagaaaaatggaatagaatttagtatagaaactaaaatttagttcagaacaatatcataattaacaaacgactactaatgaaaaagaaaaatagaaggaaatatgtatataaaagtaaagaataataattaatagttcactaaaaaaaccatatatatagatataatagtaaaaataataataaattaattaagatataaattattttttttatagtaagaataaaaatatttgtgataaggaaagaaacttgaaaaaaaatagcaaaataaataagttggttgggatttatttatttatttattattgaaggtataggattaggtgtatatatccaattttatgaagaaaataaacaaaaactttagcctaaacttacagctattttttctattctttatttatttatgttttttatttttgtatggctaaactacaagtaattaattcgacttgttggtttcgtttggtataattaaagttattttaatgtgtttagtaggggcattgctaatgcataatcatcaattttgctctttaatttaacattaattttttcaaaataattaataagttagtatacaaaaaacaaacaataagttacttcatgcaaaggtaagttaattattttatttagggtaattagtaattttccctccgaactttgacatgtactaaatcgtgtcccctata

SEQ ID NO: 163192 - DNA, 3251 bp, Cannabis sativa
cagggcctcatcacttattcccctaattgatgatgatgatgatagttcaattcaaataaatcaacccaaaaaccatgaacaaagaaaaccaaaacaaaaagctctttaatatccaataaactaatttaatagattttcagccggctaattacaatttttatcctccaaactttcatcctgttaaaaatgtcctccgaaatattgaatttgttggtttcaagaacttttctatccaattttttttttattttactaacatgatgattgttcttgaaccaaattgtatccctgaactttgatatgtactaaattgtaccccttaaattttcacacacgtcagacttccgtccaacaatctcaatagtttagagaaatttttaacagcctgaaaaattcaggaagtataatttagtacatgtcaaagtttggaagataaaaatcctaattaattattttctaagcgctaatttggaatacaacaagactccaaaaacagtcaaatatttgaaaattcaatagtaattgcatgagactccaaaaggaaatataatagtaattgcatgagactccaaaagataaagattatgctcacacattaaaattaaaagactgaaaacaagtttaacacctgaaacaagaggcatagactgtgacattacccttgataggatataacatcataaactttttacttacttgctttcattgccgactactattgcagttggagaagaccaattcatatcataaacagaaacctaaggaaaaagcattacccaaaaaattgaaaactcttcagtctgactgtctgataactctactaagatcaacaattgaataaatgaaaaatgaaaagaatcaacaattgagtaccgcatccattccaacatgagtagtggcaattcgataaccacgcaatttgagagcctcaaaacactcttcaatggtatcccataattcaatatccaaccatttctctgctcccatgctaacatggcgattttctctgtacctacataaaaacaactccaccaatgtcaagattgggaataaagtattttagcacaatcactttccattgaacaatattaatcttatttggctaagcttctattttgcttatatttaaaattataagatctaattatatgaagatctttttattgcttttcaaagtgttttggaatattatttaaaaaaaaatattatgtaaattacaaatcttaattaagtattcattttcaaatgacatccacaatattcacaaatattaagatttcatataatttaattaacaataattttcacattgaactcactaattatatttttgaattacatgtaaatcattacaacttaaatttcaatcaatatcttatatttctgttgtattaattatcatttcaactaagactgctacttagtattgtgataatatcagtcaatttcaaagaatttgcaaattgataaaaccgattttttttttcattggaaaagctaaaaaagaacatatagaagcgaaaactatttttcacctcaggcgtcgttgcaccttttggagctatcgcaggcgacgacatgaacggactgaaacccgagagcatcggcggatctaaacgcagccgaaacgtttccaaaatcagtgagaccttccaccacaagacaaaccgagtagctccgattcctcaccacattcctaaacctctccttcctcgaatccattatgtgtggtcccaatgcttccagtacttcaccgctgctaaggtacgacgagttcccgcacttgaatcgatccaagtacggaaaccacccaccaccgccaccactggacggttgttgttcgaaatcaatacgccgtcgttccatcttcattagctgtacgacatcgtctttatgagtgagcaaatgctccacggtgtcctcttgtgttaaagtttcgaattcagcctcgtcgccgtcgtttgaatcgaccgattcgactgaaatagaggcgtaatttctcgaaggagatctgtgctggttcactaatcttaaaccttgacggttgttgttagaggaaaggggagttgagaagaagcagagagtgggtgaattgggtagtacagagatggaggacgatcttcggagagtggaagctatggaggagaacgatgttcggactagggttttgcaggccgccattgcagagttgcagagatcaagagtgagagagagatttggcgccaaagccatgagatagggttttgctgatcggatagggttttagaaaacgacaagagccatcagataaacgacaatatctcctaaaaacgacaacaacaagaaaacccattcatatacatatttttatttgaatttttacacaaaaaaatcgcattttttactatttttttacgattatttttttttgtttttaacttttttacggaagttgttctttccctgtttttacttacatttttctgaaaaataatgttgtagttgcaacgttaaaatagcaatgttttgagaacaattatttgtatttttataaataaaaacttaatttgtaaaaatattaaaaatacttagatctgtatttttatatttttttctgtgatttgtatggatttataaaataatctattttctttaattcttttttttttggtaagaggaaagtcattgtttaaatttgagtgtaatttagaacaattacttagtaaccatatagctagaaataactaaaaaaaattgtcaatacaccctccaattttacacacctggtataattatgaaatgtttacttaagtaaaaacatatatatttttttcctttttaagaagctacaaagcttgatcaatagggaaaaatcaagagaaaaatactaaatcttaatacaattatacgttgcaaaagaaaataacaaaatttatgtctctgttaaaaataattaaaaatttagactcttcacttttccagcaactttcttaaaagtgattgtgttgtactcttaaattttaattcaataataaaaaaaaaaaaacttctgaagtgatcaagctagagtatcactaatgcataataatgcaagaggtgcttgtcataagtagacctaagaaagtggaagagaaagaaactcaattttattttctatagctagatttgatgccaaatacttggcatggaaccaacaacaaatatatatacataaatatatatattttttttaaaaaaattggttgttattattggtaggatttgtgactttt

SEQ ID NO: 163193 - DNA, 1249 bp, Cannabis sativa
  modified_base (1199)..(1202): a, c, t, g, unknown or other
aagagcttgctggaaaagtctcgcctatttatgagcttccgagatgcatcgactttgagagaggttcttttggcatggggagggtgtagtttcaggccaccattaacattgataagcctttattttcacgattctttaagaagagagaggccattaaagacctctggatgcaatataagtacgagaagcatcataaaatgtgtctcaaatgtggaatcatttcccatgaacaaaaattctacttcaagccacctatggttattaaagactccaaaggagcccttttcccaatgtttgggatttgaatgaaacatgatgagtcttcaagatggcctttctcccctaatctgtgtaagtggtttgaagattgggctatccaaaggaggatgactgtggacccatccttcaaacaacaatggaaaataaactaatcgatgaaggagataaactcttgggaaatgaaggaattgcgacgttaattccctggtaaaggatggtttttagaacagttggtggaagagttaccgaccattagagagaagaaagtcaatcactttccgatggtatcctttcccattgtttggtaacatttgcccctttgaggatactgccactctagtggttaaaaaggtgtctaagaaaaaccttatttcagatgtcataaacgacaacattgaaggtgacttttctccaggcatgcatctgaatcaagatgatataggaggctgtacgacttgtctaaaggctttgatgatattaaaggactcatcccatgatacccatcagacacaacagtgaccccctaatgagaatggtcaaattcttaccttaatgaagttgacccctgttgcatcacactctaaagggtctaatttatcccctttctaaccattcgaaggtcccatcccaagggtcaaactctattacgttagactcgagctcttctaaggtgggcctctcgaattctcacacttactcctctctctattgtagtcaggcccacaaaattccttggccctcacaaggcttttgggccaggggatacaagacccttgcgagtttgggcacaacagacaaatgcatgcgaatcgtactattctaccctctcttagatattgaagacttcggatctatggaggatgactttgggcccaaaaaatgtaaggccctagatggggttattgttgggttttatgccnnnnataaaactctttacaatctgataagttatcaatataagaaatttgaa

SEQ ID NO: 163194 - DNA, 1139 bp, Cannabis sativa
tcactctgctgcccactgttacaatagatacgatgagtccttcatgggaaccgcacctgaaggccacaccaaccagaacaacaaaaacaaagctccagcagggcctctcgcttttgttgcctcaccagacactcttgaccacgaatcgtggtatgctgacagcggtgcttccagccacatcactgctgatatgaacaaaatgcagcagaaggatgagtataagggtaaggaaactttaatggttggtgatggaaatcaattaaatattaaacatgttggtactggtttcttaccaactgagactaactcaaagctatctctaaaagagattttacatgtcccaagcattacaaaaaatttaattagcatctcaaggttaacttctgacaatgatgtttatgttgaattcttctctgatctgtgttttgttaaggacaaggtgacaaggcaggtggttcttcaagggaagctcagtgatggtctctacgacttgaaccgcctcacactctccacaacactcactccatctccactcccaccaatctgccatttttctctggtcttacagtagcttcaaagtctagagtgtctcagcatgttgctgataagtcttctatttcaatcaaagatagatggcacaaacgtttgggccatccatctagtcgtgtcttagatgttgttttaaacaaactaaatgtaagaaatgtcaaaggaaatgaaagtttttgtgaggcttgtcaattgggaaaatcacattctcttccttttaaaagaaatccctatcatgcaaaatttccccttgaattagtgcattctgacatttggggaccggctcccgtcatgtccaacacaaacttcagattttatattcacttcattgacgatttcagtagatatacatggatctaccctttaagagctaaatctgaagcattgacagcttttgtccaatataaagctttagttgaaaaccaattcaataggaaaatcaaatctcttcacaccgattggggtggagaatatcaagcctttactaggcttgtgacagattgtggaatcaattttgatcactcttgcccccacacttcggctcaaaatgggcgtgccgaacgcaaacatcgacatattgtcgaaatggg

SEQ ID NO: 163195 - DNA, 3174 bp, Cannabis sativa
ttcaaagggctacacttagccggcaacacttcaaaccctcagggctcaaaggtgacaccagtgaacgtggtccacattcctggcctcaacactcttggcctctccttggctcggatcgactacgctcctttcggcgtggtggctccgcacacgcacccacgagccacggagatcctaacagttctcgaaggtacccttcaagtgggtttcgtcacatcaaatcctaacaaccagctcatcacaaaggtcctccaaaagggtgatgttttcgtctttcctttgggattggttcactttcagcgcaacgttggtggcactggaaaatctgctgtttccatctctgctttgagtagccaaaaccctggtgttattactattgctaatgctgtttttgggtctaatcctgccattccaagagatattttggccaaggctttccagttggacaagtcaactgttagtaatctccaggatcagttttagaaagttcaattaattttattaatgttttattattccttgctaaggtctcatatatatcttactattattataaatatggtttgttggtgtgatacttgatcacaaatttccctttataaaatttaatattattacaagtctacttcttttaatcaaatattttaaaatacactaattagttatttttgtctccaattatatataaaagttctttgaatattgaaaagatatgtatatttgtacatatataataattgatagatataacttagtacacttataataattaatttgttttgaaggaaggaaccattatcattaattaaataaattagctcttacaagagtacactaagaaatctttcaacaagcatctggccaaatatgaacttctattggactagtaacaatgcatatgcaataccattcacaaacgtggaatggtatagcacgaaccaccaccaccaatagctaatagaaaaataatatcatcaataaaaggcctaaaaacaacattaaactgagggaaattaacccacttacacacaacacaagaatcaacttcagccttaaagaaaatcccaaattaaaagcccattgcagacccacttggagagccatcagctcagccacgtccaccaccacatcacccacctcacccactgctcaagctgcccagacgacccatgatcgtctctaaccacattcccaaagccagcaaagctacgcctaggagtaacagccgcatcagagcacaatgaaaatgtacccacctccagcggacaccacctagttgaccgcaccatcctagccacgaacaacaaagcaaccgaatacacaccaactgctcctcaaaactcctcaagagaagcaatggcaagttttttcaccacctccaaacgggattgttgttttccaaagagcacagagttttggtcaaaccacagccaccaccaaatcatcaaaatggtcgcaaaatcctctctcggcagatcctcgaacagcagcaacataagctaagggaatggaccagttcgacatcgagcaagcctctcccagacccccaatcgacaccacaaaggcacaagagtagtgcaaaacactaaagcatgatttggggtctccctatgcaataccataatgattaggcacgctacagtgattttttaattgcagtgcacacttttgctaatcaaaacatttcctcgaaaatcgtgataaattaattgagtatatgtgacagaatatttttttagttaattattgtaatgaaccttcttttgttctgcaagctaccattgttcaaatttataatgaagataaaggaataaagtagaatattcttataactgtgtgaaacataatgtgaaaataaaatgaatatttagttaccttacatgaaaattgaccctctgttaagaagtacaggtatataaatactgcatattaataaattttatatttattatacttaaaagtttatatgtcaatgcaaataatatttagataaagtaagtcatatacctaggttggtttcatgaatcatgtgtaaaatgccaagtacttcattgtatgactcgtatgggcaacctattacattctctgccctcttttgccctccaagctttttggtaagagattggtacactataattttatgctatgttattaataatttggtctgtagattcttttgggatctatattttttttttatgcagtcagctattatactactttttgtttgagtgtggtcattataaatgagttctagggagcatgtatgattctccatgacttttttgactttgaagatgattgtttgtccatgttttgtggccagaaagtgtcatttacagttgttatcaacacatattaggctgtaatctgtagatgatgatcttttaactctgtattgttgattcatttttattgcaaatgggatcatagcaagttttactatttgtttgtctttaaaaaattgtccaacttttattatatcaatttcagaatctgtaatgatgttttttgtattttcccaagttgaggatctgtgatgatgttttttgggagctgagaagaggagccttcatttctacttgcagcatggcccttaacagcagaactattaggttgtgagtcagctatttgggaaatagcattgtcatttcctgcttgttgagtggccatggcaaaggcctaaggtagctctgataccaagtaaaaataaaaaagatgatagaaggtaataattcgcagctcaaaaatcaaaggagctggtgagttttcattcatagatagagcaatacaaaaggaaaaatatgaccgttggtcattgtacaactagcaaatcttacacaaaaaactacaaaatattctcccaaataattgccaatcattacagcatatacttgggaccacaaagagaaaaatatctgtaacaaactctgcaccagaatgtaattctttttgtgctaatctgagtacaaggacagtagagaaatcctttggtgagctgacttggattgctggtgtggattagtgactcggcatatcaggttgattcttaacaccaaccaacccgatcattacactgttagaaatactgtaaatctgtatatagccctaattaattcatgagaatcaaacaatagaatatagattagcggaagcgtaccggagtccatagaa

SEQ ID NO: 163196 - DNA, 1517 bp, Cannabis sativa
attaccttgaccaaagtcccggcatattccaagacccgagcagcaagttctccagcggctctcattcgagcaatgccttcagcgtcatgaatttggtgctccttagcaatctccggcaacagagtcgaacccacgtaaggaggcttcggaatatggtccggtaccggaagccgaggcgagactcgtccgcgtctcaacggaggcgtcttgttcacctttctcggaccctgaagctctttttctctgcgcattaaaattccaatggtaggtaaccaaagtgtcaataatactaataataatactaattttttgatagataagaagtatttgaaacctggtgattctcatagcctcttccaacccagatattctcttggacgaaataacaaatctgttgccggagcgagtgagagatggatgaggagagcggagccacgacatgtctggctctgagcagcagatattagaggaaaatgggaagccaaggaagggagatgaaagttcgccatggacgtagttagtggagagttgcagagacacggcatggggcagagcagcactgaatcccatctctcttctgaagccgactatggagtctagtctactggtgtacacaggaaagtggaagtgttgcagagaagagaggataacgaagaaaacaagtaagaggggctttagatgggctaacagctcaaaagaattggactgggctaatcattttcttgcggaagtttctgactttgcttctatttttatgatattcttgcaaatattagacccaagcttgtattttcaactactatcaaatctattaaagaaattgataaattacaataaaatataagaagttaacacatagattattaccaaaattgatatattctagagatattttaataaatactcaaaaatgacaaaaagaattacaaaactacagatatattgttttttcaatatttttacgaattttaaaatttttatttttacaaaaataccaactattggtttttatattgttctcgcaacaacattatactaagctgttatcgttactttcatgttgatttatattagtattatgttgtttttgtacgttatttttaagtaactttcatgagattctagaaaaaatgtgatttaaaaaaattataaaaaaataaacatagtccacaaaaatatatataaaaaaaatggccatttttgagactgtataaaaatccctatatttagttttatgatgtttaagataacatatacaattggtttctttatgagtgtttttccattttagaaacttatggaaatttcttacaaaataagcttatttagaatacaataagtttaaaataacaaaaatgtcaagtaaccatgaagttgtttggtatattaaaagttgggttagtctacaatatacctttataaagggatatttttggtagattccttatctatttcgacataaagaagagctttttagttaattttttggaataattacataaggcaccattttttgt

SEQ ID NO: 163197 - DNA, 1084 bp, Cannabis sativa
aaacacaaacacatacaaaaattagtgacaactaaattaaaatttgttgtgacttaatgtattttcagtcacaatacttgttgtgactaaaactaaattagtgacaaacttgtatttaaaaattatgttttagtcacaactaacattttgttgtaactaaaagtcacatttagttgtcactaaaggtagctgttttttgtagtggcatcctgatggtgaataaatgggaatggagattaaaatctttaatgaggatggggacgaaaagtactccccgctgtgtttgcatccctactatactagcacgattttaagaaattatgaataataaattgcactaaaataaattttacatatttaaaaaaatattatttgaatttcattttatttttttaaataaaagattcattttcaaacttttgctttaaataccccataaaagttagataggatcctattagatacacttagttattttaaggtgtggggtggttggagggagatgtgactgaggatgaagtttgattgttttacaactttgttgcatcttccgatttgatgtgttcttaataatgttattatagaaatattatttatatttctcattttcgaatactcagccaaaattacaatgattatattaaacacactttcatataatctactattgatttgtggctccaaatcctaactaatttgaattttgaaccaaactatttaaaatcgaactaaatgaatttggtgtgaataactcggtcaatctcgatcatttaaatttttttggctcggtcatagttttagaaatttcagtaacagttcaaaccaaaacaatctatataattattttatttatatatatacttaatatattttttttggatgcaatattgatatttaattatgaacaattttagataaaatattgacattcacttaatattgttttcttaatagttttattgttatttatgtattataaaattactaaaaaaaaaacaattattgtaagaaaaaaaaaagggtatataccattttggaccccgtgttttataaaaattaccaattggaccttctgttttgttaa

SEQ ID NO: 163198 - DNA, 1004 bp, Cannabis sativa
  modified_base (885)..(900): a, c, t, g, unknown or other
aaatattgtttgtattttttgattgataaatgaaaaatatttatgtaatattaagaaacattaagttgtctagccatattgttagtgcactaatgacacataatttgctacaattcagtttgtcacatttttacatttgcactctctcttttcggttacaggctatagctctgtattgtagtcctgacctttgtaagagtaacaagtgctctttctttctttaattgtaattttgctaaggataagccattataatgaaatcagtctcctcagtctctttgagctgagttttaccatttctataaaaggtcattttctttacttggtattagagctacatttgctcacgcaaccatattactactgggactagtcatcaattgaaaaatctactaatgtcaggagtagtacaaagggaccaacaagtacctgttgatggtggtgatcaaatgacaaagaagactcagaaccattcttaaaccagctccccaccatgcttcattggagtctcgcagttagagtttcagagtggatctagtggttttccaagcacaacatttggtaatacactatgacctatttgccttgaagttagatcaaaataattgtgctgtgaaaaacaatagttttcacaatcataagaggccatcggttggatgggttcattaatagtatgagacaagcacctacatagtttgttccaacatgagtagctactggtgatagtcaactaagtcttggggtttgtgtaaaccctgaacatgagcaataatggatagtgtgcaaccaattgctcatgggtgggtctatggttctatgatagaagtcatagccgcagaagtaatggaatgtacctcagcaagacactacaaaaaactgctactnnnnnnnnnnnnnnnntagtcacaacataatttttttgtactaaatgtgacttttagtcacaacaaaatgttaattgtgactaaaatatagtattagtcaccaatttagttttagtcata

SEQ ID NO: 163199 - DNA, 2374 bp, Cannabis sativa
  modified_base (2217)..(2217): a, c, t, g, unknown or other
gttatgttatttgaggttcctttagcttaatcctcaaagaaaaaaggttacactataaactcagagttagaagttatatgtgttgtgttatccttctttcgagatcagcctccaaaaatgtcaagatagttatgtatcctcttcaagatatcaactttggatgatagctagtatattgtttcacttagagtatattggagtggaattactaaattattatttttttaaaaaatatatgtatatagaaaaaatatatatatatatatattttttttttgatacgatgaaataaatgtaatgtttgaaacactaaattattattttttaataaatatgtatatagaagaaaatatttttcttaatattggattgaataattttttttaatgtttttcaagataatgaaaattatattatatttaatttaatttttttcatgaattgtttttcttcgaatttataatacatgaggaataagaagaagaagaaaaaaatatttagaattcattttgttgtgtcttaaattctaaagaattattacttaatattaaaataggcaggccttgatggaagcacaattttcattaaaataataataagaatttttactatttaatatttatgagattaacatgaaaaataaataatattataacatattaataaaatttaaaataaaggttcttgacattttcaaaaaaataaaaataaaataaagattctagaaatttaatataatttttaggtgatgaggtatatagctttaaacctcaaaagtggagccaaaacaataaaataaataaataataaattggaagaaaagaaaaggtgaattaattaaaaacaaaaaaaaaaaaaaaacaatagagttttgagatttggttttgggttttgttttgtacgaagctgcatcagccacgaaccacgcttattctgacacttaacaccattttcaaactctatatcatatcaaaatcaaactacaaccattacattttgtctatctattaattataattaattaattaattaatgcctaaattcttattaattttcttcttcaaccaaaaaactcattgactttagaaaatctcaatcaactacataaataaacgtgtttatttctatatagaaagaaattatttagtttaactctacaaattttttgttaccatttaaatagttttatcttctaagttcaagaagatatatcgttatatagacgtaacactgaattttaggttgcaagaaatacaaagaaattaaataaaatagaaaaacattgtgaatatatataaatatataaagatatgatataataacaaatcatgcctaattgcgtgaaaaaatgtggtcagtagctttcggttgctgataaaagactacaaatttaataaaaataaaagaatagtaatatttattgactttacaaaattaagaataattttcattagtagaagaataattccataatcatgaaaacataaaggttaatggtaaatttagtaagtttgactttttttttaatttgtaattaatcactagacacaaattaaaattgagaaaaaaacaatgcatatataatagtatctaataccacactagtctaattgtgtgaaaaaatgtggtgagtagctttcggttgttgatagcttgatgagtacagttcaattttaattaatgaaagaagagtaatattcactttccaaaattaaaattagaaggataaaaataaaataataactgtttgggattttgattagtagaaagcttaatgataaatttagtaaattgactttttttttaattagtaatgggttaatattattttagattttgtgttttacaaaagttactaattaatgatatattgtaccatattttttttttaaaatagtacaaaataatactatactttataaaaaaatgtaatagtatagaatataatatggtgtaatacggtgtatcaaacgaatctataatatattattaattgcctaattaaatattggatttaggattttttttattttatttttacattttaaagtaaatattttttatagttttagagaaatttacataacaactaacaataaagtaacttaaatcgcaacctaaatttacatagcaatcaataaaacaacttaaattacaacttaaatctatatagcaaccaccattttacaatctaaactataaaaataaaaaaaaaanttaaaaaaatagtatataaaataactgttttattttaatttaataataattataagggaaaaaaatgaagggaaaattctacaatgcactcccttaaaatggatatattgatgcacccttatctattttagccctcgaaataattttttagtcaaat

SEQ ID NO: 163200 - DNA, 1519 bp, Cannabis sativa
aaaaaaaaaaaaaaacccttacaacaacgttaaaagtaacccttacatcgtaaaaataacaaagaataaaatagagcaatcctatataaaagtaacaaaagtgaaatagagcaatccttataacaactctatgcaaaaacaacaaagaaccaaatggagtagcacttaatgtgaaaataacaaaatataaaatagaacagttcttacaaaagtagcaatgataggcaatgcattttattaatattcttacaactctttttttttatggaatagtcttgatgacccacttatataacttacccacctagaaaaagagtaaaatatttgcatgctaagctctgtatttcatttgtactaattatagtgatttataattgaatagtttgctttgagagaaaaagattacaatctaaaaaaataaagaagaatgacaaagggagaatataagggaatgagaaattaagaaagattggtttttgattcgaaattagattataacattatctacaacatgaatgttcttcaatctagctttaaactttctgagcatggcatcaacattaagggaatcaagctcatcatggaaggaaccttaacctctcttcattttttttctttaaacgaatgagacattgtctttgtcttcgcatacctatgactttgcataactcaataattaactgagaattttaagaacaaaaaaaaccaaaatttatgtccccaaaacttattgcggcaaagattcaaccaaatttcgattgtgggtgacataattttattccaagtccaatttaggtattgaagctaattccaaaataataatggttgagagttcttatatataaaagatgagaattgttgctttatattttcaattgacaaaagaatttctatgctgagtgaaggtcgtcggagctcgatcgggaaaatgacatcattgtgaagaaaaaaatggccagtattaagaatgaattgggcattgatattagtcaagatgcactataattttgaagtagattgaagcaattttaaattgaaaccaaatgttccactgtcatcgaatgggaagtagaataggagaagctggatgaagaagtcgaatgatgaagattatataaaagtgaatgaaataataagatattaagatatagtattattgaattaaagaaatatactaaaggtatagaaaataaaataaaaacccccaatatatatttatagtaatatttatatattgtatttctcttatattagatgtgattatggtatggatattgttagtttggttttaacggttaaaactaacagttaaatatatatataagaaaaattaattttaaatatttaaatttaatttaaaaatatcaaaacactaaaaaatattaatataacaactataacaatacacaattcttaatactatattataatagaattatttttgagtaaatataatatttatatgtattataatttaaaataaaattattaattatacctaaataaatttataaaatat

SEQ ID NO: 163201 - DNA, 1887 bp, Cannabis sativa
ccttgccttagaccccttgtaggcaagatcgatcctgtaacttggccattcaagagaaaggagaaggaattagtggataaacaagacattattaaagaaatccactcagatgcaaaccccatcttagtcatgacagccttgagaaaaccccattcaacacggtcaaaagctttgctcatgtcaagttttaaagcggtgataccacgacgacccttatctttatgtttcatggcatgcacaagttcaaaagcaacaaggatgttgtcttgaatttgtctattggcaagaaaagccgattgtgtatcagagattaccacgggcagtacatgcttgaaacgagccacaataaccttggttaccaacttcgaaataacattgcacaaactgattggtcgaaaatccgtaatgcgttgaggcttcttaacctttgggatgagagtgataatggtatgattgagaggagtagcatcagccccttcatttaaaatctgcagaactactttggtaaccatatcacccacaatttcccaattattttggtaaaacatggcggacataccatccgaaccagggcttttatctggccccattgcacgcagagcaacttcaacctcagaacccgtgaaaggtgcaagcagcaggtcattcaaatcaggtgtaaccaaatttgggattgcaagcaaggttgaatcaagagcttcatcatccataggtgacatctgaaaaataccagcaaaataagattcaatgacagcagccatgccatcattagatgaaatccgagaacctgcagagtccaatagaaacttaattctgttattagcctttcgagaagaagctttggcatgaaaaaacttggtattacggtctccgagtccaagccaatccacacgagaacgttgttgccaataggcttcctcttgtgccaataactcatcaagaatagattcggaatgtttgatttcagctacatggtcccaggaggtggctgtaacattattaagagcagtaactctttgttgtgcttttttaattgaagtcttcatattaccatacttccgaatatgccactgctgtaggtgattagcacaagtatccaggttgtttttgaaggcagcaattaagtcaatagatgaattcgaaacagaccaagcattggagataatagtcttactgtcagggtcggatagccaaattttttcaaagcgaaatcgacttcgctggtgtgttggttgagtagcggatgagggaaggctgaaagtaaccgagagagctctatggtctgaattgaaaaaatccagatgctgtaagtgaggaagagtgaaagtgttttcccaatgatgattgacaaaacaccaatcaattctttccttgagagagttcacaacatgccgattctcagaccaagtaaaaatatcaccaaaacaaggaagatcagttaagtgacaatgatcaagtgcttgtctaaaagcttccatctgagagtcattacgaagtgagccaccgagtttatgatcatgcgataaaatttcattaaaatcaccaatagcaagccaaggaagaagaggggcagtgtccgcaagtcgttttaaaagcaaccaagaaagtggacgattacaaacttcaggagcgccataaaagcctgtaaagtggaacacgggttgctgatcaaaagacaaatagcagtcgaaataagttggaccatagtgaagcaatgtaacatcaacatgatcgttccataacaacattaatccccctttgagaccaattcgaggagcttcaagaccattagaaaaattaagagattgtttcaaccgagataaagaattctgtgagagttttgtttccattaaaaacaaaacatggggagattgctgctgcaccagc

SEQ ID NO: 163202 - DNA, 1229 bp, Cannabis sativa
  modified_base (128)..(151): a, c, t, g, unknown or other
agtgggaggtgtgttttttttaatacaaggctctcaataaaagcacaaaactgttaaagctaatttttcgttaactaataaatgaaccgtaatttaatatatatacttcataataataataataatannnnnnnnnnnnnnnnnnnnnnnnatataatataatataataataatagtactaatgctaaacaagaaggtttttacgtgattttaaagttaattctttatagtccatgagcccatcttattcttgaaatttgatgagtttacaaagtattaatagtacaatgttcttgtatcttcttttaagattttcaatttggccatccctaaatctgtgacttcttcccttctttataggtgtttggggatgatagttattcccatttgatcttatcttcataatcgttcatgaaacatggagaatttttacgtttcatatttacaacacatggaataaatagataactgctataactacttttatctttatccaaaatggttatgctaactaagtttatatgcctcgcaacatataattgtaactggtttttgtgcttatcatgaaagcagttttttaaccgaggtatcttatttaagatgctccttgcgttctttcataatattaggactaataaggtgtgttttgtgagatactatcttctcaatttttcatgaatatcttaaagtgaatctctttttgtcctttagtttttcaacatactcacgagtatgtgggtcaatgagttgtaaccttttaaagaattcattatataccctttccagctacttgttcctatatattctatacttgttttgtttttcctttattatgtttaaccgagatggactttatgctgttggttgttcatctggctggtcttactcaataatagttggtattcaatacgtctatcatctgtattctttgaggcgaattactgaacatatttgtttcttcactatttgagctggttcgttttccagcctctttacatgtgttgtgaccatacagctgctcaaaatattagtataatgttataatataagataaaagataaaagagatatgtataatgagtttaaattttaattgtaatgtttaaaaataaaaaagaataacactttctgttttatagccacatttaataggaaaatttgattaaatatgcttacataatcttaaatttttttccgtaaacttagaattaccaatatttgtaatctagg

SEQ ID NO: 163203 - DNA, 4300 bp, Cannabis sativa
atctcaacctacacatctccaaattcgatgttctacaatagctgataatctttcaaaccgtagatctctcgatcagaaaccaattaagaatggtcctagcctgtttaaacaatctacttgagatcaattggaggttaagagaaaatacaaacaacaattagtaatcttaaaatgaaaaagtatgctaatatttggagatgttttagaaattaatgattggaaaacataaaatttgagtatatttttttagaaaaaacatctttaaatttttattgaaaataaaatagtaaaccattatttaatgtagaagcaatcgactacaaaaactaaagatcatatacactagctaggattgttatttttttgaagaaaaaaaaagctagaattgttattaacgcttttaagggatgatgaagtattaataatttatgttaggcattaatgagaatcatggggttccatctcaaaaccaattggcaatgggtggagtagcccatattcttatatatggctcaattctctaccatttattgtatgtgggacattgtccacaataggcattgtactagattttctattttatttttaaattgtaattttttatatgtttctagaggatataattttgtagtttataaaataattattgagtttttgttcatatgactgaattatcactaagtacttatttaagaaaaacaaaaaataaatttgcagcgaaatctccttatgttttaatttttatatacttaaccctttatttgttttttttggataaaactccttcatgttttaatttttatatacttaacttctttattttttatttttttggcaaaactctcatgtgttttttatacacttaatgtccttatttatttttttttttttgtggcaaaacctttttagatttatttggcaacaaattgctcaaaaaaatctataaaaatcttaaaagaattgtaaatatgtaattttgtaacttttttgccatttttagatattttcaaaaatatccctttcttttaacgaaattccaattaaatggcccagtgtatagtctactcggccgttcttttcccactactcaaattttctttctagtccttaatatatagtaaaattagaataaagtccctataacaagacccgactaactagactacttagtggggttcaccactcgctgacaaacggctacctccgaacttcacgtgtcagtttacttcaatttctccccacacgagtcaccatattttctctcatcaccaaacgatattttcaatttttttattatttagatatatttttttttctttttataattaattacttctgttaataattaaaaaaaaaaaacgtattaactgtattatttacttcaatttaaatgaatatcaattatttctatcttttttttatcagatttataatacatctagaaatttaagacactttatactaataagattaagattaggaatgaaatatatactatatatttacattatcaatacaattaaggttacaaaattttcatactagaatttcatcatcttaatcttgttatttaacatcgatcgagttcaacaaaattaacatggatattgttactgaggcgaacataatacttacgtttctattagttataggcatactgataccagtgtgttttgctttttggttgtccatgtgcatggaagatgatcatcgctgctgtgatggtgaagaacctccaataatagttattgatcatgcgaaacaatctcacattatcaaactattatgtttctttagaaaacataatgttaccagggataatcttaaagatgatgattgtgttatttgtctggaacgattattcgaaataaataaagtggttgttgagacgaagcactgtaaacatgtgtttcacttatcttgcattaatgactggactcgaattaaaaaaatatgtccagtatgtcgtcttcgtgtgaataatgtatacattgttacttgtaaggaagcttctacaaaatcaattgatcgtgatgcgatagaaaatatggtttaaattagcatatttttatattatagtattgtgttttaattgaatttagctatagaggtttgttttcaattttttttaattattaatttgtatattttctcagataattaaattaagaatagtactttaaacattcttttaaaatattgttgacaaacacgtcaaaattgataatatatataattaaagttattataatattaattcttatttttgttatttatttttatgaaatttattgtatttaccataccaccaagcttaaaataaacaattcatatgtaattcaatacatcgtttatataacacatcttactaattcaataaaataataattaagaagtagtttctttaaaattggttatgataaacattaaatatagtttattgtttaataaattttaaattatatatatgaaataaattataattttattttaaagatattaagtaaaaatagtatcaaaaaaaatagtttacaacacgtcaacacgacctgtacaacaatatattaggtttgacctctattttaaagttcgtgaccaacaaagctgataaacaagaattgtttgcgtctaaataaaatgtacgtaaatgtaaaaattatgcggctaagttattgttatcaatgatatttttgtttttaattatttattttattttttaattaattaatcaattaatatttataaacttaataaaaaatttaaaaatgagagaattaaagaaaaataaataaatgtatttaaagcaattttatgttgttatgtcgtcgttttatacctaagctttatatatagatcttttgctaaactataattaataataggataagcagtgtcataagtaattaaagttttaagtttgtaaaacagtaaaaacccaatattatttttagtgacataagtattcaatgtttataaaactataatttttcttaattttcgttagtacagatttcgttttgaatttattaaaagaacatttagaaatatttttgtctagactcaatgatctaaaatctgagcgttatatgtgtcttatataatataataatagagtatgtgaaaagaagaatattatatgtatatattaattgtcatttacctttataagcttaaaattttaagtacgccattatttatccttaataatatatgttctctagtataatatgtgaaaaggagaaatattacatgtatatgtatatttattgatatatgttatattattaaaaaaaattatattaaatatatgttatgaaaaaattatattaaatatatgtattagaaaagtatacatagttaattgattagactaattattaacaaaaaagaataaataataattaatatatatagtattatatactttaatgacgatgagtaaaattaataaaaaattaatatataatgatgagtgaaattaaggaatgcaacttctccataaaataataaatagcaaatgtctttttgtaatagattgattagtgggggttatatgtattttcaaaatacctattatttaaactttggtaattgattatatatatatattaaaaaaataaaatattaaggagcggctagataaatatatttatagtgataataaaaaatttaaaaaaaaataaaaaaagagtacataaatatatttaaagcgtcatatcaccgtcttatatgtcagctatatatatttttaaaatatctattatttaagctttgctaattaattataaatttaatatataaaaaaatagaaaatattaaggaaagagtagataaatatatttagagtaataattaaaaattaaaaaagtgtggagccactactatgtctatgaccacgagtgttgtaaactattaagattctaattgtaatgataagaatattataatttgttatttatattttattgttatttttatataattaattattattatttttgatacattacttaaaattcaattttaatatattttatatatttcaaacatacaatattagtatttatatatattcctatataaaataaaattaaaatcctaaacaattaataaaatatgtttagaataatattctataaatgtagaccatgaatgttgaattttaaagaaagggaaacttacaaaaatactagaatttgtgataagttttacaaaaaatactgtcacacgaaaatattttcaaaaatattgtgtttttataaaacactagtagaacacaaaacagaataactaaaaataa

SEQ ID NO: 163204 - DNA, 1554 bp, Cannabis sativa
ctctctctctctcaaattctcatacaatcaacaaattgagcagctcacaatgtggttaaacactttcggtatcaatttggttgtagcatttttgaatctaatagcctctggctgattttaaagccattttatattcaaaatgctaaatttaattaaagttgatatttcattaaaaaaaaaaaaagttgatcaattatcacctaccctgaatgtaattgtctgcatattaatattcatgaaagatcataaagtaggaaaatgaagatcctacatcgatatcatcaataaagacacataattaaatgtcaaattacaatcgaagtcctttatatataacagcaatagaatcttatactccatctaacaaataacgatacatatattattaaattttataatggctctttaatatcacccattttcctcccagtagtgatgcaatcctccaatatcatatttgcagtgtatttgtaaataaagcccttcccaataagctttgaaaaatcaaactctatattcctctttggcccctccaagtacctaaaaattgcaatttataattttatcaattatgacgatcttataatgtgtaaatctatataaatacagaaaagggtattaattaattgattactcactctttgttgacatgaaattgagggtgattttgctgataataagaagctatttctgcagaggaaacataggcacttgcacataaatatctaccacggacagaagggttttccatggagaagataagggcttcacaaacatcttctatgtgtattattggtacttttccaagcaattcctccaaataccttagagaattataaagtattggattgtttttgaggtgagaataaaacattgccacactaaagggtaccattggtaaaagtgtatcccctccaacaaggccacaagcaagtgttacaacctctaatccaccatctttgttccccatgctcaatagttctttctctgatattgtcttagaatataggtaggcctagtacaaaattaagtcttatatttagctacccttggtaaataataaagtaacagtcattttcttttactaatatattttaaaaaaaaaaaaaagtcaaattattttataagctcaattattattatcttaagtgtgcctaatgtaaatagtaaaaataaaaggactcacactaaaatcatcgttactgtaaggaattgaaagattgagaggagtccagcaagtttcgtccattaaatcgttaaaaccagagccgttatcttttaacggcgatgcagccacgacagacgccgtgtaaatgaggcgtttaactgttcctgatctctcacaaaacattgcgacgctcttagccgcacttatagtagcttcactggaattcttgttctgaaaaacaacattggtttggagcaaaggagtggcaatgtgaaaaacatagtggcagccttggattgggatctcaaaatcatctggtgtgtaaatatcagccttgaacagaaccaaccttgtcttagctcctggaaagcttttcagaaacttca

SEQ ID NO: 163205 - DNA, 2344 bp, Cannabis sativa
taaaaagtttgaataccaaagtgggattcaagtagttacctgacagtaaccaagatcaaagttgtaaaatgagtatgtcaacagaatatcacgtaaaatattaacatttggattatcatctccatcatagaacggaagtgacctgtcagtcctcaccttaaaaaaaaaaaataaaaagtatacaatgttaaaacacaagacacgagtgcatttgtcaaattatgtaaaagctaaaaggggaaaagaaaaattttaccacatctttgtcaataagtcctttcctctctctgaatttagtaaatctttttgcttgttccggagatatactctgcaagagatacacatatcttaagaattttaataagcctaaagtagaatgctataaaaactttgccagtgtagtgtgtcaagtttgatatacaggcattttcataatacaggaaacaattggtaaaattagttcaagaagtaatctatacatgctaaaaggatttgtattcaagccttgtgaaccggtcaccaactttgttttttctatacaaaatctaaatatcaaactttttaaaaattgatttacaataatgcaaaagtgcaaacctgccactggttctttatagtctcatactctgattttttaagaacgctgaagtattccctttctgcatatgttgaatcgtacgcatggtatcccaacaagaatgcccagacctatagttgtgattgagttgtgaatttaacaaaatttcaatcaatgttataatttcctcaaagttacaaacataataggacagacctctttccgtaaaatgtgctcaactcccccataaaatatcctctttcttaaagcttttgaatctgtgacacgtccttcagagtccaaaaaggagacccactgcaaaagttggatagtactttaacacaaaatattatagcaatatccactcatgttcagtatctcttctgtcttctctataaaataaaattaaattctgattaaaaagcatgcacagtatgatctcctataaatccctaggattagagagctgtacaaaaaagtgataatggcatgctttcagccattcggtccaaccaaggtccaacagaaaaatggtggcccatgtgcttcttcagggcgcgatggtggttgtcgggctggttaaacccatactagcgctactttatctaactgataaaattctgatacttgcatgctcagttgtactcgtaggatcttgaatggtgtgcattccatccagatcaattattgattattgcacaagatcaattagttaaattgctgattagacatgatgaaatctccacaacaagacaaatatactcaaaattagaaaaagaaaagtagatctcattaaattgaatggtggacgataagctgaacataaccactaaattattctggtactagtgttcagagaaggttcttaccagttaccactacatttcacccaaggatccatagaaaataaatattcttacttggatattcacaaaagtagatcaggtgcattaaggtctttacgatttgtaagtatacaaggtttcaaacttttaaatttctgtaactgtggaaaacattccagaaagggtgcaatgcaaagaatgtggattcaattaacggcacggaagcatgtatcgaacagatatgacattggaaaaagtaaagaactttcacgaaaaacaaaacaaggttaagaaaaaaggcacttacttcttcaggtcccaatggtggctgccgtggtttaccccatattagtgctgcttcatcaaactgacaagcaaacaaaaaaaaattataacaattgaattggattcaatgtagcctcacaaatagttctgaaaatgaaggatattaaattacaacttcaaattaaatatgtcaaaatgtgctgttataaataaatgaacaaaagaagaaaaaaaaataacaactatattggatccatacataagacgaacatttaacataaatataaccatgcaaacaatcaagtgatgcagaatgtaaaaagaaaattgtaataaggcaatttattcatcacttggcactgtttttcaaaacagcagggtccaatttatatgagtatgattggttgaaatagaaaaaaaaaaaaatatatatatatatatcacatcactgtgtgtaatgtttttaggtgcacatatcattactcactcacggtgacaccataattcagttgtagtcaaagttcttataaaaatactaaaattttattaacaatatgcaacttttggacttcaacacagcaaccaaatgaaagaaacattcaagctacttctctctttctctttttctttttttttt

SEQ ID NO: 163206 - DNA, 1254 bp, Cannabis sativa
ttttactctgtcaagattgaaatcccaatgtaaaacatagtaaaactatattaaatttcatgttaaaaaagaactagggaccaaaataaaactttttaactgtaaagagttacatatatatatatcactatataaatacataaaattaaacaaattttaaatagtgaataatactttccagtctgacatagggtcctcatctcatctatttatttatttattttatttttaaaataataataataataataataatgaaatatgagcatataattgatacatctttccaccaaatatagaattatgaattttcaacttttttttctcttcttttttggacatgtgggcagcataattatgtgcttttggacccactttgatattgcattcacagcaaaataccttttgactcaaatctatcttctttcttagaatttttgttttttttttttcttattctaatcttatatagattcatgcccaaaaaaatatcccaataattttcttgtttttattttcttatgttgtgagtattgctgaatcaaaaagcatctggtatacaatttggattgactttacagtgtactattttttttttcttttaatgaaatattcttttgcaagttaagttacatacactatagtttcccatttggaatacaatattacaatatttgatgtggttgatgggccacaatagagcatgtgcaaaagggtccccatgattggattatgcttcaaactattcttcatgggcttcctatttaaatataaatttaaaaacttacaacccatacttgattgattcttttacttttaggattttataataaaaagttagctaattagattattttttaaattttgacatgtattaaattatattctccgaactttttaagcttaaaaattctttctgaactattgagatttgagattgttagatttaagggctcatgtccaattatgtttaattttactaacgtggtaattgtctatgtactaaatcgtactgcctgaactttgatatgtattaaatcgtgccccctgaactttcatttacgttaagtttctgttagtaatattagataaaaaaaatttaaatctaacgatcttaatagttcagtgagaatttttaactgcttaaaaatttcagggagcataatttcatatatatatatatatattaaagtgttaactaaggatttcgtaaatataaatgagagttaataattaataatctgtatatattct

SEQ ID NO: 163207 - DNA, 2693 bp, Cannabis sativa
ctactttcgcacaatggggacgaacaaggcctctcccacaaaagctggagagacgatgaaaacctcaggagtttaaactgcagagaagatggagactgcacctaaaaccacttaaaggtgcacagaagatggggatgatatcgacccccattttgggcgcaccttgattattatcgatctcatcaatagaataatatagtttattaattctattgttacttcactataaatatagaattgcactatttgacaatatagaattatatttacagaattcttacttgtagtccattaatataattaatataagtagttcaccctccaattattagttcataattagagttggtcaaaattatcgttttacccttctaattatctcttgactccttatgtaccattaattcaatatgaacagttaatctataacttttggattccattattgtatcacatgttcccaaccactcatgttattaagttcataaatcaaaagatgtaagaatcatcttctctgagaaactttaacgagtgaacaaagaactcaatggatacaaacaggagttcatgtatactcagaattcaggttgatctactaatgatcattgttatgatatgaataactccttcatggtaaacgacacgttaatgaaagatgttattatatatcgatctagtcatccatcatcaaattatacacaacacttttactacatatctatccacatatgtgatccgaatcaaaatcacacacactagaagtgtaatgtatagtaaactatacttactaattctatattaaagattcttattactttaatacactaccgactcaatttattcatatcgtataatcttaattttcttgtacatccttacaaaattataccttctctatatgaataaagaatttttagatatttattaattatacttatataattaatgtattaatttatcttataattttatttcatatatttcgtaatatattattcattaattacttgcttttagggcataaatcctaataagtggacccttcggtgtatgaattgaaactagaggtttgtatgatgtacatgaaaggcagcttgattctgcctgaagttataaagaaagacagccaactaagagagttcttaaccatgaggaaaaaagttgagtccatcaaaatttctaacaccatttgtgactaaggtagagaggaatgtgattttggggcctactccccctactctcccctttcattatgtgattgagacttttatcccagattaggtcatgtggttggtttaaatgagtagtttgatgagtttgatccctatttcaacattgaacttgtggtaaatttgaaactatcgccaaacatctaaaatatggcaaaaaatcaaatcccaaacattcatgtcctcctataaagaaaccgcaaaacatctagaaaatatcgtaaaaatctaaaattcctgttaatcctacatagtaatcgcaaaataaattgtagattctaaaaaaatcgccaaaagtcaaaattctcacaaaccatcataagaacatcgtgaaatatattgtgaaaaatctaaaaacatcgcaaatgtcgctaatcatcgcaaaattcatgaatttcatagaaaacaattcaaacacacaatatatcgcacaacatcacaaatcaaatcgttaaacattgctaattacaaaaaatccaaaaaataaaatatctcaaaacccaaaaaattaaccctttgaccaaaaccaatcgtaatacaaacaaaaatcaccggtaatcaaacctaatcaattcaaaaaccataaattgtatttctaacactacaaactaacctaacatataaaaaaaaaatcaaaatcaatactctaaacgttttgggtctaggtctgatagtgtaggtctggtctaggtattcaatggcgaaagaacactctgactaggaaaaagagatctcaggggcttgggtcgacggggaagctttgatgtttgcaattggtgccttgagttaataaaaagtgaggaggaagggggaggagggaagggtcttgggtcgacggggggccttgagtcgatcgactaaagacgaggaaggacgaggagaatggggtctcagggcttgagtttactgtgagaatttgagagaataagaaaggaagagagatagaaagagagttagagagaatgtaaagggatttgaaatgggaggaatattttaggtttagttggaaattaaacataattaggtaatgtttaatttggtaatttatttttggtccatgctttacatttaagtatgtaaattcaaatttttcgatatatttagactagataactaagtcaagcttcacgcggattcgatctaatttttgtaatcttttgatattcttttttagtaatttaattgagtcatataatttataacataatattttgatgtgtgtattataaataaagtaacaactttaaaattagaaacataattttttatttttaaaatatttaaaaagatggtgattaaatattaaaaatagtagaattaattgaaaaaatgtaggtattttataatagcataaaataaaaaaaataaaaaaaaataacagtatttacgtttaattatttgggttgtgaccagggccggcccaagtattttgggggcctcgaaatttttaaattgggcccttta

SEQ ID NO: 163208 - DNA, 3101 bp, Cannabis sativa
atcaacaccttttgaatgctgcccgtgccctttattttcaagctaagttacctattcattttaggacagagtgcattctaactgctgcatacctaataaatcgtactcctactcctaatcttgaaaataaaagtccctatgagattctttacaatgactttcctaaatatcatcacatgagaaattttggatgtcttgcttttgctagtactctcactgctcacaggaacaaattcacaccaagagctaggacttgtgtgtttatgggatatccccaaggcataaaaggatacaaattatatgacatcaacaacaaggaattttttatctctagaaatgttatttttcatgagaatatatatcctttccatcggcttaacaataccaaagactatgttgatcccttctctaacatggttcttccttctcctcatatatctgaaactattattactgaatttcctgttttagttcctagttctaacagttcttcgcaagatgatcttattgaccaaagcacagaagctaatgatattaactcctcagcacaggaacaaactccagaaaatgaacaaccttccattcaacaagaagaaccacctccagcaccaagacgcaccagcaggattatcaaacagcctgcatatttacgtgactatgaatgtcactcatttctccaagacaaaattccactcctcacaatcttgataaattcttgtcctatgataaattgtctaacactcacaaggcttttatttctatcattatagctctttttgaaccagctacctacagtcaaccatcccagctgaaaatttggaatcaagcaatgcaataggaactatttgcactactcaaaaacaagacttggacatatgtccgtttacctccaaacaagaaagctataggatgtcgttgggtatacaagatcaaattgaacagtaacggttctgtaaaaagacataaagctcgcctcgttgcacaaggctatactcaacaagaagggttggattttttcgacacattttccccggttgccaagatggtcactttcaaactcttattggcaattgtcactatcaagaattggcacacattacaactagatgtcaacaacatgtttctaaatggagacctcaatgaagaggtctatatgcaactttccaaaggtttgatacttccaccagaagttgctgatgaacccaacgtagtgtgcaaattgaacaaatcgatctatggcttaaaacaatcaacaagacaatggtacaaaaaattgtctgatgctttgattcaggaaggatttgttcaatctcaggccgactacactctatttaccagaggttcacaagacagtttttttgccatattggtttatgtggacgacattatactcacggatccaaatttatccctactaaatcaactacattctactttaaatgagaaattttctcttcaagctttttgcactctcaaatattttctaggatttgagatagctcgtgccaaagaaggtttggtgttatcacaacgaaagtatacactccagctcttagatgacaacagctatatagggaataagccaaccaaaacccccatggatcctagaatcaagttagatgatcaacaaggagaaccccttgaagatccttctccctatcgacaacttgtgggaaaactgttacatcttacactttccagacaagacataacatttgcagttaacattctcagtcaattcatgtcctcaccacgtactccacacatgcaagctgcacaccatctttaccgttacctaaaagggagccctggtcagggccttctttactctgcctcatcctcattgagcctaaagggattttttgactcagactgggcctcctgctcaataacacgtcaatcaactactggattctgcatttttattcgcgactgcttaatatcttggcgtaccaagaagcaacctaccatttctcgaagctctgttgaagtagaatactagaagccacaggcagtgaactaacatggctacaatacctacttaaggatatgcaaattcctcaagatcaacctgcctttatctattgtgacaacgaatcagctattcacatagcaaacaatccaacattccatgaacgaacaaaacacatcgaacttgactgccattttattcgagacaaaattaacaaatcaaagctcagactcagcccggtcaatagcaaccttcaacttgcagatgttttcacaaaacccctagcttcgaccatactaaactcccacataagcaaaatgtctgtatatgatatataccatccatcttgaggggggtattaagttctgagttatatcttatttcattctttttagttcttatgttcgtttattcctgagtgttagttatttgtgtttctaacagttagatctgattttcatccccttctttttctggttttgtgtcagatgttggttaggatattttgcctaagtttgtctaggtgttcttggtgtataaatactttgtatcactgtttcatttgaatatatacaaaattctattttctccattccacattaaaatcattactagcggcgttgttgttgttgttttgctgttgtttggatttggagtggttaatgaatccttgtaagaatgttatctcatcctcaaagctccatgttctactagaattctctatctttttcttcttcttcttctttgttatcgtcatcttattcttattgcgattatttttgtttgtcgtaatagtacgcttgctattacgactacgcttattgttggcgctaatgctggaattagtggtagctatttctggaacaatattgtgagttgaatctgagtctaagtctgtttccgaatttgtttcataataaaaaatgtagtaatcctcaaaagcatcaaaattaaaattttcatcaacatacaaagattttatattggctgaatggtatttttgtaagagtatgtccaaaaacgttatgtgtatttataaaatttatataacaacaacaataataatatctcaaaaaaaaaagtaatgacaataaatatatagatacaaagagaaatttagtgcatgttt

SEQ ID NO: 163209 - DNA, 1095 bp, Cannabis sativa
  modified_base (959)..(971): a, c, t, g, unknown or other
aaaaaaaaaaaaatatctgaatatagagatgagagcactaatcagaacagtaatggtgtccaacaacgtaacggtcataactgaacagcacagcttttttctcaattcataattcttccccatcatattattgccacgtgtcctctttttcttttactgacattgtcagtccaccttttaaaagatatttttaatttctatttatatattttaccaaactttatatgtaaattttaattcattattaattttactattaacaatgaaaagaagagagagcacggcactaaaagtgtatattcatagcacgtgtacattcatattgggtttatatgaacaatgattgttaattataattttttaatacaattttaaagcttaaaattacatgtttaaatattttttttttttatgttttttcgtactctatttttgtaaaatttttaaaaatttttaaataatttataatatgtaaaataaagttataaagttcttgatattccactttatcatgcgcatttaacatattttcgacactgtaatctatttaaaaatttataagaatgatgttataagcataatcaacactaccatgaaaaaaaattaaaaacaaatattctgacatgtatttgtaaggatgatgttataagcataacaacactgccattgaataaaaagttgtaataagagtagtggcagattaggatttaaagtgaggagggtataattttttcttaaagcagagtcaaaagtaaattttaaaaaaaataatagttatatgggaattgaactattaacctctattacactaaaactaatagtatttacattatttttataaatttttaaaaagatttcaaaaaattaacaatactaaaaatgtaaattcgaacagagggtgactaaaaatttttaatagaaattaaaaattaagactcttaggaggcgtttggttgggnnnnnnnnnnnnntaggaataggaatgggaatgagaaagaaataaaatttaaaatggataaaaaaaattgataaaaaaataattaatttttttttcttgttacattggaatggttattccttcctttttaaaatgga

SEQ ID NO: 163210 - DNA, 1350 bp, Cannabis sativa
aaaaaaacccaaacgttgtacttcactccaatacccactttttgcaatatgctagcctatgtcagtgaaattccaaatgagacgatcaaccctttcaaaagttggcatcacgtctcataccctttcaaaagttaacaccaaaatggaaattattgctttgctttccactggattaaacaagtccacaatgagcacagagttccatacacttgaagccaatttaagatcataatcccaagaatattccacacctccacaaaaagagttggtatgccctacaaagtctttagggagaaatcttcctttatactaatagtgtcaccacacccaacaaacccccgagacccaaccttccataaatcacaccccaataacacactatttcaaaggaaagctggtttttggagagctttatggcaactcaagctactccctaagattaagaatttcctttggagaacttggtcaaggtgtctgcctactcgatctcagttgagattaagacatgttcagcttgaaacaaaatatgcctggtgtcaaactactgcagaaacttctctgcatttgtttgtatcttgcccagtagctaaggcgtgttggagtaaaattaatttcgaagcacaagatgaacatttcaccacctttgctgcttggtttcaacatggtttggctaattggaatgctagaacaaggttgaaagtttcaatgatctgttggtctttatggaagcatcggaatgagaaaaatttggaatgctaagtcacctactgtcagcgaaatagttacatcagcaaaactcactttcacaaattggagtaatgctcagaattgatgtcaaacaactcctatacctcatgagacaggagttagaaccgagcattggaccccctattttccctaagctgacggttaatgttgatggagctctttttcaacaggaaggccgatatggagatggtatggtggcacgcacaggtgctggtttggtgctggaggctcagcagattgcacatcagggtgtggtttcaccaattgttgcaaaagcaataagcataaatgaagcattaagttggataaaaaataaacaatggagtgatgttgtagtggagacagattgcctaaatgttgttattgatattaattctaataaacttatggtatcccatatggtatggctattcatgattgtaaggcattgttagtagaattgcccctagtttcaatttcctttgtaaagcgatccgcgaataaagttgtgcatgctttggcatgtaactctatttacatggctgattgtacattcagtatggcttctttgcctgctgaaatttcattcttagttttggatga

SEQ ID NO: 163211 - DNA, 2990 bp, Cannabis sativa
gccgacaagtaatatcagattcctcattttgtggtacgagctgtcaggaggtatggtattttaatattttattgaaccgaaaaatttgataattcttttctcacatgtcgtctctctacaattttgtttcttctaattttgtcttaatgaataaatttctgtggactagaaatacttttgagattattgcttttctcggtgccaaactcttactattgggtgcaatgggtgtgtgtgtgcaggtttactctgggcttcaatcgcgtgttggcctcattaatcatattactgatggctttacatggacacttctgaaatgcattcatgatgaccaaaaggttcattctgcccaacggtttgctttaaaagcagaatgtaattcaagattagcggttgcccttacaattatggaggaatgctttctatcaatggttgatccaagaacaggcatcaacatgatacctcaagtcttatacaattgggggtcagctcatctatttttctttaaaattattttatcgctatattcttttactggtaatatcatcctatcaaaacatctttcttaacatacttggtgtgtgtgagatttcttactgctccattctaacaactgacatactaaataatgaatctcccacagatgcatttttcttatatttttcgcagaagtatgtgtgggaaactatatccaactgcccatgttgttgatcagtttgtctttgcttttttttgccatcaggtcggaattcgcacgtttgaatttccaaggattttatactgtggtccttgagaaagatgatgtgctaatatctgtagcatccgtcaggtagccaatcattaatacttagtccttgtattgtagttcgtttgatattagtatctctactataattgattaggattatagaggccaagattgtatctttctatgtctttgatatcaataaagtaagctttttatcttttgcctcacatatctttcggtaataggtagtgattttgcatgaaccggtattttagttccctgataacttaacaaaacttgcatgaaacttttgggacaatataaaatctggtaattagttttcttcctatgaatatgcgaatatgcggtagtatggactttgtgatattagacaaatggagaaagtgagcttgttttttactgtgtttcttaactttgttaatctaaagtctgagcttttcacagggttcatggaacaacagttgcagagatgcccctcattgcaacatgcagtaactatcgtcgacaaggaatgtgtcgaagacttgtatctgcaattgaagaggtataaaattataaatccattgttaaaatattttcattttcttaaaggttggtagtttctttctattcccaatcaaaatgcatctgatctgactcggttctatacttctctttttctttttcttttcagacatttgtagtagttctaattcctatttcgaaatgaggaagaaaaaatgtagtagacagctccatctaactgactaaattgtatatatgcattgtgtttgtgtttatactctcctcttttcatcgtggctgtagatgcttatttcttttaaggtcgaaaaaatcgtggtagctgccattccagatttgatagagacatggaccgagggtttcggctttgaacttgttgaagacagtgaaaaaaagagtctaaataagatcaacatgatggtttttcccggtacagttttgctaaaaaaggccctttatggcaatggagcgaaacatggacaatccggtgagtatcttttcctcgtttaatctctatttgttgtcccttctgcaattttattgtaaatacttaattgccaatgatgttgaacaggtgatgcgtttcggttgagagaaaatgaatcaacgaatatcattgtggaatgtaagaaagtacccaaatccatatcgaaggatgaaaaacccttcacgggttctgaagtttgcaccgaaactgatgagactgctgttcagaaaccgaatgtggattgtaattcaggcagaactgttgctaaaaccgaaagtaaagccatggtgaggaaaggaaaggatttggagtcaattgaagttaacggtggtaaaccgaaaagaggccgcaaaaagaagaaggatttggagtcacttgaagctaacaatgatggtaaaccgaaaaaagttcgcagaaagacgaagaagatgagtaccgaatcagtagaaacgagactcgggaacgactatacgcaatgtgatggaaggtgttgttgttgtagagaagcagaaatgagaagtatggaaagaagtaataagaaagtgttaagtgaagaggaattgagaattttgcaggagcaattttcaaagctgtcctgtgaagaagaagacccaacaacttctcaattaggtgataaaaattctactaaaatgctttgtaatattaaatctatggctatgtctcagtctcatgatgaaacacagcctcagattgcctatgacaagaattgtaatgttgaattgaaataaaagtttttaggaaagaaaaaaaaaggggaagcttttgtttcatttagattttagtgagaaattatatctaaaatgaggtattttgaaatacatatttttagtatattttgtagatgattaatttgcggtataaatatttaaatttaatttttattgtaaataaataattaggtttaatttttggtgtaataatatttatattataattttggaattttgttaatgttaagttattttaacgtgttatattttttattggtatatttaaattaatttaaaaaaaaattaatgacctagatcgataagagattatcatgtggtaattttacttaatacttaataactagatatttacagatattttagaattataatttaagtattattactgtaaaaaattaaatttaagtatttaattgtaattaagaattaaacttaaatatttataccgcaattttttttt

SEQ ID NO: 163212 - DNA, 3238 bp, Cannabis sativa
atgattcattttttaattgcaaaatctaaaaaatgtatcaaaaatttcaattaaaatttactatatatacagtatactcaaaaatacagtgaagatagagattaatacatcatatacggactctcgaattccaagacaacgtcgtattaaactaacaataaaacctttcaaattgtatttttaaaattatattactttacgatcaaaagtgttattaaatattttattatatataaaagaaacttaattatttgaaattttaaaatgtgttttatatttctcacctacctatcataatcgttttttataacttcaatgctataattatgcaaaattcttttgaaaaaaaaaataaaaaatcatgcaaaccattttttttttatgaaattcactgtacaaatatatatggttgtagttggtaaaactatatattccaaagtctcaattaaaagtacatcaaattaaatgcacattctaataaaagcaattaaacttaggcatatggaactcctacgctgggctttccttttattgtacgtcgttattatttgtatgggttcgatccatataggcttctcggtacaactctcaactaatttgcttttattatttccttgaagttttcttagaaactaaaatcaaatgttaatgctgctagttttatgtttttgactctgcaaaaacttttggcgacattggtggagttggagtattaatctacgggctcgcttgtaacgggtttggaaggaaactggtatgtatatttgttttatatgtatatttttcacgtgttatatttttaatttaaccaactaaaattatttagtaaataattttttgtgtattaatgcgttatcatgatttatagttgatggatggtgtattgtctcactgtttgatcgtaaagtaataaatttttaaaaatacatttataacctacatggataacactataggtatttctaaactatgtgggactttaaatttgtattaaacaaaatatgaaaataaaacaaaattttaaaaatacaataaaaaaatctaagatatcacctagactcttttgtgctttatttatatataaattatattaaatgtggctataaaatattaattattgttatttttttaaacattgtaatttaaattaaaagttattagatatattaaaaaaatatcttcttatggttattttttaaaaaactctatgcacatatttaaatatatttctattattcttttttttttaaagttaattgcgcatattaaaaataattattattctattattattttttaaactaataaaatagagaaagtatttatgagatgtgatttcgttacctattgtagttaccaaaaaaaaaaaaataagtttcttttaaaaaaatacacattcttgaccgagattttcggcaactaaatcattaatgcaatgagaattattagaagagagtaaatgcaagtctttttgcgtgattggggcattaattagccttagtccacaagtctctgactttttatatgtgggtatttctttacagagaatgttctgctctatttttttcgatccccattacaaatgtgattaggagtatttatagcagtttattggagagggaaaatgcctctattgtcctaagtgtccaccttggccatgcacaagtttccgaattggcaaagtagggtatgcgcccctacctagtaggatgcgtagggtttaggtgagacaagccctttataatttcttgattgatataatagtacattatgtagtcgtcacatacatccttgattagtgtgtaattgctaaagagtgggtttaatgcgtctgacacgtctttcatattcattcgtagacgtttcctccatattgcatttaatgccaattaatagttcatctccagtatcttaggcccggaggagctggatgctacccagctcccagaggtgaataaaagatcgatccctccggacctagccatagctcttggaggaactgctaggttgtccaaggggatcttgcctgcttaagatttgtctaactaccttcaggtccttaagctttatcagccacgtgtcgcgccatgaaattgccacgtatattggaagaaaaacaaggcaacacacataatcaaaataaaaattaagaatatctctaagtaaatgtacattacacgtaacatgatctagtatacatattggtaaaaacctaatcacagtagtaaaacctaattggcagagctgaacttgaaccactgacctcccgtcagaacaccataatcctacccagatctcgatcggacatctcccaactacgccaaacatagcccaaatgctggaagaaatcattaagaacatagaacaacccatggagaaaaggaatacgatgcatagagagggagcccatcatgctacgcctgttgcaccgatcacagaccccaaccaagccacacctaagcccagggagagtcaatgggcctagccagagaaaaaagacaacctctatagcaacacacgaaaataattatataatttttcatcacctatgtttaatcctatgtaactttgatactttgtaaattgtggtggaaaaccttgtggcggcttcctccccttaagattaagaattttgtttggagactgagccataaactgctggcggttgaggctaagttggtgagacgtggaatgcatatggatcctattttccattggtgtaacaagagcaaggagactattgggcatatggtgtggaattgcaatgcttctaggaaaaatttggaagcttgcaagtttcctccatagcaccactcctttcatcatagatcccattttcttcttgatgtaggtgcaggatcagtgacccaaggatgagttttatcgctttattggcctcttctagctgttgtggcagcgtcaaaatgagaaagttttctatcaaatggttccaataaacgaggtctggctaaattggccttcagggttcttggtcgcttgttgtctcctaatgaggtctcccatagattgactatgaggggtgtgttgatggtaaattgtgatgcttcagtgtcgctaccagagcgggtatggcttaggtgctctcaataagggattcgactggaactgtgctcgttgttgaagctcaatttcatctaggcattgtctttgtcactctagcttaatgcttggccatgcgtatgttaggttatttttagtattaattttagattaagtt

SEQ ID NO: 163213 - DNA, 1507 bp, Cannabis sativa
  modified_base (1467)..(1482): a, c, t, g, unknown or other
tatagggtccttttgttctttttatatatacatggataataatagtttgcatgtaagctacgtggacgaaaagtagatacacatacctattgtagatgtatatacgttggtacgtgtcaagttagcaagatgacacgtcatgcacatttgagtagtgcagttcacttaattaagaaaaaggggttagagattttctttgttacttacgtttacaacaacaaatcaagttgttttgttttgtagtatgaggaaatgtaattatatatagttagaaattcaggtagctaatatgcttggggagcccaacaactaaattggacccgtttggtgccatttcataataataatttcttattaatgtaggtttaagtggctttcaatttattattatttaaagagcttaaatgttcagtgtacgtacctaaaaaaagatattaatgattttcatctttccaaatgggaaacgaaatctccataattatttgagtaaaaggattctcatataattgcaaattgagctaaagttgagatagaaaccaacttacttataactttttcaacctagctattaagaaatgtatgaaattaatttataatgtcaagataaataagatctcaccaaataatatacttaaaatgaagctttcaatgttcgaaaaagtggacttaaatagacttaattgtgattagaattcttcataagtggcagcctgctttaaccccactttattgtataatcaaaataaatactacttaattaaatatatcattttcaggtcaaagtataatataaaatagattatcatgactcaaaatactaaaaattaaactaagattaagaaatactatgaataataaataattaaaaaccagttaaggtattagggtgacaattaattaagctacagaaacacattaactttcaatagaaatctgaggacaccataaataatgaaaagaaaaaatatgaaaaatgcacactgagatactacaagatatagatgtatatttatgaatagtatagtcaaataattattttctttgcgaaaaaaaaaagtcaaatataattatatatcaaaaacactaataatttagtaataattgctcgtcctcatctaaggacaatatatgataatcgaacatagaaaaaaccaaacattttcgaaacaaaagtctgcaataatttcaatgttcttgactcgctaactaagtcacattttcacattcatttgtcaatattacatataaggctcaaaaccaattgttttattgtttttagctgtgctataaacgataattgtcacatttcttgctagatctcaactccaataaataaataaaattggatgccatgatagaaaatattgaataaacttatatgaacaattttaccaaaatataaatccaacttacaaaaaatagttatttttagtgacaattttttaattacaacataaattttttgtnnnnnnnnnnnnnnnntagtcacaacaaaaaattatttgtg

SEQ ID NO: 163214 - DNA, 1202 bp, Cannabis sativa
tggtgttacgagctttgcggggcctgaaggacaatttgatgttgaagtttttgattgtgcaagtgattatgttaaactgatgaagtaagattcccctttacgatcaacatggctcaacatttttgctcaacttgatataatatgcatatattgtcctgtctgaggaagagctgtatgctgcaaaaatcagtgcttgtatgctgcaaaagattgttatgtgattttttttttgttagttttttgagcaattgtggtctgttgtttgttctatggttattttgatctgtgatatccatcacttccttgatatgcattctgtttcctttcagtaattgctcccttaactttgcaggtcaatttttgattttgaggctatccgaaagcttctaacatctcccaactttacattctggtacctagtttttcgaccttggtgcccaaagttcattttcaggtgtatataatataattttgtgtgtgtaagttgtaaccttaatatgttgtcatgttaaagttatgatgccttgcatggagttgctggggcttatgcaagccgtattttcgtggaagagcttggcgcacaagagagctctttaattaactgcacacccaaggtttgtccaacttcaggactctttttttgtgcattattcttaatctgggttggaattttgtagtctaacaactcaaacttattctttatcattgattcttgataacaggaagattttggtggaggacatccagaccctaatctgacttatgctaaagagttggttgctcgaatgggtttgggaaaatcagatactcaaggtgaacctcctgaatttggtgctgctgctgatggtgatgcagaccgtaatatggtccttggtaaaaggtattattatctttacgagtgaatttataatcttgttgatggcttttatttataacatatatttctatcttcaggttttttgtcactccttcggattctgttgccataattgctgcaaatgctgttgatgctatcccatacttttctgctggtctgaagggagttgccaggttctcttttttctatcattccttgcatgtcttaatgtcgtattccatgaatatgatatctatccagtgtgatgtatggaatatatgacaaaggcggagtgttagagtatttctattgatcggtcatgtcatataggcccgagtcggacatc

SEQ ID NO: 163215 - DNA, 3546 bp, Cannabis sativa
acaatttgagtttggattgattgtgttataggggaattgaagaaattgttggtgggtccaactggcttacaccatgaagatcagaaattgttgttcaaagacaaagagaggaactctaaagcgtttttggacacttcaggagtgaaagaccgatcgaaggttgttttgttggaagacccacttagccaggagaaacggttccttgagatgagaagaaattccaagatggagaaatcttcaaaatctatctcagagatcagcttggaagttgacagacttggtggccgggtataaagcttaattccccttcttgtgttttttatgttaatgatttctgtatttcgttttcaggtagttacttattcttttgatttgaacacaaaaacatatgacaggtttcggcttttgaatcgataattatgaaaggcggtaaagttgttgaaacagatgttcttaatttgatcgaactattgatgaatcagttgcttaagttagatgggattgttgcggagggtgatgtgaaattgcagaggaaaatgcaggtaagttcttgttgagtttgtagttttttatttagctttgatataatgtcccatttgagtactaaatttgtgaataccattcattatgattcttttaaaggtaaggagagtacaaaagtacgtggaaactctggatatgttaaaggtgaagaattcaatggccgctaccaatggagtacataatacccctaaccaatctcaacaaaggcaatccaatgggcatagagcaacacaagcccaagagcagcagccaaggcatcatcattccactggtcaaaacccgaaaacatatcaagatcagcaggaagctaggcattccattggccactcgccgagacaccagcctcaccagccttcgaggcattcagcatcatcgggtgcagttgtaattacttcgaattgggagacattcgatgctgcaggtccagcagcgttggtgccgatgccagcttcctcaacatccccaccagccacaaccaacaataaaccaccggtccaacctaagttcaattgggaccttctttgagttttttagccgtatatataccacgtttctttttctttttctctttgtgttgtattgggatgttgttttttgagtttgtctcatgttggtttgctataattcttatctcctatgattcttttctgtatttagaaaatatctagacccccttttactctcttattcagttcctctgaaataaatggggtttcactacattagtgatactattattcttctcaagtcatgtctattttttctcttttttcttcatgaattcaaggaacctttttaatttcatgtttcagacagttatctataaatatattttttttttctgtttgtatacttgtagattgatacttgagaaaattgggaattttcagatcgagccatagaagtgtttttatctcaaaatatcttattggggtttctagtaagccatcctagaccaagtaggtagttgttgaagaaaataattggtctttatgccttgcttcctctatgggctacaaactgacaaaaagaggggtatgaaagaaggggatttgggtaatcaaaataactaactgttccaatgatagaataacaggtggccataaagtgtgtggagataaaaagataagatagaattagtgtttttttagtctaatgaggaaatgttaattttgggatatgatatatttttaataacttgttttcctaattgagaatgttctcctttgtactcaaggaaaggttttcagtaaagcttggggctataataaatgatagctataccaataaagtgaaaaacaacaggtatgaactatgaagtgtgagaaatttttaacgttagaatctcttactttctctcattcataattgagttcactcgaatcaagcatgtaaattggcaagctcatgtactatcattaccatttccataattgtgtaagcatatatgtaacagaaatgtggaaacaatcaaacaaagcttatgattggcaaagatgtattgattctcttttattggttttcagtattaggtgaattattttattataaaacaaacagcttgtaacagaagccaaagtgatgatctgtgccataatcttttggtcgaagaaatcgaaagagattagtccctagattgtatagagcaatatatcttaattatagtgtcatgaactagttattgcactttttgctgtccaataaaaagaaagtaatgatatttttcactatccaattataagcaaaatgaatccaattaatcataccgtaccgtacgacaaccaaaaaaaaaatcactattgcagctttactagtagaaaatgtcaaaggaaggcataaagaaaagcacacgtttcattaattttagtatataaattataaatggaatcaaactatatgctatagatctctagtgttttaactttttattagaataattatataaaaaaaaaacatatacagaatgaaagtatatatataatagaattgaaatatgtaaaagttctttattagcaaggacaccttagcatagtagtcaggtatcccaaaaaggaattactgcttggaagctaagaaaatttaaaacttaccagtcaccaagacaacctcatacaacacatgctattactttacgagaaatactagagaatactattatgtattaatattattattggtgaaattaagtatcgggtctcatataatttaatataataattttgatagagtatcactaactaatcgcaaaatgtcacatctagaaaatactaaggatcactggtgttcaataacaatgctcattactttatattatgttaacaagtaacgatatgttccgcgagccctgccttacttttatagcgcggtcccgcgatgagttccaggatccgcctagccttttctttagatggctttagggttcccgcaggagtcacatgctcctgaatgtaatctactaaattactacgactcttccaataagaattggtttaaacttttaatggagattttatttcttttttggcaaaggcatatagttattaagaatgtatgtgcaatggaatcttcgaggtatggatgaagcatagcaaactggtaaaaatagaaagtctcataaatgaaggcaaatgcatgaagaaaaaaaaatagtaagttgacatttaaagagaataaaaagttagctgcaaaattataatatcatttattatgccgatgaattgtatgagagaaaatttaaaggaaagaacatatataaataaaataaaatgaaattttggaagcaccaaccacatagctactaggccaatatacaactggaagaaattaaaactatagggacattgaacaacttattaatgttcttgactgggacaacaattattaacatagcttgcatttgtttggagagaataaaaatataaaaataggattgagataaagaataggaataaaaataaaattaaattaaatttaaaatacataaaaaaaaaaaaattgataaaa

SEQ ID NO: 163216 - DNA, 1340 bp, Cannabis sativa
  modified_base (172)..(183): a, c, t, g, unknown or other
tttggttattaatgaattggctttctctcaaaaaaaaaataaattaaattgtgagtaatttaaaagtcaaaactttataattattaaggtatataataattaataatagtaatggctgatattttgttttattcatttactattactattattactaataataataataatnnnnnnnnnnnnaataataataataatgtaattataataaatttaatactccttcgcataaaagagtttaaagaaaaaataaaaataaattaataatataaaattaagcatactcttacttaaaaagtgtaaaacaactcaaaaatttaaaaataagatataaattgttagaaatttaatcattattttttttatttagaatataacaatgtgaaagagattacttaatataagattttaaaatttgaaatataacaatgtaaaaaaaaaccacaactatataatttttataagtaatcaaaaattattgtaccaactcaaaaagtcatccacaacaatcttaaaaatgtaaaatattataattttatttacttatacattactttataattacatataaatattctcaatattttttattattatgtatattatattataatcaaaaaataatatatacttatatatatttgtaatcatagatgtactgataaattatactgcatgattacctttattgggaacatcaacaatggtagctaccatgtgatagaaaatctaaacttgtaaaattttatcaaaaaataaatctagaacaaataatattatgagattttgaactccaatttctaaatagaaacacaactaataaatagtgatttgagagaaaaggaaagaaaaatcatgatataatagataaagagtcatgtcacgtgagaaaaaaaatcttatatatgatctactcacttttttaagaaactattgatctcaaatcaaaatttacatattgtgattgataaaaaaaaaaaaaaaattatacccattagcactatatgtatgtgtgagagaagataatgagtatgaatatataaggaataacaataaattgataatccttataaaaaacaaattattagtatgaataggccaaataaatagtggtaataaatttagttgcattttatgtatttattatttatgcatataaatgtataaaaaaaaaatttcggtctattgattttcatcattaattgtattaatattattagattaaataataaaatagttaaaaacaaggggtctttttaatattataccaaaaactgattttatttataaaaataccttcaacaaatttttttgcgcatataccgatgtgccacgtcagc

SEQ ID NO: 163217 - DNA, 1379 bp, Cannabis sativa
gatagatgccccaaggtgacgatctccataaatacatcgccacatcgcaggacaagaaaaggtgttccatggattcctcccccaagccggcagcaagtgtcctcatatatatttgtgtttattattattattcttaatttctttctaaagctttggtgaaaaagtcttctttcttctacacttaaaaaaattgtcatctttaggtatctcataattatgtaagattacatacaagatcagtaatatattatactatagatgttaataaagctatataatcttacataatatatttatatacgtgtgtgttggaatatccacacctactacgcgcagtatatagaaattaattaacatcagcacttataatatatttacgatcaaattttacatatataatatttacagctataaaaaataagctacttttagttataatatatatttttttttgtaattaaatatgattttaatttaatcacaacaaaaaaattacatgattaaaacataatttttaaatacaagttgttacactaatttatttttagtcaaaacaagtattataactaaaggtacatttagtcacactttttagtcacaacataaaaatataatttataattattcataatctttttacttttagtctattattaagagttagtcttacattgttaatgtgtggaaataaattgtaatatataagatgaataggcgctactcctcttcttattgctaattagttttgagatggaaccccataattcttaatatagtcacaaattttattgcgactaaaagtaaaaatttttataatacgcatgcatgttattaaatataatttttgttagttttcagtatattttttagtccagtaatatttgtaatcttcattgtttgagagcttcacaactattattatatatttatggaatcgtgtagactaattcattgatagactgaaacgttgtcagtcagtgaaaatgcttcaaaaattaattaattaaaccacgatcacaataagatcgacatataaaattaaatattttatagtcatgtacatgttatactttttgtaccatttgtacatgaacgaaaatactaattatatataaatgaaaaggagtgatttggtctttagcaatgacattattaattgaaaccagtcaatatatacattacttttaacatacgattggtgtattggtgtcatgttttttttcattcatagcatttttttttttgtgagtgatgaaatgtagtgggatattatatattataggcagccgattttgtgcccaaatgtgcaaaacacggattggaatccgtgtacggcaggtaggtcccacgttagaatagttataatttttaattattta

SEQ ID NO: 163218 - DNA, 910 bp, Cannabis sativa
agggcataaaacccaacaactctctcacttaagattaggtatgaacattcatttaacctaatcactaaaaccccattaataaacataatcacatttggaaaaaattagaaaccaattgccgttcaaatgggaatctcacactattcattccgaccaccaccacataattgtgaatgacattcagagagagagagagagagagagagagagagaggccagttgggtaaccattaatttcgacaaggagtgacatgttaaggaggtgatcggtgtctaacaaaaaagatgtgaggctcaaatctaaggttttgggcgacaatgaactcaatttggggtttgtttaagcatttggtcgtcggtagtaggccatttgcttgagaggtgttaggaaaattagggtttgagtatgaagaagaaaaaagaagaaaagaagaattttttttttttctaattttattatttattttgattttttttaattatttttatattttaaaataatttttaaatgatgtagaccacttaaatgttgctgcctgcacctttatgtatacaccagttgtacacgacgtcatttaacaacacaatttaaataaaagggataaataattaatgaaagtaagatttagagagttttactaaaaacaatctgtttatatgattaagtattaccaattgtataattaatttaattaattttgctacaaatatcccaaatttaaatcaaaaaatatttattttactgggtattggtatgggttgactatttaagtttgaaatgtatagtataagtatggattgatacctaaaagaaaacatgcaaggagactgtaatggcattgttttcatttgttatttactagaaggattttattaggggtgttcacaaagtatccgatccaatccaatc

SEQ ID NO: 163219 - DNA, 1408 bp, Cannabis sativa
aaatttagtacaaaaaataagtttgtactattggtatccgtacttttcaccaaatacgtggcaagtgaagaataagccacatgtctataggacccacgcaagtattttggagattaatattaacataataagttttttgtattctcttaaagacacgaaggggcgtccgagagtgcacaattagtcccaaaagaacactaaagtcaaagtcaaactctattcttgacgtaagcctctcgaatcacatagcgtcagggaattgcccaagcgttcaaaacaattcccaaaacaaaacattatagatgattgcttcaacgcaggcggtaaagtaaacctgccctccaaatagacatatcattcaccagtaaacattttctctccatcactaaagaaacagttcttgctcaagtattgagatttaatcaagagctttatttacactattatcctactagctcatactagtccttgtgtgtggtggaaggtctgaaagatcaaggtgctagctttgtcatcaccgttccgagaatacaacataagaaaagaatcgagaataccttagaggtaaatgtattcacttttagtttaatatatacatatgataatttggggcatatggtacaatgataatcaacaacaactcttccattacgtacctaatttagtaccataaaattaacacgtcgaccacgggaccagagggtctggtcgaccaccgtcgtacaagccacgagacatcatgtcccttcaggggttgttcaacaagcacatgcatggacttgcatggcctatgcacacgtgaattttgggtgctttcgactctcacagcttgaagctcagacctcttaggttttgggtcgttgttcgagggttgaaatcaccatctcgatgaggtcggggttcacactttaaacccgagctcactcatcaatggagattttgaaggtttttgaattacaatatataaccaaaaattacaaataaaattttgtattacattgtataaatcatgtaccaaaaaaatagtgtacatattttctaataaaaacatataaaatttgttagagattttattacaatggagaaaattaagacattacaactccattacaatataatacgagaatcaacaaagagattaaataaatgttacaatgacatatatacaatatatacactatatatattatatataagaaagatagaagatgaatatgcacaaaatatattatataacatataatgtaataagagaagaatatgtatacattcactcacaaccgtgtgtgtagataagtgaagatcgtccatgacttgaacaaggtattacaaatttgtctaaaagattatttccccctatctcaaagcattgagggaactctctaggaaatagctttgggaattatca

SEQ ID NO: 163220 - DNA, 1072 bp, Cannabis sativa
ctgatgaagtgaccactgaagctgtacgaaaagccaagtttattagaggcttggaggaatacattgatagagatgttattatggaagccaaaaaaataaggggttgtgaagacttatcctcaaattgtggatttagctctcactactgagggggttgaaggtttaatttgtaaaaagagtaatcagagaaaggatgcgtggaagatagtgtctgacactggaatgagcaagggatctaatcccaatgattgaaagaggaatcaaaatgaaccaccgattatggattcaaacataagattttagggtaaccactcttttcgtcgggatagaaatgaagtttgggcatcctaccccgaatggccaaaatgcaagagatgccatttgggcgaatgtcagaccaaagcttgcttccaatgtggagtagcatgaaattttagaaataagtgctcggagctacagaagactgaagtcaagaaagaaaaccataaggctttccaatgtattctgtttatatagaattgaattaaacttgtgagaggatcttcctcacaaatgaaaatcgagtcactttctgaaggcccgaatgaagaatgcgagaagtaagcaggatccaagcaaagattgttggttccacaaagatgtaggacatactactgaagaatgttgccaattggaagatgagattgaaggacttatttcccgcggatacgtagatagtatatgagaaacatgggaaatgaaaagaaccaacccaacaaccaaaaccaaaaccatagtgtacaatctcccctagttgaaggcgatgacattctggttatttttggagggccacatctcgctagaaccagcaatagtgcccaaaaatgtatattaaccaagtaaaaagtcaagtattagtttttgcacttgaggaacccccaataatcctcattgacgaagatgcgacacatgtgcaattccaacacatagatcctctactcatcacacaaattttctaacttatattttataaacaattaaatattccacaaaataaccaattttgaatttgaaaatattatgattagaatat

SEQ ID NO: 163221 - DNA, 1534 bp, Cannabis sativa
  modified_base (1475)..(1498): a, c, t, g, unknown or other
tgggtatggagacgataaatgggtccaggggcagggagggactaatggccgcaaggcttattctatatggcattggcatctcatcgatatttttgtctacttctcccataatcttgtttctcttcctcctgtttcatgggttaatacagctcaccaacatggcgttaaggtaacataattataagtttatttaattaatatctattaatttctttttgttgtaattaaatacaaatttgtatattacaatggaatccaattataagtaggtacttgggactttcattgttgaaggggatagtggtgaagagagagctattgttgagaagttgctcgaaacagaagaatcatctcaaatgtatgctgacaggttgacagaactagctctcaatttgggctttgatggatggctggtaattattgctaataatattgccactttattaatttactttcttatcattttttttattatttttttttaaaaaaataatgatattcattaaaaaccagcctcagccaatagaatgtttttcaaatcaatagaagcattcagcttattgaacatacaacctaacataaaacaagaccttctaacaacacagtggatagacttagcagattgataaacaaaaaaatctataacattctttaaagtagataaaactaagcgacaatcctcctccaacaaaccaaactaagacggcatatgaacgaagctattaattgcctgaatcataactaaatcatctggttcaatgatcacatcttcccaaccttttatttttatccaactcaacgcctccttcattgtaattgcttcagctatttcagggagaacaacaccacttcaaggtgctgaaatagcttcaataagacctccattctcatctaagaacacacacccaaaaccaaacttttgttgagcttcaaaaattgtaccgtcaacattaattttgaccttaaaattaaccagtttactcaaatggttgctgctaaaggacacaccaatagcaaatagggatcctgacgagtgaaacttagcaaccctgcattggccaaggactgactttgctcacttaaccacttctaaagcagaacaagtttttttgctgccaaaatacctcattttgagtcttccaaatgctttaactaaccatagcagcatcaatacattttattatttgttgatatgcacttataacaaaatatgatatatatttatatatgaaaaaatatataaataaatatatattatcaccataattaattattcttttgtagttattttgtaacttttatttaaataaaattattagattaatttgttcaaataaaaaaattatctgattaatgaaaatataaaagaaggagaacatatgactgtgtgattggacaagaatattggttgcaatggaatattcttgttttatgctttgttttgaaaaattaaattacttaatatatatatatannnnnnnnnnnnnnnnnnnnnnnnaagtgcctatctaacggcattttttggtttaacaga

SEQ ID NO: 163222 - DNA, 888 bp, Cannabis sativa
  modified_base (829)..(858): a, c, t, g, unknown or other
ttatgccactatttacccttttttttatttctgattccaaaatcacaaatgaaactttatggcactacggtatgggacatccatcttttattaaaaaccattcattaaataaaactccaattttacaatgattctacttctaattttcattgttttgtgtgtcactgtgctaaacaaaagaggttaccttcatatctcatcataatattgttgctcatcatttggatctaatttatattaatatatgagggccttttagcactctaactctagatgtttctaaatattttatcaccattgatgatcattttaagtacacttgagttcattttaacaaaacaaaatttgaggcaaaaaatattatttctaagtttttacaactcataaagactaaatatggtatttaaattaaacatgttagttcagattatgccaaataattatagtttgttgatctaattagttttctatccattttacattaccattcttgtgtccaaagaccacactaaaacttagtagttgagagaaaataacaacacctactcaatgttgctaaggcccttcttttttaatcttatatacctttagattattgggatgaatgtacgtgttgctactgctgcctatctcatagaaagaatctttagtttaaaacatcttttgagattcttaattctaaagtgcttggctataatcattgaaagcctttggatgcctggtatacgcttccacattactcacttctagattaaaattttcaccaagagcagctccctgtgtctttataggctatcctacagttatgaatgttgggttttatgccctnnnnnnnnnnnnnnnnnnnnnnnnnnnnnntacttattaatatagatcagaaacaacatt

SEQ ID NO: 163223 - DNA, 5666 bp, Cannabis sativa
aaaattaaaaaaaaaatcaattttgttatattaaacaatatttgaattttgatattttttttttaaaaaaaaaaagtaatctagtaattagttaaaataatatattgtaagttgtaacccaatcgagacgtctcttggaaacatcactaggattagaataaaaaaacaagacaactaatcagtctcataattctcggatcgtttgacaaaataaactaaaataaaattagcttaaaaaaattgcagtatcatagtttattttaaaaatatctatattcagttgttttcatcatccaaaagacataactgtaaaaactgttggttctaggagtgttcccggtgcgagtagtgtgagttgtaatttttttttcaaaccaaactgcatatgcgatttttgtaataacttgaacaaaagatactcaaaataatgttacagacacaagtagcaaaatcacatatcccaaccaagacatgcctaagctaagggagagtcggagaaaaaagacaacttctcgcagttaacaatttaggaatgagaaactctagcagataatataaaatatttgtgaaaataatatttgatattttaattagtactttggtaacaaattgtataaaacaaaatatatttaaaagtataattatttacataatttttaatttactcataaaaatcttttttaatgatatacaaactctttgaaaaatatttttcattagaaaagatcttcatataatagttaactaaacggtaaatgtttactgagattttcaaaaactaataaaatatatgtgaaagctaaaaaaattgattaataataaaaaaaaataacaccaaagattttacatagttggggtgttaacaagtcttagtccgcgaattaatattattacgataagactggaaaattcttataatttacacaagtgtttgaacccctagattttgcctaagcaattgagaaatgagattctaacactttgcttgaacaactgttcttatatatacagtgctaaagattcttattcgttttactttgcctactgatggggtaaatacaaataacatattgacttggcttatctagtggagcccgacccatgaggtgtcaactgtatgctgatgtggatgccacataatgttgatagttgtcaaaactatgtcctactttcgtggagaataaaaacacattaaatatttgattgtcaattactatcttttcatattggaaagatatgatcctcggacgagatcttacgagttaagtcctgatatcatgagatttaataattactagatgcgatatggagctagatgtccagacgtttgttgactacttctctggacgctccaaatgatctcattcgaattctcaatgtgctggaggattatctcacctagacgagtcgtctgttcatcattcagaagagttgatttcgctaatgaatctagtccattatcttggttgggccttctattgaatctaaagtgactgagttgtaactggttttggaaattacacgtgtcctcatccggaaacactgctaatagtaaaaataaatcaaaatttatacttatcttatacgtttagctataaacaaaagtagaaacctgatcagcggggccattgtataaatatcactctgcttgtacgactacacaatttctaattttggtactagaaaaaaattataacttaattttttttatatgactgtatttttaataaaaaattataaatatttacaatgtcaaaaattggttacaagcattcagttgcatgtaccttttttttatgcgtgtaacttactattttaaactttttttttgaataaaccatgcaattttatgaataacaatcaactaaaataatagtttgcaatcccatcaggatatctcctccattggaaatacgacttagattagaataaaaaaaacgagccaaccaatcagccgcttgattcctatatcgtttgataaaagaactaaaataaaatcatgtgaaaaaaaattgtagcatattcaatttcctccaccgctcaaaagatacaatagtataaattgttgcagcatgttcattcaacccattgacttgagcactcaactattgtgcaactgcaaggtacgtaactccaccattaacgaccccttcagtcgcagagaatttgttattcctaatcactaatagtaatttaatggcgaaccttcaaagaacaaagaagacgaaccaacaacaaaataaaaaaaatcatgtcacagaaacaagactaatcgtagtagcttaaatataagacactcaaaaccatgtcataaagacaagactaatcgcagtaataaaaatctaatcgcattaaaaaaaaaccacaaaccccgaccaagccacgtctaagctcaaaaaggatcgacggacttggccagagaaaaaagataacctctggtggcaaagcatttagaaacaagaaaccctagtaaacaatatgagattgaactattttctttcaattgtacgacaatcgactattttcaactttatttttacatgataaattattcataaatttttttaaattagtaatatatcaactataaatataatatttatacatagagtaatttgcggcataaatacttaagtttaactcttagttgcaaataaatatctaagtttaatttttggccgtaataatacctaagttatatttctgaaactatgtaggtaccaaccgttaaatgttaagtcattatattcacgtgtcatttttttattggtatatttgaactaatttttttaaataataaaaatttaatgatttagaccaatcaaagattgccacgtgacaattcatttaatcaggtacctacagaagttccaaaattataacttaagtattattaccgtcaaaatttaaacttatgtatttatttataactggaagttaaacttaagtatatatgccgcaaattactcttttatatatcatatgaatgaaattgaattacatttctcaaaatataaaaaattaggcatctctacttgtagggagaaatcttactttggtgtcattatagtaagaatgttttaaagagattcccaggccaaattctaagatttaccattccaatcaagcatgaagcaacatgaacaaatatttgttttcaacatataaaaataccatttctaaactcttaaaattatttacttgtatatataatcattgagagatcaaaaagccttaaattttctattttacttttgttttttgaaaaatctgtggactttgggatttagagacataaacaatacttactagctaggacaaagattgttacatgtatgtatgccactgaaaactagatattatattaaagcagagcctttccaaagaacacatgtgagtgtcccacattgataaaagaagagagagttaatcagtttataaagcttaaaagttacttccctatggccatttagttttgagacgaaaacttctaagtgaactctctcttttgatgatgggcgcaactcagagccataacaagtgtaacacttttggattcataacatttttttgggttgaaaaaaggatgaaactttacactcccccacccatcagggaatagaaagtataataaataccagtatgtcccacaagacataaatagctagccaatggaaggattgtttaaatgtttagatatgaaaatgtgatttcatggctgtgggacatgcctataacacatcttgtcaataactctgtgttctgagttgatgttgttgggttcttatatacatgaagaagtggaagaaagttcctttgaattgaatacaataaatgattgttttagtttactagacatgaagaagtgaagaaagttcctttgatttttattcaaacaatccggcaaggctcttagttttgactaattcatatttaatggtaataataagatgaaaaacaatatcatgtggttgatcaagagctagagaccccatttcattaattgcattttctagtctttagtcttcactcttcacaaccattcatttctttcattttttccaatcaagtgtgtattggctataaatactcattagatgaggttccatactactccaactcatcttcatattctcaactatcaaagattttcatattcttctcctttttttctatttttgatactataatgggttttcgatttctcggggtagatcatgctaagaaactcataaagaggcctctctttaatggtaaagatatcccaatgaaaggctattttgcagtgtatgttggagagagaagaatgaagagatttgtgatccctttggcatacttgaaccatccttcatttcaagagttgcttagtcaagccgaagaagaatttggatttgatcatccaatgggagctcttacgattccctgcagacaagatgagttcgtcgatcttatttctcgattgaatgccttttgatgattgatcatagatgataatcactgacaaaaattattgtaacaacttttttcttggcaaacaatgtcattatcatattaccatgtatacattttttccttaaggactcaaacataaagtccctaagagtgatataaatgaattctttacttataataattttattgatttttttgtccatctagattctgatgtagattcgttgcaataggatagaacagcctcttattagtatttagaaagatactaggattttggggccatcacaattctttattttattttttttatttttttgacataaataaattgaagcctaatgagtgatttgtgtaaacaatgaaaaaggtatgcatatgctgaaatattttgtatcataataagaactggaattactgaaaaaggttcaaatagatgagatctctaattatgatatgaaaattgggattgttcctttggatattaatggacatgactaagacataatattgaaaactttgagttgagaagaagagcaagaaaattgcagagcaaaatgaatgagtattggtttttaaagcagtcaactgtgaactatttgagtattgagttgaccattcaattcaatgcagtattaacctatcaagggaattgagtataaagacacctaaagttgggatcacttctaaaaatccttgtaaagatttttccttgttgtccccaagattgattccaaaaaaatatattgcaatttttttttcaatgaattttattggattgaaacctcttcttttcccctaaattgtacttgtccatgctcttggtctacatttcttttgtatggtgcaaatgtagccaattaattttgattgcccatttagaagttcttatttcatcagatcatttggactgaacacagagacaaatttcggttcactctttgataaagctgtctctttattgtcttagttgattctaaattcttctcaaatagaggccagagacattgatggaattcaactaccaaaaacacaacaagtgttaatcaaatgagtaatttctatttattagtttctgaactactcaaaaaaattccttttcttttccaagaaaagaggtaaaagtatatgatctacaaaattgttttctatgaatctatgttagcactaaaaataacatcatcagttcaactgagatgtgatatcattaaaga

SEQ ID NO: 163224 - DNA, 1908 bp, Cannabis sativa
tgtctctctctctcaaacataacacagaggaataatgtgagtcatattgaacagttgataaactgcaaagaatgaaaaagcaagcaacatcattacctttgcacttcatctttgtgatagccacaacaaataattggacccttgacacatatttcaccacaaggatagataaggctcattcgcaattgtgttactcatttctggaacatcgacaagttttatgtctgcaatagaaagaaacaaaacgatttagtgaaaatgcaatcctgtatttttcaaataaataaaacaaaattaaaataaattggtaatagaaaagctaagatatgataaattcaataaactaatcaaaattctcaacaaagaaaaatacctttagaattgtaatatttgttctcaatatcaaacttcttgttcttcaggctcctcattggagtattcgaacccataattttccatttcagcgtttgtacatcataaacccataagccataataaataccaaaactaaaacataggatcaaaactgcaagacaatgttgacactattttcaaagaaactgaaattgaaacccctaattgaaacattttctagggaaacaaataagaaaaaaattggtttttaaagaatacctcataacatctaatctaaggagaatcataatgttcggtggacttgataactggaggaggaggaaagatttgattatggctaattgcaatgagaagaagttgcagcagaagcgtttgagtctgtttggatgcgtgtcaatatgtggagaataaacagaatttatgtgtaggaactattgacagaaaagagaaattacaaaaactaaggaggttggttgagctttatataaatggtatagatatagataacttaccgattttcaaattttgttattgcccaaacacaactatattcaatttagtttcggtgaaaatgattagtataaatgatcattgaatcttattcctagtactcgtcatcctttcaaacaatagttctcacagctcattaaacacccctctttcaatagttaaatgagaaactatataatagaaacaacagccaacggataaatagtttaaactatttacatacaacagtaatgaatatgcatagaaaatgccacctacatattgcaatttaccaataacactcctactatgccaaggaaagtgaatggcccttcactttatcatctgcgtttagcacaattagacccaatatttgtttctgtgagtcattgaaacaatatctagaaactgactttggaaacaaacttttaatgttaaaccatcaattttcaggtagttttaaattggtaatttcaagaaaaagtttttattaactcatcaaaccattacacgacagcatgatctttagctcaacagaacaaacaaaaataaatagaaacaaaaacactaggtaacaccctaaaacactaggaagtaggaacaaccaaagtgcttgcagccacagcaataggtaacactagctcaataaggtttaattttacactattaacagcatctttcgttgagatttcattcaagtcaataacttgtaataatcaagtacttattccagagaaaattatgaacagattttcccatcagcagtttgcatcaatctataaaagcatcaaagtacaaaacctgcaagaagtacccatatcaccccatctggccatctccaagctacacccaaatgactatgagctcgaaactaaccaatgatcatagaacaacaagtaagaaataaagaaaaaaaaaagagccgaaaggaaaaaattacttggccttagcaatgattgcagttgtgccaacaattatgactgcaatagccatatccaagaacaattcatattccacaaccccttccaaagctgaaatctcctt

SEQ ID NO: 163225 - DNA, 3552 bp, Cannabis sativa
ttttttttttttttttttctggagttactattactcatatttgtaggcaagctaatagagttgtccacggcttagcaaagtacgctctagagttggatgaagatattttttggatgggagaaattctacatcttattttctctattgttgtaaatgacctttaatttataataatattgaaaatttctcaaaaaaaaaaaaaaaaaattaatatcttaaagttgttataactatatttcgtaatatctttatgaacaaaattatagaatgaaagatataataataattataattccaaattaattaaagtagatatataaaagtgaatattgttttattttgactctaattcgtcatcaagtaaacttattttaggagcacccccaccaataattattgcatattttcttcgaaatatagataattttcgaataaaaaaattgtagttataatttaatgtaatgatcttttatgcaccaccacatagactttattcttctatgcacccacataaactttattctaagaaaattaatgcatgattattacgattgatattatcattatatattatgtaatattattagttggcctaaaacatctgctcaaaaatttaattagtatcatgactagtaataccaccattttataattcataaaattaaatatttttatttgtatatgtagatggtgtatacatatatgtaatttttgcctataataacttaaagaaatgtaaaaattgcttcaacccttttccaagcaagagattaacttttttttactctaacttctaaaagaaacttaatttttagagaagaaaatagacatacagaaaaatcaattgggaatgcataaagatgttaaagacattgtaaagcttattgaataaaaaagataagaaaaagtcacatggtgtgtagcaaaaattgatggaccattgtgtcatgatggaatatgagttcatttattagaaaaggaaaaagaaaaaaaaaagtttgaaataaaaaaataagttaataaacaaaggttcatgaccctactctttaaacatcattttggtacttttggttcttaattattaatgcctccaatttagtgtaatggtccacacgcatggacattcaacaaagctgtcccaaactttacgtagaaattaatttagcatgcaagtatttctatatatccaagcatataaattaatctattaaatacataatttttttttaaaaaaagtattttatttttatgtttttttataataacatattttcataaatgtattacatatattcaaactcacttatctagctagccagcgactttgatgcatgtatattcaaatcaatgaaaaagaagtttgatcaattgatagttataataagcttagctcaattgtattaaatattaataatttttttttaagataattagaatttttattaattggtaaattggacatagtttattatatacagattgctcagcgtgagtataatcaataaaattagaccaaccaaatcgtttacaagaaggacaaaaactctaacaacatcttcaactaattaattgacccataaaccgccaattgtgaaacaaaacaatatgataaataataaattaaaaactctaacaacatcttcaactaattaattggccgaaagtcaaaattgactgaaaatcaaacaagatcagaccaatgtaaaaacaaaaagttagcacaaaaataatacacaaacaaaaattaaagataaaacataattaaaaacacgactgagagaatccccgccaacccaaaccagccacaagaccatttctttccgaatgtgcaaggatccaatcgcagtcgcacgaatgccccaacaccccatcccgatagcagccaactgcacataacgacccctatccatccaacagaactggaacaaacagaccaccagaccattggacaaccaccagactagatttggagatccacaatcgaagcctatcataccagatcgcacagaacaccaaaccaaatcccagttcccaacgaaccaccggaccaaaatccaaatcccgaaggggagaagaggaggacaccatctgaccagatcacaccgacgaactcgaagaggagccaccaaaccaaccaatgacaacctaaaggacctctcactcaaacaacaacagaccctcccgatcagacccccaaccaaccccaatccaaggactgatagagcctgactgggaggaagaaaatcagaataaagacccattctccaacggtgcaagagttaacgatggaaccgtaaaacaaagtgaaaaaaaatactcttatgattattttttataattgtactaatcatattataaatttctaatttttagattcttttctatttaatataatattatgtacgagattattaacaaacataaagaattaaagaagaaaccatacaacatatatttgtatacacatgaatctatttatctcccatatggtgttagactacatggtctttttatgttggtgataatggtggtattgatgcttgtgcttctgttttttctcgttatgaagaagttcgattaatgatgtaaatatgggtcatattttttaacaccacacgaaaccagcatcagtccgagaggtataagtacgcaatacgatgttacaaactggcaaggcacgatattaaaaaatagacttaaagcatgacacgatataacaaactcaaagacacgatatataaacatgaataagctagcccgaaagcacaacacattaaaaattcttataataataataataaatatataaattctatttaattttttatgagtaatttttgggtaaatacttaaatttaacttttgagtacagtacaaataaatacataagtttaatttttgacaataataatacttaagttatattgctgaaacttatctaggtacctaatcgttaagtgacaagtcaatttccacatgtcattttcttattggtacacataaatgaatttttaaattaaaaattaaaatttaataacctaaaccaattaggagctgctgtgtggctattgactagacatttaacggtcagatacctacagaagtttcaaaaatatgacttagttattattatcgtaaaaaattaaacttaggtatttattatctttaaccaaaagttaaacttaagtatttacgccgcaaattacttatttttatatgattatgtgtaaattattgttgtaaaactatataaaaacaattgaaactataaaaaatacatataattaatttaataattaattcattaattataaaaaaaaatcaagaactgtcatgtgactattgacttatacttaacaattaagtacatacgaaagttttagaaatataacttagatattattatcgtcaaaaattaaacttatgtatttatttgtaatcatgaattaaacttaagtatttacgccacaaattaattattttttatataattatgtgtaaattattattgaaaagttatataaaaacaaggctaattaggatttttttccc

SEQ ID NO: 163226 - DNA, 1152 bp, Cannabis sativa
agagagagagagagatagtgtggcccacatgagaaaagaaaaagaaagggaaaagaaaaaaaagaatattatcagttataggtggatcccacacccatataatacagatatttatttattatttttttctttttctcagtttcatattctttcccgttaaagaaatttagtctcgaaattataaagtacaacctcaagttaaacattaaacaagagatgatacttcatttaaatctctgattctaacttccaagtagccacctcttctctgtagttctatcgaaagaccttgactgttagaatctctctataattccttaacacttttaactctatcgccaagattctgacatgttattcttcgtaagtcacatcttcttgaagagggatagcctcatacttaatgacatgtgacagatctggtatatacttcctcaacattgacacatggaacacattatgaacatgctccaactgtgcttgtaagtttaacggataagtaacctcctaaatcttcttaataaccttgaaagttccaacacaccttgagactagcttacccttcactctaaatcttgttacaccacgtataagagtgacttttaagaagataaatcaccaacatcaaactcaacgccccgtctatggagatctacatagcttttttagtgattttgaacgaccataagtctttcttggattctcttaatcttcttggtggtactagtgatgatttggggtccaacagtaacatgatcatctggttcaacgcaacacaatagcgatctacatggtctctcatataaggcatcattaggagctatgcttatactagctttgcagctattaatgtatgtgaactcaactattgacaagtgttctccctggctacctccaaaatccaaaatataatcatgtcttccaaagtatgtattgtcctcttagattgtccatctgtctagggatgatgggtggtactcaaatgaagcgtagttcctaaagctttttgtatggccttccaaaaacttgatgtaaatcaaggatttctataagaaataatgttcgagacagtttatgtagccaaactatattgtccacataaagttgagctagcctggtaagcttgttatcctttctaattggaataaaatt

SEQ ID NO: 163227 - DNA, 2019 bp, Cannabis sativa
  modified_base (1973)..(1974): a, c, t, g, unknown or other
gttagctaaatatttatcataactaataattattattattttttaaaaaagcaaaattaacaaatgacccaaaatgtgatgattttgcaagtgtagaagcatatttgtcgcccactcttctctcatctcctcaatcacaacttttggatataaatttttgtctattacctacaaaacataaaagagaaataaattaattaaataataaatataaataaaacaaacatatatttgataattgtttaacaaatattgaaatttgaaattgtcataaaatttagaattgcaagtttattgatttgagcaagacttgaccttatatcccctcaacttaagcagatctgttgacttttcaaaactagatttacataaaagctttagagatacataatcttaggactagatagttgtacattatttcaatatgaaatcaatcaaaattattagaattctcccagaaaactaagtaacataaatagagacctagagtacctcaaggtgtatgtaccaagaagtgtgtacctaaagtgtatttttccttatgcttctttattccttgtatctaatataattaacttaatatttctctgtagagtcactactatatgacaatatcttaaaagaatatgacaagtacttttgttgtagtctttgtataatacttgatgccatgatatctgtaactatagatctgattcctattatcttgcaactcttaggctactttacaacaaataaataaatttccagtaatcagaagaagataatcaggcttatacctatgctagttatatataattataagctttactcagtggtgggggagtagtcttggtagttcagagatggtaaaaaaatacctacctttagaaccaaatatgactgttcctatcatataatataaagttgtactcttgctccatcctgcatcataacaaattactatcacaataaatttacattattaagtcacaactagcagaatgttacactaaaatctagcagaaccaataacaaaatgacaaaatttcatttgagataattcattgctttctattttctatcaacatacatatacatcatacaatttaaatcaatgataattgaatacaaaatattttagaagataaaatttagctaaaaataattcaaaaagtagtgtaccaacctgttttaattatttgacacatagtaatggttgaatttccaaataaaattttgatagtttacacaatagaaacatcatcaataatataaaactccaaaaaaggaatcaccagaaagataaatcaataccttaataatttagccatgcgtatttatgcaaatctacaccaacaattattagagcctacaacacaaatacataaatggtttacttaataaagtatgccaataaaaatcaattaaataaagcctactttcatattgctagctacttgaatgaaaaaaacatataacatagttgtcgtgtcttaatatcaagtggtaaacttaagaattctgcttcaagaaccaatttaattgtttgtccaccttgtaatctctctttctagaaacttatcaacttttaatattattctttcttaacaagatgtagatattttgaccataatttccaagtacaaggaatccaggagcaataacttgaaataaataaataaacattaagttacagaattagtctaatcaaattaaacagcaaattacttgttagcttgagcattctgtactaacttaaaagaaacactataatcaggttatactgatggtcagaaacacaaccatactataagagggattaccaaagatgaccatgataagctataaattaaacaatcatctaaagtaaagtaacatgaaataataaagttaaggacactaattgataatgtaaacatgccaaaaaaattcttttattaatggaaaagtacatacatttatacacccactaaggtggcgtttggttgganntaatgaaatagaatggaatggaaaggaaataattttcattccatt

SEQ ID NO: 163228 - DNA, 1996 bp, Cannabis sativa
gatttgtataaattgcttagtaaatgatatatatatctcaatatgatcgaggggtttttatgtagttttatagtaaaaatctacatatatgcattacgagtttattttatttttttcatattttttgattatagatacaatttgacaaaattttgtctaagttgaaaaattattagtcgtccctgtacattgtgatcactgctatttatagaaatagaataacagttaatttgatcttatctaaacaataattatataacgtgggcattctcctttcatttatcttgtaacaggctggaaataaacatacataactgccttaatttaaaataaatataataaccgttgtttgctaactaggcttttcgatgtgttatggacaagtaagtttatagcaacatttcctttctcgagagtaacactaatggaagatttcatgttaatcataaacttcctcataagtcaccttaaatcttccaaagtgatcactaggctcctcgcaatatattggttcagattataaatcttctaaggtgataatttgaaccaaagtatattccaagaagtaagctttaaatatatgattcttcttctcatacccgataaccttctcttgattacatctatatcactctaatataaaagaaaaataatttttgtttcttttatctgagctgattgattacgagtactttagtagtggtatatcagccaatcaacgtctcaagatgtaaatattaatctcgaattctttattgaacgagccaaacgtaattagctttgtaaattacaaaatttgatacacatgtcatataactaaacctatttatttattgcttaaatatgagtataataatatattatatcattgtgtataaaaaatatgtataatttaagtatgtctcaattattatttatataataataaaacattgctaaatgcaccataatacccaacacactcaactcaaacataagatatattactattttcaaataattcaaattattttaaatataaataaatgagactcaatatttatttaaactacaataataatatagagtgttggacgacagtttaggggtattttagtatttttcataataataatgtacattgggaaatgttaatagcatcagtagtgactaacacaattgttaagatcacatcgctgttagtataattaaatattgggttatacatatatttatttaataatatgtttataaaaaactactgattatttatatggtgccaccttaacaatggtgctctacaccaatactatttaaagtaagagtaccacacataaacttggcacaaacttaaagcacaataatgtgacaagtcactttaacaagtattgcgttcggaaaactaatttgtaattaaaattaattataattcgaagtaattataagatttgaggtgtttgttcaactaaataattatacagtaactatataattgaaatgtctcaattacactctcctataagaattagatgtaattatagattattaccagctttaaataattaatactaataaattatttaattactaacttatttgtcaaacataaaaataagaattcatatgcaaaattactacttaatatctaaacacactttatattttaaactagagtataattattagttactctaatgtgtaattactatacccaagtaattacacatatatatacttccaaaaccaccctaaatataatgaacattgttatgggacaataaaatacctaaatcactatgagctaggtagggatgcacacgggtcagggaattagcggggagtgctctctccgtccccatccccgttaagggttttattccccatccctgcctcatccccgcttatttcccatgggggacggggcagagaatcccctcatggggcggggacggggcgggaaatcccctattgtaaaaataaaatttattttaaaaaattaaatgtataaaattattaa

SEQ ID NO: 163229 - DNA, 2114 bp, Cannabis sativa
aaaaaaacacatttccttttctgaaatgattgttaatattgaaactaagcccccactttgctatcctgccctacatacctcacaaatcagaacagcccatctcccacttgtttgactgaacactcttcaaagcccttttgagttttgatacattaaaaaagtaataatctacccactagtaactatggtgtccttcaaacctaattgaagtgagacgctattaacaatttcgattatgatcattattcttttgatatattgtactttgttgctaatgaagttgatgtttaacaaagtagcaaagggatatgaggaaacgagggcacttgattaggcagctaagacttcagaccaacatgattacactaagtaaatgcttgaacagaaataagggagtggataaacaaagttctgaattgtaattgacaggccaagatgcttttctaaaggttaattcgtgatgttactttacgagctcagctatataataacctacagagaaatcagaaaatttattcaccttcacttgaagccttaggaacttgacgtaatctactatttcatctagcatggcagctctatccgtctgcatgaaaaggaagattttaagcaacgtaaggtgcagaaatgatgctcaataaaacattgctgcagcgacttatccaaatcatctctgaaccatgttttttattcttccagaaggaactcaacaaggacataagaacacacatgaaaacgatctagttccaagtcttgtgaatttaaattttgaccatactgtatgtaatgtttttgcacaaaacaccaaacaaagttcccgcatagagaagagataaagttttatgataattcttaatgtgaaaacaaatgcatactgcaacaataaaaccatatgaggaagtgaaaaaggaaacctgccttgttaacactaggaaccagttcctgcaatgccctgattcgttctgctattctttcgcgtcgcaactggatgaaaaagtgaaaatcaagaaacaaagaaaacgcttacaaaatcatatcactgaacctcaacaacacagttcctttaacttatccataagctgttatccactatcactcttacccgctcagcaatgctgtgtggatcagtagcttggcctcgtctagcccgtacccttggtcgcattgctggtggatgtggtgctacagtagaaggcatcggctggccatgaaagacctgcaaaacaagagcaactattacactatgtcatgtttgtttctttaaattatgttaatgacccatttgctaaatgttcaagaagaaagttgataacagcaaattaggaatatttaattgagtacagaaacaaaagcaatggaagaaccattcatcataattgattttcctataaatctgaaactcattcatttctgcaattataaatccaaaaccccaatggaatctcagacatcaattcttatctaaaccaagaaagccttgtataaaccatataagtttgatttatgaacaaacaaacaaacaaacaagaggtaaggtgagaaaagcaagtaagttcaatactcaaatttgatgacatgcaagtgaataagtttgaaagaaacaaaacatacaaagattgaagttatatgtgatgtaattgaaatacaaacccaaaaagaaatagtaagtattaaggagtaaggaagaggaaaagcaatgaaatgttacatttttaagatgtgaaggtcctctggcactggcagtagcatcaacgaggtcatcacgaaatcgcttgccactcccagatgcctcctcggccttcaaaaaccctgctttgctttgctccaagctcagccccaaagggaacaccgacccaggaaaggcagcagcaccaccaccaccaccaactgaaggcatgtgggaggggccgtcggcggaactgaggtggagcatcatcggaggtggcggtgcgtcggtcggcgttaagttgttatcggctgaagcgaaagatgggtagcccagaatttggtcgaggaaatcgtcgccgggagtgtctgaggggttgttggccattgagtaggaggaggagtatacatctaccgatcatgcaacaatggattggattggattgaat

SEQ ID NO: 163230 - DNA, 3825 bp, Cannabis sativa
  modified_base (3778)..(3787): a, c, t, g, unknown or other
ttctctaggctatattcactaatcaatcctcaatttttctgtgataccatcagaccggtatcaggcctgcatcgggcccgacaaaataaaaccccaaacccagattcttcccaaatcgcattcgacgagaaaaaaaaaaagattcgaagagggttcagtctgtggggtggtgggtttggatcgtggggtggtgagttcggtctgtggggtagtgggttcatcagtcagtggggtggtgggttcatcggtggtcgagtgggaatggttcgttggcggtgggaattcgaaaggggaaagatagagaaaaaggggaggaagagagagagtcaatttagaatgaggggaaaaaattgggttttagtaaaaattatcccattttataaattttgtatatttttaaattataagaccaattttagtccctattatgcatataatttcaaatttccctttaataattctagcttattttctttctcaaagtttgtgtttgttaatttgtatatattctgatcactttattttacttttgtttaaactaatttgtcagtaattagttttataaattaatttccaatattcaatccctgtggagatgatattcgatttatcactttattacttgttaatgattgcgtgcacttgcgtatataattttttacaacagcaaacaaagaaaacaaataaaaatactctgataccatgttgagaatgaaagtgaagaaaagaaaacaaattggaatgaatttcattgattaatgattttgagcaaaagtgttctatatatacaagttgaacaagttcattcaaagaaagtacgtaactaactacagttgcacaaacagaacttgtaacaaattataaagcatagttaattgtacaaaaagatgtaatgttcaattgcacaaaaatatacgtattaattaaattgatatatttatggatttgataaaaaaaatatatatggttttataattatgtaacatttgacatacatatttttgtgcatttaaaacaatgacttgcattgtgtaatataactacactattttcttatttctatatacggcaatagactatatgagtatatggatattaaaaaaaattacattaaattttaaaatttttgcccctaactttaatatgttcaaaattatactccagaatatttcagactgttaaaattttttctcaaactattgtgattgctagatcaaggtcccactttatgtcgtatcccacatggacatgcctacatactaatattgttgtagtgtatatcaacgcactaatacatcgaataaagtttttgttcaaaattttggatttttccataagcactttatctcgttaacttttgcagggcatttggtcaaatgcgccaacaaatgtggcatttaatatagtgaaactatatataattatgactacctaacaaccttatctaacccacaccccacccccaccccccggcgtagaaaattgagctggatagagataccaaactaagtttgtctcttagaatctacgtgtaggtaaggccttagtaaggatgtcagatacttgattgttctagagtgtaaaactagatttgtagacttgagcatagtgaattgattgtcacaccagataataaggattggaaggtttgataaaccaattaagacaataaagattgaagccaaataagtttagtaatggcatttgcaagacttcgatacttagcttcagtactgaatcgagatactgttcttttctttttggagcaccaagaaagcttgtttgagcctagatagaagcaaaaaatagaagtagatctgtgatcatcaagatcgaaggccctatcagcataacaaaaccctgttgaaactagttttaatagggttttaagtgtaatccgtagtccaaaatttctttaagataccttagtatctttttgaccacttttagatgacactcaagcggtttgtccatgaacaaagataccttattgacaacataggctatctctaatctagtgatgataacatattgcaatgccctaactatgccttgatattgatgtagattagcaactgaatcactattgaaggctgataatttttctccaacaatcataggagttggaagagagttcccaaaatatattttggcaccacatagtaggtccattatgtatttcttttgacacaagtgtaagccattatcaagttgctggacttgaattccaaggaaatagtgtatgttgataaggtcttttaataaaaaagatgcattaagatctatgattagagttgaaacaacagctttggaactttctgtaatgacaatatcatccacataaacaaacatatatatatgtggtgtgagagtctgttatccttatgaaaaaggattgatcatctcgagcataaataaatttgaatgtcatgagagcgtatctaggcttatcaaaccaaagctgagagagcttgcctcaagcaatataatgctttttgtaacttgcaaactaaatgaggagagctttgatcaataaaactaggaggttgagttatgaatacctcttcagtttgctctccgttcaagaaagtattgttgacatctaattagcttacttgtcaaccattagataaggcaatagttaggatgacttgaatagtttttggtttgattataggactaaaagtctctatagaatcataatcatattaatgcaaaaatcctttggaaataagccttcctttgtattgagtaataatgtcatcttgattttccttctccctgtagacccatctgtaacttatggcattcctacgaggaggtagaggaacaaggattcaagttttattatcattaagaatagtaatttgaacttgcgtgacttcattacacttgggatcctttagagctactgctatagtcagaggcacctttaaaactatgagaactttaggttatagattccaactttggctcttgcaaccataagatgactattggcagaagcttaaggaatagcttgggctttaggataatttataacttgagtaaaagcatatgcatatggatctaatggcaaagtagagaggtggatgcagaagcttcaatagatggtgaaatggggtgatttgttaatgtggaaccagatatggatgataaggtttcaacaaccaaagctgacatgttgaactgttctttatgattgcaggttggaatagtagcagaaggaccaacaaaaacagtatcatttgtgacattagtagaattagatagagttgcaaaaggaaaattgaattcgttgaaagcaaaatctcttgaaatgtaaattctgctagaagaagaaagacatttgtaatccttatattaaaattgtagcctaggaaagtacacttttcaaacctaaactcaactttatgtttgtcataaggcttggtattaggaaaactagcacatccaaagacttttaaagtagcatagtcaggatatttgaggaaccagtttctgtaagggagtgtcattttgaataacttgtgttggaagtgtgtttatgacataacaggttgttctaatagcctcatcccaatgagataggggcatggaagcctaggcaagaagggtcaggtcaattttaattaagtgtctgtgtttctttcagcaattccattttgtttgtgagtggtgggacaagacaacctatgattaataccatgcttaatcaaataaggttctaaggctttgtactctcccacaatcagatgttgggctttgtgccctaaannnnnnnnnntttcaatgtaatctttatcatttaattatcaataaaga

SEQ ID NO: 163231 - DNA, 2755 bp, Cannabis sativa
gcagccgtctccaagttttccacctctttcttaagtacctgctagtcaccacagtctgtcttcttggagtcaagagtctcatgcagaaccttcttctccttgttctaactggaaagaaggatgcaaaggttttctctcttgttcttaggagtgttgaaatccttagctagaccctcattctccaccttgagctgaggagtggcggcataacattaatctcctttctctagtttacaacgagcttgttggtagctagaacctttttgtcaacctaacacaattgaatgcttttctgctcaacctccttcttagcttcctccacctcctttttcaagttcttgttggtggtggtagttttcagagtcgcatactcagctcgggagtatgtgtatgccatcttcaaattgatctacacaataaagtaaaattaaagccagcacggtgaaaagcatgtggaagaaaaccaaaagaaaaaatacttacttgggtacaacacaaaaagggcggacaagtatttaatgcccataggtgtgagttggatcaaactgatggaatggagacattaaaacctctttggacctgaccacgcttagtaaccctcttcggtgtctgttgccaactgctcagaagagggaaggaagcattcaaattgcccaaggaggccttgctccaagagattggacaatcacttgaaagccagaacggttggtggagaaacccatcaaactttcatcagaccccttcttttaatgaggcgagcctcagtatactcctcctctatgtagtccttcccagctttgaagacttctcctgcctcagagacaattttcccttctcatttaagccaccaaagggaagtactcgagcagccccctcttcttctaccccttcaccctcagccacaagaggagtagtatgacatctccactaataatctcctggtacttaacttcctcaagttgaacatctccactaataatctcctcttccttgaccgtaggtcatgcttgttctgctctagccgcaatatacaatcgagcaataagggggtcaaaggatgaaggctttctagtagtgtgctttgttcgtgcaataattttatgcctggatggaattttgttagtggtgtgcctcttaacagtcactacaaactctcaagtagggttcccttttgtagtttgggttgtatggccctcgggaaaagtgtcaaaaacactaaaatttaccttgtatgtctagtaccaaggtagataatgcatgtgacctttcttcagttcccagatgaaacaactatatccctcatatgtatctggttaggataccaatgattttgcacctcgagctcggggaaagggtgtatttgctgctcacttgcaagtcttcaaagttggaattccaaagatcatcactatagaaagttatgttggcatggagacaggaatgatcttcgtataaaattcggagaatatgatgcttgcctccctagaaatcccaagatcatctacaaaaggtgggagaaaagaggataagagttggtcctgtaacaaatggaaaaaagatcttataggctgaccaagcagaattaagaatgtaaagaaaaggtttcacctagcattggaattctcaatcctagaagttcaaaactttagttggaacctggtatttagtagaacattatgattgagtgggaatgaataatttatgataaaaatcatggcggaatgagataattaaacataataattaaagattggttaaaattccaaaccctagaataaatattttacaattagccaagaacaattctggaaaagaaagagtctatagcaaagaatccagaaataatgcatacattcaattgcaatcatctaaaagcaagggataaatgacttactaactgattcaaagctttcttgatttgctcagatggtattgtacgaggctttccattgagttctttgaagaatctgagggaaaagttagaaatttttgagtatgaaaatggatcaattgattacataaagctttaatattcttttataagaaaatagaaaagggaaaaatcattttttgaaaattcgaatatttgagtttcctcacaaaagtgaatgttaggactcattacaacatgtacaaccatcacacatgcagtcacccaaccatcaatctgtgatatgagatacaaaaggctcaatttccatcggtcaacgcgtctcaccaaaatggttgattgatgcaaaaaaatggagattttatgcttcagagtataactgaagataaaaaattacaaattatcgtcatttgatacaccaatgctaaaagaagaaccgaggaaaaaagtaacaatttttttaaattgtcttttacattttgcttcggtggaaaagtgacgtcaatcatttttgcttcggttgaaaacagaggttagaccgtttgccacggtactccaccgaagcaaaagggtttatatttcacaaaaacttcaatttctacaaaaagtatttcatttcgtctcttccccccatttcaaaaccctagtagacaaccgctctcgagaagtggtccccttcttccttgctttgaaagactgccgcccacccaccgtccctctttattgcgtcgtccaccacccttctctattatgtcgtccatatctacctttcctctctctttctctcggtacgtagctctctttctccgtcatctgaaatagtctaattttcttttctttacaatttcgcctttacttagtgaa

SEQ ID NO: 163232 - DNA, 1297 bp, Cannabis sativa
aaaatacatcatatatgttatttagtctaagtgtattattatgaatcataattaggaaaattcactctatgagatgagacattggtttttttggactctctcatgtgggtttaatttatatgtcaaatatatgtaagatttttccctttttcttttcatacatattttgtttattgtatgattataatgcaaaactatgtagctttttgtttattctggtgttagtaattatatataatatatgtgcaaatgtcatcattaatagtcttccattacataaaaatttactttgagaaaatttgaggttatatcattacacataatcacaaaacatcttttgtgcttacaactcttcttacaaaagaagaagttctcagttctttccaccaaaaaaaaaaaaaaaccttcattgaaaaataggcctcctctttaattagtactaatcttgtaaaacttttattttagacttacattaattttttaaatattttattaaaatatgagttgataaatagttaattatctacaattaataggcttggcatgaaaatgataggttttttttttaaggtatggatttctatagactttctagggtcattttagcacaggtgtgctgtaggaaaaacaaatatagctgtactgtgagaaaaaaaacagttatagtagaattgtgcaaaaatattgagtttgatgtttggtgaattataaattttaaagtgccattactgagctttagaggcggtcttttagggccttcaacattggttttagcgaaactcgctaccgacattgttctaggtaacaccgtagggagaagcattaaccaacgatagaaggagaccctatgtcgtcgattattatgaaataaccgacgacatatggggttatttgtagaatgacgcctttatagcattggttattcactaataacctacgacgtagtgttttatggcgttggttattagcaaataatcgacaacataagaattttatataactaaatattttttttttattttcacatatttatttttgttttttttattaatttatttaacttaaatattaatttcatacaattaacaattaaattaaccatataattaaatgtatatatatacattattctaggtaaatatattacataaatattttaaaactaattcaaatatttacaagttattatctaactaaacaaagaaatataagggtgttgaccgagtttttcggcaactaattaaatattataagtttatagagctgtaagaaatttagagaaggatttttacgtggt

SEQ ID NO: 163233 - DNA, 1141 bp, Cannabis sativa
atataaatatgtgtacctgaggctccaaatggccaaattatcttctcctcggctttggctaacaaatttcccgccagcccatttctcagatttgttataaggtgtaacccaaatgttgtaatttgtaaaaggagctcgaatttgcgggtaatcgtcacttgttaaaagaggaattgtagctgagccaggcattaaacgataaccgatttcatttcccactttggtttttatgttaggatttaccactgcaaactctgatggccttaaacccacattcaatcttgcttccaattcagttttggcagtttttttagtgatagtccaataacttttccttggtgagctgtgatcgctcactcttttggtcactaaatcggtcttcacaaaggagttttcttgaccatccacgtcaagatctaggtaataatttaagaaatggtcatggtgtgtggcaattgtgttttctgctagtagtgcaccataaaggtcttcttttatttgatctacatgggtgtgtggaactccctttgtagctaatactccagtaagtccaacctgtctcacaaaccaataataataatatatataagtccttgatcaaagatataatattatttaaaagagtgtaatatataaatattatgtacacaggttaatattataccatttggtggaatagaaatgattgttattggaaatgtaaagtataatataaccagtgaactcgtgtgtacgctcagtgcatgaaatatattgtcaaacatagaattaatgtaattattagtaaagagaagattaaactttgctgttagaatgtacgtaattgttttggaggaatataaactttgctgattcataaaaagaaatatgtatgtatatatatatatttatatatcaacaagagaatgagaagagccattgtattggaacataccccaactttaatggatccactaggcttgaattcccaatcattaatgtagtcataattacccaccgttgaaaccattctcaccactaggctcacatcttgcctcacttcccttacctgagatttacatataaatttattaaatacaaaacaaatatttatatatagagtagaacctctatccaagaatacacttgggaccaagtaaat

SEQ ID NO: 163234 - DNA, 1870 bp, Cannabis sativa
aacaataataataaaattattgtggcattaactcaaagccagtgaaaactaaataattgatacttctgtggggacagaaaattttgtattcaccacatctgcatcaatgttagtcatttttattggtgtagtcactaatcattagccttattgttagatggtgttagtcactaagaaattgaaatttaaggcacaattagaaagccaagaatgaattagaattgagtgtaattagatggtgtttatttaatcacataattatattgtaattgcaaattataagtaatggaaaactttgaatgacactatcaatcgggctttgctagctaaactagcttggcagctggcttcttctaatcctaacccgtggagtatttgtttgctccaaaaatactgctcgagaacctcatttttggaagtttctatgaagaacttagactcgtatggatggtagaacatactcgaagctaggaaggtgacccaaaagggttgccttactctgattggtaaggatgcaccaaccgtggattccttggttaaattttgtggaatttagtaaccttatggagagctgtcggatccgatatcctctgctgaaaacaatagctgatttatcaaataacaacacatgggatcatgaccttacttgtaatgtttttggtgaggagattggctctgaaataactaaaattccccggcttccattagaggaaaatgattgcctaatatggaagaacaatggtgcaggtttattctcagtcaaggaagcgtatctcaccgatcaaggaatcaggtttgaagctcaaagagatatctggagatggatttggaaaccggatatccatcctagaattagtatgaccttatggagggccattcaagacatccttcctactagagacaagcttcattttgcaacgaataaggattagaatctgctttgcatctttttcgggactgtccaattgctcgggcagcttggttcgcaggtaagtttggtttgcacagctcctttatccttggtgagtccctaaaagagtttattgtaaatatttgcttgatgtttaaccatgcgaatagagctgatgtgctaatctgggccgactgcttgtttttagagatttggtctcatcgaaatagttgctatcttaagggaacgattgtcaatggtgagggcattgttgactcaatatattgaagattcattgaattctgcaacagcaaggatgattcttctcgggaggaagctgtaattcatctgcggcttgcccttaagcctcatcaaccaaaactaggggaccataccttcaatattgatgcttcttggaagaacggtattgcaggcttgcatgctgtttggagtaacaaaacctcaaactcctagatttgtaaagctgatcaatgtgttgctatctctgcattggatggagaggctcactcatgcccttctcatggtgctttcctgcgcaaaggagaatgacctccacaatattactattctctcagactatgattttggtgaatgttgtttttaacaaaagtcgtattctggattggcgactatggaatgttaccctctcaattctgtagttagttggttaatgaattttatacttgtaatctgtttttcattagtcgattagataatgtaattgctgatggtatagctagaagtgctagagaatctagccttaatactagtgttatccaaagggagggacccccctctcgttcccattttctctaccctttagagtgtgtttggaagtaaccgtgtaattactaaataggatacttattaaggtggtaattacactatattttaaaattcaagatgtgtttggatatgaggtggtaattacatatgaat

SEQ ID NO: 163235 - DNA, 2122 bp, Cannabis sativa
ctctgttttatgtgcagaccatggtgaagggtgccttttagatacctgagaacacgtttagcagcattccagtgacttgttgtggggcatttgaggaactgacttagcttattcactgcaaaagctatgtcgggtctagtatgtgtgagatactacatagctcctattagacttctataagctgttggcttgtccaagacttgaccgtatgtgatagatagaggctttccagcagtcataggtgtgggacaaggtttcaagttcagcatgttcatcttctcaagcagctctgtgatgtattttccttggctaagatacattccagtggagtccctatatacctcaattccaagaaagtaattaagatttccaagatctttcaatgagaaagtgttgttcagttttcctatgaagttctcaagttcaatcaagttgttgccagtcactataatatcgtccacgtatataagtgccatgatcacaaaccgagaagttttcaacatgaaaaacgaggtatctgcctttgagttctcaaagttccaactgattagagtgtttttaagctgttcaaaccaagcccttggtgcttgttttagcacgtaaagagatttcttcagtttacacacataatcaagtttgtccttgtccacgaacccttgtggttgagccatgtacaccgcctcttcaagttcttcgtttaagaaagcgttgttgatatcaatttgtcttactatccacccctttgaaactgctacggataagacaactctgattgtagaaggcttaattacaggactgaaagtttcaccaaagtcaagtccaggccttcggtgaaacccctttgcaacaagcctcgccttgagtctttgaagagatccatcagcattgtatttctctttaaagacccacttgtttccaaccacattgtattctggtgaaggtttcactaagatccatgtcttgtttttaatgagagcatagaattcttcactcattgctctattccagccactgtgacgaagagcttcaaggacagatgtgggttcaccattcttgaaattccactgagcttgaccaacatagactctaggcttatgaactccagctttcgaccgagttaccattggatgaacattttgaacttgtacatgttcttggttttgagttgctgaagtctcctgtgagagtgtaagagtatcttgctgttttggctgattctgtgctgagaaatcgtgttcagtgaaattaagatcaacaaaaggattatgagtgagatctacctgatttttgtctacagcaatatctggtgatgcagcaggttcacttgcatcatgatttgtatcagtatgtgtgtaaatttcaggtgagtgagtttcggattgggtaatgtgttcacactgagcagtaatatttgtgttgacatgtgactcactttctggttgaataacaggtaaataagtccaggtatggggagattgaacttcgactgttgtctctttttggtgagtatttaagaaacctgttttacaagggaactcctcttcattgaaaacaacatctcttgagatatacaacctccctgttgaactaaggcatttatagcctttgtgactctcactataaccaaggttaacacacttggtagagtgaaattgaaacttatgattttggtatggccttagacatggaaaacaagctactccaaagacttttaaaaatttataatctggttgtttcgaatgaacaatttcaaagggtgttttgccactcaacacaggtgtaggaagtctgttaataagataaagtgcagtttgaaaagcatccacccaatatttgagaggtaagcttgcttgtgcaagaagagttagacccatctcaactatatgtctgtgctttctctcagcacgcccattttgttcagatgtgtgagggcaaggatgagtgaatagaataccactttcttgaaccaactcactaaaggattggtattcaccaccccagtcagtgtgcagtctcttcgtattttgcttgtgctaaatattttccgattatactcgaaatcttctaattattaagaacttaattggatttattgttttatcaatggtcttggatcaaaatc

SEQ ID NO: 163236 - DNA, 1419 bp, Cannabis sativa
ttgcaaatttgtaggcttaaaagcttataaaaatgaaaatttctcaaaattgtattccaccgtaggcagcctactcctctttagtcccaggcccagttaagctcccctactaacaagcccaagcccaagcccaagcccaagttttatcctagaccctatacattatgtgtatatatatatatcatatatgttctttcactttcatggggtttcatttcaactgctgcctcttcaactttggcagatctctttttatatctttctaaatgtaatacaatccaataatcatctctgtttatgttctctctcctaaacaatgaaatcatcaaactgagatgattaacattatatgaaagaaaaactaaacaaaacagatcacatcagatccttatgtgataattatcatcatttttatttatttattttctatgctcttctgtaaagaaaaattcaattgttattattattattattttctcaatgtttttttaattaggtcatatcataatttactttattttatttgaccaagaaatatttaaaaggaattttgaatggttttatttagttttgttatcttgggaataaattttgaataatgaaatgaatggtttcatccatattagattattaaagcttttcaatctcattattagttactaaggaggagatttgttcatgtaaaatggagtctcccaccacaccccaaaacaatttattgagacttttaattaagatggtaattgagtcagaattcttgtgattagagatgttaattttggttgaatttttcattatgtgttaattaattatcaacacaaaattactaaggttgtgttaacctaaaaattagtaactagttatatattcagtacctagctaatggctactcgctactcaaggaattaatttaatcaaaaacataaagctggtaagatcatggatattgatttactaaactgaaaaaagaactaaattaattagattagtaactaattcctcacaagttactaacttgaaaaaacttgtaatgtcattaatggttgaaaaattgtaggggaataagaaaattaaagtagaatataagttttaaaatatgtgtaagatacaaaaatagtaatcactaaccaaacaccacataataatcaagatgcttagtttgaggaagagttaagtgtttacccaaattttaacgacgatgacgtgtcaagagtagcaacacgtggcacgaaaatatcgggattaaattaatgaagaatatgtaaagtcatgattgttgggatgaccttaaccatgaaaggtgttcatgaacgttaaaatagaagtcagacggtcactcttacccctagcttgagcagtggcggaaccagacaaaaacccgaggaggggccaaataggaaggtcaagcgaattgtattt

SEQ ID NO: 163237 - DNA, 936 bp, Cannabis sativa
  modified_base (872)..(874): a, c, t, g, unknown or other
aaaaaaaaaaaaaaaactatactagacaagttggttggtttcgtaagcttttggctgtttggtattttttatatattaaattcataaaataattcatgtatgcttgaatatattaaattcatatatatacttgaatttattaaattgaagaaagtagttaatacgtaactttcgcgccgaatatttattttaaataaacacgtacgtatttgattatataatatttaaaaatctatgacaaagtgatccatttccatttaattaataacaaattaataacaagtaattgattagataacttaatacactacaagaatttgttttgcaggcgtatttttgcgtctataaaacttctctaatgcgcctacaattgtttcaaagacgcaaaaaatttcttcctcgcgcgtctacaattactcgactgggaaatattttactggcgcattaaagcatctccaatagtaaaatttggttactgaaagagtttttactagggcattagacgatctcttcctacaaaaacagcaagtaaccaaaaattactatttccaaaaaacaaagggtacttcaaacttttagcttaaacatgagaataagaagcactagcaatcgttctttgtttaccatgtgagtaacatcaaaagcaagaagctatatttagcgatccatacagatctcgtcatctcttgttatatatccatacaaaatgccaggttacacactaaaatatcatggcaataaaactcaagcaataaccgaacacattgtaagattcaaaatagtgttcaaaaataaaaattgttagaaaccaagtacccacatctaaaactgactgtaacgcctcaatattttgccttattttacaaagtgcnnnttttgatgcattaattaaaaagattcaaagttgtttgaaaatacacagtgagttttacaata

SEQ ID NO: 163238 - DNA, 4450 bp, Cannabis sativa
taatttagaactcactttttgaataaggtatttaaactgagagctttcggacctaccaatacattgtggaacacctaagtacttactcacaaaaagtttctcatccagacccaaattagtgtaaaaatattcagaatcaacaggactggtattaggagaaaaaaagaacagaagacttggaaaaattaacaagctgggcagtagctttatgatatagatcaagagcatgtttaacagctaaacaagaacgagcagaggttgttgaaaaaagcagactatcatcagcaaagagaagatgagagacagaagtggcagatcaacaaaaagatataccacgaaaattattaatagattcctggtatcgaatggcagctgaaagaccttcagaaacaagcaaaaaaatataaggagaaagaggatctccttgtctaattcctcggttagacttaaaacaatcagacataaccccattaacaagtaacctaaaagaagcagtagagatacatttaataaccagagaaacaaaattaacagggaaatgacaatgaagcataattgcctgcacaaaattccattccacacgatcaaaagccttttccatatctaatataattgtagcccaaccatctttaccagattttctatgacatatagcattaaccaattcattagcaataaaaatattatcaaaaatgactctaaagcactttgattcggagaaataatattattgagaacactcttcaacctattagctaagaccttagacacaactttataaagagtagagcaaagactaataggcctaaaatccctaactttattagcattctttttcttcggaattacaactattatagtctcattaattaatgcgagatcaacattattattcaaaatagaaagcacagcagcacacaaatccgaacccaaaacagaccaatttctttgataaaataaagtattcataccatcaatgccaggagatttatccctagacaactaaaagagagcatctataacttcattagcagtaaaagcctcctcaagcatctgaaaagaagagacatcaattcgagtactaacacagctaagaatttgctcaatagcctcaatactagtaccctgggactcaaaaagatttttataaaatttaagaaattgagtactaatatcagcagtgcttacaatagaggaaccattatcaagagcgagacaacaaataaagttgtttcgagttctagaggatgccttagtatgaaaatatttagtattcttgtccctagcttttaaccaattaatcctagaacgttgtttccaaaaaaacctcctctttataaagcaaagaatcaatatgagattgaatatgctgagcctcccgaatatctttatccaagataggagacttggaataaatgctatcaagactagattgaagatgattaatatctctcataaagttatttctattaatgctccaatttttaatagaggtaacacaaaaagactgtttagagagaaaagattaaagatggtcagaaaaaatatgggaagaagcatccttccaacccaaccgaacaatatccccaaaatcaggctcagcaaaccaaaaattttcacacataaacctcttgtttctaggtacactaaaagaaggatccttaaaacacttttaaagctctatggtcagaaccataaaaccctaagtgatgtaaggtcacttgcagaaaaagatttaaccatttttgattaacaatgcaccaatcaaggcgctcaaaagacataccatgcttccaagtatatttattacctaaatagggcaaaggaattaaattaaaggtggtaataaaattttgaaaattaatcatagcataatgaggagggttattaagattagatctatcattgggagaaagataatcattgaagtcaccaaaaataagccaaggcaacaaaggtgcaacatcataaagcctatttaaaagagtccaagtatgcgatttagcagaaacataaggagaaccataataacaggaaatatgccaacttatattatcattcatattatcataacagtctatatgattagaagagtagttatttataattaaatcaacaacaacattccaaaagagcaacaaaccccttctaaaccagttctaggcacctcaaaagcattctcaaaattaagcctagacttaaggaaagaactagagccagcccctagtttagtttccataacaaaaagaaaacaaggtctatgctgcttgatcaaaagggagagatttcggaatccctggggactccccaaaccttgagcattccaacacataaaattcatttttctgggcagggttgctcagcaacacccgccggtacaacttgatcttcatcatcattaggaacaacaacttcattatcactagcacgagccctcttcaaaatactcctgactgaagtgccactagacacttcttgacgagtgtatgatctctttgtccctgaactaccaccaatagtaagaggccttggtggaaaaacagggacatgagcaatcgggacagaaacaataagtagttgaaccccttttcctttatccgtatgaacaatggtaggagcttcagacaacataacttgagaaaccacacagagaaggctttgaaaactactaaccatagtggaggagacaacagagttctcagcagaggttgaaataggagatgtagtaacaggaatatcaattctaggctgaacatccacatgtccttgaactccagaaaagcttcccgaaagaagaaattgattgacagcttcttacaagtcctggttatgctgtgaggatctaagattcatttcttcaaatgggatggagtttgacatatcaaacgggtcccttttaaagaacgatttaggcaaagctcttatattatccttgaaaggaagtgtcggaggcatacgtccttcatcacaggacttaagaaacctcccacacttagaaaagacatgcttaaatctcccacataaataacagtaattttgtaacccttcaagcttaaagttaagccacttagtggtgcctaattttctaaaaaagacttgcatacccctacggattggtttcgtgatgtcaaggaggacacagatgcgaagaaagggtcctgagatttctaaaagagttgttttatgaatctcaattagatctcctatatatttagcaacgaactgagcaagatggggagacctaaaaccaaaaggaatagagtgaatttgaacccagaagggaacaaagcggagctgatcaggctgaagaatgccaagtccttctggattagcaaagaccataaggcaatggtcaaagtgccaaggttgcccttatatgaccctacgcctatctccatcacacccaaaatgagctagaaaagattcgaatgatacttagtgaagttgatgggaaatctaagagtccaagcctccctcatagccttgtcaagccaatcaggtttgagagatttctgggtaagaattttaaccacaaggcagcaagaatcctccatgacattagaccctaaagagaccccatcaaaatcacgaactaaagcttcctcatcatttagagcaagatggtgaggagagctatgaacagaatgacccatgaaaatgaaagcaagagaagtaaaagcagtagagagaaagagaaacacagagaaaatatagacaacgaagcataaaacaacaaaacaacgagaaggaatagatatcgcatttaggagatagggaatatatatagaatcataagtggtatacctgagaatggagatctcatgcagatagtgaacagaagccaaatctccctccacattaatgacctcctagcgtgatccctcgagagaagaggtaatgatcacaaataacccctattttcctatagcgatggcggactgaaagagaagacaaaaggagggtgaactgaagccaaatattttttgatgcaatattaaatgctcatagaaacaacaaatccataataaatgcattaaatgcctatcgtagtgagtaatgatgagaaaattttaattaattagaaaattagaagaaaatgaaataaaatgggaataggaagcatcacaacggatgagggactggaaagatccagagaaagaggaataaaccctaagagagtgttccattgatgtttagttgtttgctattagaaggaaaaagaatatcataacacagacatagtattgtttatatctttccttttttattttttattattattttattataaatttaaaaaatttgtttatttaatatatattaaataataatatatattattttaatttataacctctataagtgagaataattttaggcttttactatataaattacacaattaactttcattaaatattaaattacaaactctttttttttttttttt

SEQ ID NO: 163239 - DNA, 2383 bp, Cannabis sativa
tctttcattttttttcttcttccaaaatcactttttgaattttttattttttacttcattcaatatttaaatcaaaattatagatttttattgttattaatatttgtacattttttttatgagttccatttttcaagttcgctatctaattttcttttattataaataataaactaatttatttttctttaatgaattgatgaatataattatatttaaattattatgagttcgtttagtaggcagtataaatattgttttatattaaataataaataatattatgtttagataaaacaacatattatattaattattatgataaaattttttaatacaatataagttgtattatttaatagataataaatggtatgtgctagcttgtgttatagtatttacaaaagatttactggactttggacccgggacttaaaacctggactcatactcaaacccaagacccggaccgggaaatggacccgaaacctaaactaggactcggacctaaaccttagacccaacccgcagtcggtgtttgggtcgagtttattaaaaatatgttataactttacacaatctattatattaaataatattaatacaatacaatctaacacaatacaattcaatacaataagtttttttctttattattattataagtgaaaataatccaagaattttaacattgaaagatggttagttggttaccctcactaccagtcccaaaccaatccccataattaaggtctttatgctattttaaggagtttgtggcaaaagactgtatctaaatcaaaagaataggggtcaaaataggataatactatagtgaaaggactattgagaaaactatataagtagaatatatttgcatcagacgcagaaaaaggttgaactgggaatcatcacactctgtttcagtgtttctgaaaattagggtttaaggaaagagatgaagcaagtggtgggaatggtggtctccaacaagatgcagaaatcggtggttgtggccgtcgataggctcttctatcacaagctttacaatcgctacatcaagcgcacatccaaattcatggcccacgacgaacaagatcaatgcaacatcggcgatcgagtatgccttcttcttgcatctctatctgaatctctctttatatatatgtgtgtattgaaaggctttcgattcaattttcaggtgagattggatccttcgagacctataagcaaacggaagaattggattgtggctgaaattctcaagaaagcacgcatttatgtcccaccatctgctgctgattctaccaaaattaatgctcaacaatcgccttcttcttctgctgctgctacttcgtcctcctgaggtttaaggttataatgcctcaacttaaaaccctaatgttttttgtgcaaaacttcatttttaagttatatcaattttgggatttgattagaatatctattttggtgattaaggaaataatttggaagattctgtagctcttatatgaaattgtaagactagcttgataattcaactgaagatgttaactgtttgatacttgttccatgaaatagtatcaaattgcaatcctttactaatgggtttctatttactattagggcagctgaaagtttgtgctaaaagcctaaaacattatgaaaagtttggatttttagataggagaagaaggtcctcaagaattgctttttcaacatgctctgagttaaggtttgatacatatattgttgttggttttttggaagttcaagaatgctacttctcttgttttggatcttttcatttgtaaggatggatggtcttttcatgtactaaatctttataaaaacaagagatttgtattcctcactactcactagtgcataagctttaattggagttgttctacatttctttatttctttcattgcttttgtttcatcatttgacaggattgccaacaaagaaggccatggaaaagcttttttctatgagaatctgtatctatatgtgtatattggtgaaggtgctttggtgaatagttagttaaaagatgtgttctacattttttttgagttaacaatgatgagggatttttacttcagtatggtagccaatcgagtttttaatacaatttcattcactagtaattcttaaatttaaaaaccaaaacaagcgtttttgaaacaccgtttccaaattgcaaatcaatctactccgtacgggcctgttttgtttgttaatgtaattttagaatagcatttaatttaaaatgagtaattattaagaaaaacaaaacaaaaaatgatttgtctggtaattttttgggggctttttcatatttatattttaaaacaattttttttacatttttacgaa

SEQ ID NO: 163240 - DNA, 1234 bp, Cannabis sativa
tttagcatttctccaaaattatatataataagaagagttctgatttaacaaataatataaaaaacccacaaactattttataggcacaaaagagtaattcatcaaaaagtggtcacaagtgagatgaggtaaaagatataggaaataaaattgagataattacacaaaggattattttttgtaaaaaatttataattttaagttcaaatactttttttttatatatttttacggtgttatataaaaataacattaaaacaaaaataaaaaataacatacaaataacaaaaaatttacaacaaaataacaaaagtacaatatgaaaatacatcaaaatacagtattttttgtaaataaaatcataaaaattataaaaatgtttaaaattatgtacaaccatatttgtataatttttttttttgttatttttgtatatttatgaaatattctcaataaaatctgtgagaaatacaaggcattgttgccaacaaaataagtttaattgaaatatgtggtgcttgcattgtagatggcctaaagtgtcatctcttttggtattaagacatcttaaattgtccttaaaaagtagtagctcttttgggtaggatgttggctacttgacaagagtgtctttttagatttattatctttggtctcaattctcaacattagagagtctttcaaaagacatgatctttgttcatatgatctctttatttgggaaaattattaatgaatgtaaacaactcatgttagagttgggtcatgttagtgtttttttcgttaaacgatcaacaaatgttgtagctcataattttgctagagcttctcactttcattatggttgtatcttcagtttggagaatgttccaatcgatttgttaccttatttggtaacggagtttgatggttaataaaatttaattttccattaaaaaaaaaaaaatacatgaaccaattgaaagttaccttttttacattgaagttttctttgtctaattttttaaaaacgtacttcgtgtcaatcacaattttaatattgagactcacaaattggttaacttttaattacatgcaataaagtaaaataatattttcggtaaatattttacatttttaagttgaaatatatattctaatatttttacgatgttctataaaaacaacaagaaaataataagaaaaccacatgaatgtagtaggaaaacaacataaaaataatatataaataaca

SEQ ID NO: 163241 - DNA, 1955 bp, Cannabis sativa
aaacaaactcctaaacatctgaagttacaaatagtttctcaacatacaagagattgcatgatttatttttccacatgcaaaataaaagcaactgaaagaaattaatttccttcttccaaaaaaatactaaagaaatcacaaactcccataatatatccatgtaattccattaaaataactttgcatatagaaagtacactgtcataattaaaatgatcatgaagaaacggctttgagaaactcctcatcagcttcaagcttagtcatctgttccttggtcaatgcaatatacacttcaattccatccccagatttactatccataaaagctaccacattaggatgacacagtgtggctgagctaacccacactggattaccccacccaaaatcagcttcataaataggatacctacacaaactagtgaagcttaaagatatgtactgtcctcctctcatcattattcctccaccataaccaagcaataaatccatgtacacatcttctccctttttaactttatccaaatactccatatccaacttttctataccttctctaattcgcttcaccaactcaaaacctttctcttttcctgaacttaagattgcaatgctacaccgactaatatttccaaaggaatattcagatagttgcggctcaagccttgttcgaatattcgctgcgtgaatcattgcgaatcctttctcagttccctccaataattcgtcgttgatcgcagccatataacgattccatatgaaagctgatagggactcgattctcgaggctcgttttgatggagaggattggtcattgcaattgtgttttgatctaatatcctcaatcacatcggccttgagtagaaacctctttgaggagatatcttttgtgaccccaacagttaagtcaaacacgggttcaacttttggaggaaagagggttgaggcaatgaactcaggatgaggaacttgattgccttcgccacgagcaaaggcaacccaagttttggcaaataagatgcaagacaatgcatctgcgagcttatgcgaaatgcataagctcacagcaattccaccgcattggaagatgttgagttggacaccaaggagaatttccgtgatgggaaagagttgaaaaggaaggaagttgcatatttcattgaggtttggattattgagtgtgtcggaaagacgactcggggtggtgactcgggcaaccgagtaggaaactccctggtcattacagtcgacgaattgatcatctatgattcggccagctaaagggtaataaagggttaagacctctgataaagaagtcttaatcttgttggatattttagtaaaatcatgatcgtagtcttctaaagggtagtagaagactaaaggactgtaggttttgggacatgattggtcgagaaatgatagttggtaatgtcgaagatggtgtggtgttggagaagatggtttcacaatttctttggaaattacttcaacttcgaacttcatttttctttcactttttttttatttcttttgatgagtaattcaacattggttaactttaatttatatatacagcattacagctccaaccaagttgtagatatgttaattggtatttttttttaattggaatattatatatagacatagcttttatcttcaacatacattgttattgagtaatgtgacaaacattttgtaacataaggacgtaatttatttgctggtggcatctttctacggcattatcaattagctaacacgagctttttatttattattttaaaacattacaagaaattaatgtaagatttaaagcttcccgcataccgaatcaagatctggtttaacacagtatagacaccaatttttaataggaaatcttgattcccgcatatcgatatatatatattaaaagtggctatctaacgacaatttttggtttaacg

SEQ ID NO: 163242 - DNA, 2394 bp, Cannabis sativa
tttttttaaaaattcccccccccccccaattcaactttacatttgtgtgagattaactaaatgatgtgaactaagcccgtttatcttaaaattaccaggtgggcatcaattttaaaaatcttggaattttttttttttttttgatttttcaagcactccaattgagagtaggatttcaaaatttcattccctgttgagtagaaggatttaaaatttcaagttgatgaccctttgagtgattttctttgatttgagatacttcttaaatgtgtcaacattggactgtcaacactttctctaatctttggctcttgttttagtaatgactctattgtcatactgttcttttatgtgaatattgatgtattctttgtcttctgctaggttgtagccttgaagttatttagctttccctcaactatgttttagtgaaggtagtcttgttcatctccttggtttggtagtagaggacgccttcatcaactccttagctttacagcgtaggaggccttcaacatccttgtagctttacagtagacgaggcctttaacatcccctcaactttgtagtggaggaggccttcaacatcccctcggcattgtagcagaggaggtattcattatctcttaagctttacagtggaggagatcttcttgacgattgtcaacaatgtgttattggagtcgctggatattctttggtcaattaaggatgtgactaactctcaaggtaatgtacccaagatggagtgatgtcttcctcatcttgggtgaaccatagagtgattgtaggtgcaatctctattttttccttggtcttaaaccttaaagctcttcattgtcccttctgttgtattcacaacagaaggggccttctacatccccttggttatcttacgaatgaaagaggtcatccacttccccttagctataatcatagcaaaggaggccttcctcatcccctcggaacaattgaggaggtcctattggcgaatatcaaagatgtgttgtaacacttgcattcaactctttggttgccaaggagacaatctataccagctgatgtcgagaagttgccagaaatgtggtagataagtgagatggcttggaggttgttggttcttgaccttccaaggagacttggtgtgaatcactataaaggtagtcatagtgatgtttgtcatggggtagtttcgactattattggtaatctagttttaccatgaggagcaatgtcagctcgcatgaaaacatacatgacctacttgcatggcttaagatctcttagggagtgacccactcttttcaaggtctattttgttagaacattgggtgatgcataactattaattattacctttagtgccatgatgtttgaaatttcattgaccctatctaagcttgactgctcttggcccccaacattgatctctttgtgactagggtgaaaaacttggaagtttgtgtgttaaagctatctattgtgagtgagataaactattgttgaggtgtagtgggttattgcctatgtgattggtgcttaagcatgagctcacttcatgatcataagtgagatgaatcactgtcgataagtagtgtagaaaaaccctccagatcttctatataggggaaaagcacttgtttttaaagaacctggtttgatgattttgatacgtagaaaggaaaaactccaagggaggaaaaataaaaaagaaagattgggttaaacccttgagaagtacaacatcccatacttaggaggagcttagccactaaaagaataccacaactggggcagcatcccactcttagagggtttccttcaatcaattagaaaatcccttctagatccagcgtcctacttctagagagctttctataattgatgatgctttttttttgtgattcgagtaggaacacttgcaccaacactttagatttataaactcggtcgttatgttcttgttagacctcaagagtttatatcataatagttcttaactttgttgtgcaaatagtttgtacgtgcggttattcaacttaatgaacttactagcactcgcaatagcacttcaggattaagaaactcaattactagggataacgtcaacattttattaaactatagaaatactaaccaaggtgtgtgaattgccactacaacccatggctcttgtataccaagttgtatgtgacatacatggctctcgtgtaccgtgttgtgaattctcatgtaacgtgcatagctcctgtatactatgtcttatttacccccgagtgatcgaagaaatgatttcatgttggaatatattttaccaggatatagatttaccaacaagtatgtttttaacatcctaaacatgaacttctgaaatgatataaaataaacacataa

SEQ ID NO: 163243 - DNA, 5881 bp, Cannabis sativa
tcaataaaaatgggaatcgctgttcacgtggttgggttaaacaataaatcaatttcacagcatctagcaagaagaaaaggtaagagacacagaccaatttaagagccaacacgagcaaaaaaaatattatcatggagatggggacatgccaagattgttccacttctaaaccgaaccttgaccttgacataaggaaggaaatgcacacttaagatttactagaattcttactcatcagttcaacatgtaaataaagtaaacaaaataagtatgagaagcttatccacaaagtaaaaaccagaaaataagaagaccactaaccattttttatttcccaattttgcatcaaaatgccatcttcttcctacctcacaattctaactttggctataataagagtagaaaaagcatattaaactgatttgggattaaaaaaaacttataaataataaaactcagaaataaaccttggttttagttttgatgcggacatcaagagagtagacccttatagatagaacgacggtgaggcattctccagtgaaagggttgaagaagtggagaccttgctcggtcaacctctcgaaacgacctgttattccaaccaataactggtgaaagggttctatctctccacgacgcctatgctcgcctagctgacgcacgtaatagaacagtttctaatctctctatcagagattctctctctctaaaagaagaagacgaagaagaacgagcaatggataaggttttggttttgaagaggacggaggagccgactctgaattcgccagagaaattcgaagagttgagggtaaggatgagaaaattcacgcctaaacagtaggcacataattaggttttaagaattttactttttgttgcgtcggttactatctctcactattgtattttgcgtcgtttttaaaacctcgctaaacacaatactcgagtgttaataacagacgcaaaatgagaagtaatttttaaattttttattttattcccgtcggtttatgttttaacgtcatttaataaaagacgcaaataacatactattagtgtcatttttaaagagacgagtcaattatttgagtactattcatgtcattcaacgctatgaatagtagcgttgaccgacataaatagtgtaaattgtagtagtgaaatgatcacatggagaaaatgtgttggttacagtctctcatgattggaaacgaattctttgcaggaattgtaaaggaatgggccatgagaccattgattgacaaagaaagaagggagaccgcaagaatgggtgatcgaaagagatgtaaggaaactagctgaggctgctaaaattggcaaagagaaaatagaggatttccagccagtcatcaaaggttggaaagtcaaggaaaaggctccaccaaagcagaccgtgatagttaattctttcaaggcacttgagcaagtaggagaaggacaggaggacaaggcagcagaaggaagcacaacagatggaatgcaagagattaatacaagagagggcggaggaccctctcttgcaaatggatagaatcatttgctggaacgtccagggaatcaacaaccaacaaaaataagtgactgttaagcaatttattgcaattcaaaaagctggtcttgttgatctattttccagatgagggttaagcctccaaaacttggagacttataccaaagaatgttcttagggtggtgttgcacatcaaaatcagcttggcataaaggacggagaataatcattgcttcgaatccgcttcttttcaacattagtatcatcatgtgtactagtcagttgatacatcttcatgttgaaatggtaaataaaaggtataagttttttaccacttttgtttatggtttcaatgatgaaaatgggaggaaaattctatggaatgatttacgtagcattgctagtcaggagccgtgtgtagtatttggtgattttaatgatatactttacaaagaagagagaattggggatagagcaaaggttggcacatctacaactttcttagagtgtgttaatgattgtcgattattagatgtaaagagtagtggctgttttttttactttgagtaataaacagcaaacaagagatagaatttattcaaagattgatcgagtcttggctaatcgatcttggatggatttgtttgcaagggctgaagctttgtttcttacagagggaacttttgatcatactccggcagtcctcaatatttaccttgagtttccaagtggcaaaaaaccttttacatactttcgtatgtggacttctcatccaagttatcatatggaagtcaagaggatttgggaacaaaaggtggtaggaactaaaatgtttcaagttgttttgaagcttaaatcattgaaagttttctttagagaactgaacaaagagcactactcagatattcaggtagcagaaaggaaggcaaggcaagatctagaagttgtgcaaggccagctacattagcaaccattagatatggaattgcaagcaaaagaacaagaagcgatggagctatttgttaagattcacaaagattattgttctttttggcacaaaagtctagattaaattggctcaaagatggtgatgaaactcagcattatttcactcaagcatccgagagagaaggtaccataacagcatcttctccatatcagatgttgctggcactagagatgaagacccgaagggcatcactaaagctttcttagatttctatcaagacttgctgggatctaagatggtgagtagaaggccagttgaatgcaatctaatcagaaaaggggcgtgtataactgagcagcatactcagattcttactgctgcatacgcaatggaggaagtaaaagatgcagtctttagcataccagcagtaaaggctccgggccggatgggtacaacaactccttctatcaagataactgggaatttgtcaagcaagatgtgtttgaagctatcacttcctttcgccacacaggccacttgctaaaggaattaaattcaacaattatcaatcttgtgccaaaaagtaagtgcccgaatgttgtaagtgactatagacctatagcatgttgtaatgttctttacaaagttgcaactaaaatgggttgtagtagattgaagcttatcctgccagatactatagcttaaaaccagggagggttcataaaaggaaggttcattgcccacaatatcatgatttgccaagatttgataaggcactaggggaggaaaaatgctaaggtaaattgtatgattacacttgatctacaaaaggcatatgacacaatagaatggatttttttagaagaaatgctatatgcctttcaattcccaagttcattcatcaaactgattatgacttgcatcaccactcctagattatctcttctatttaatggatcatgggttctttgaagccaagagaggacttaggcaaagtgatccaatgtcacctcttctttttgttctaggaatggaatatcttagcaggtttatgaagaaaataggtgataaagaagactttctttttcatgaaagatgtcggggattaaagataaactatttgagctttgcagatgatgttcttttattttgcaggggtgactttaaaagtgtctatctgatgctaaagggccttaagctattctcaatgacctcaggtctacaccctaacaaaaggaagactacaatttattgtagtgggatgaatgagaatatgaaataagaaggattgtggatgcttctggattatagagaagtaatatccctctaaaatatcttggtgttcctatctgtgccaacataattccatcaacttaatgttcaattctaattgagaagatgatagcaagaatcaaagtgtggagctcaaagaatatttcttttgcttgtagaactgtgttaattatctcaattttactaacaatacgtgcttataggagccaaatccttattcttccaaagaaaataataaaagagattgagagtatctgtagaagctttctctggacagggagaagtaatatgaatggtccaggcaacattgcttgggagcatctatgcaaatctaaaaaggctagagggatttgtttccaagatattgcaaagtggaatcaagctgctattgcaaaacatgtttaggcaattgctactaagatggatagcctatgggtgaagtgggtgcatagtgagtatattgaaaatgataattggtgggggtataaggcccccaattatagcagcttgtattggagaagagtagtgagcacaaaggacttggtgatatagatcattcccccttatcagtttgttacatcagatttcaaaattgctactttacacaagttgttaaagcaagaacacagggatttttatgtcagccaacaagtttggagcagacttaatgttccaaaacacaactttgttctatggattgttgttcaaaacaaaatgagaacaagagaccgagttcagcaattccatatcacagatgaggcaaactatgtgttgtgtaataatgcagtagaaagtgtgtgtcacctgttttgtgattgtatgttttctcagccatgcttgcaggatttgaaaattggctgggatggagatcaaaagctaactcactacagggtgtactgagatggattaacagaacaaagcagagtaaattcaagaagagttgttatacagcttgtatagctgcagtagtttacaaaatctggcaggcaagaaataaacaatactggtgtaaagaaagcactgatctgaagctactagtgcaagaaatcaaatggatagtgaaaaatagaattacttgtgtaatgcctcaatgtatagatcaatagaatatagattggtttagagaattataagtgattgtttcaaaagtattacatgtatagatttattttgctccttagggatccacagcttgtaatcaaatttattaatagtgcaatgaatttactgattcatcaaaacaataagctaattaaagttattcccattaaaattaaaaatatagatattaattgattttgagttttgaaccatttggagcttttttggtggctgcctttagttgcatttggcaagtttggtgggattttgtccttattttgtataattttgctttacttgcttactatttttttttgaatatgcaaataataattcaattcgttaatatatttgtgtatactaggtaaattgtgatcattagttttttttttaatatatcctacacggaatcctgttctatgttttaatatggtgaataatttttggagtaattagtatttttaccccttgaactttcgacaccacctgattttgtcccccacaatatacagtttgttaaaaattctctctaaaatataacagttacataattataccccttctgttaagtttcgtttcttttaccgttaaaaaataatatttttacctcctgaactttgacaaatacaaaattttgctccctcttattttaattttaaaaattacaatgttctatcatttttcaagcaattataatattctattaattcaaaaaataataataaaaatagataaaaatattaaattgattaaaaaatattaattttacttaaaaaaaatattttttaaattttattttatttatcagcacgtatcttaaaaaatcaaaccaaaattattaagaatctaataaatcatttaaatgaattaagattttttgaagaaaaaatcaaacttatttatatttataacctcatacattaactgtttacctaaattttaacgacgatgacgtgtcaagagtagcaaaacgtggcacaaaaataccgggactaaattaa

SEQ ID NO: 163244 - DNA, 2308 bp, Cannabis sativa
tctctagttcacatttatagtaagaaaaatttagctttgatttgtaggaaatttaattttgatacataaaaattaaaatttgtaattccaaattcaagattacatttaaacgaacaaaagttaaatcgaaacaaacaaatcaagaacaaaaatcaacactatactacaaaagtcagaattcgcgacggtcctaaaaataatttttttggggaaccgtcctgaaaaagttaagtaactgtttaaaaccgtcgggaaaaattagtgttcccgaggtttataacagtaattacaggaataggcgacgatttgaattggaattcgtgaatttattaggcccttatacccaacagtttaaaaccgtcgcctataatataggcgacggttttaaaccgtcgggtataagggcctattaaaaaatcgtcacctacatctcgccatattttctacgtgcccacttacttcttttttatttcccacatgcccacctaattcttcttacttattttttctccattttccacaccctaaaataaaaattttaactctccaaaaccccatgcctccgcaccatcgcccgatcatctctcgccatcttcctccccctctcgatctcttttcttctcgtcttccttgtccatcaatctccacctactcctcctctcgtcgatctccctaagaaacctatccacctatgatatttctttgaatatctaacctaaacaagttgctcatacaaaaaaaaaattattattagtattgtgttgttcgtttgttattttgtttctttatgctgattttctttgatgttatggcaattttgttgctctctgtcaatatgacattttccctttttaacttatgtaaagaaaactataggcatagcatataaatcattaataatgtttagactttgaaatccttttatattcatgcatatgagaattagtgattgtaatatgggttacactcttgtttaaaaattaataatataatatttgtcaaataaatatcaaatatataaaaatatatatatattttaatatataaattaatatgggagacttagtatagaaataatattcgattttgatgactatatatgatttgggcccaccatcgttactttgtataatttccttcctagcttcccacaaagtatgagagacaacaggtcatgagtctctttgatcaacactcaataagacaatgacttatacaaataatattttgtagggtgagatgatttgtggtatatatggtaattttattgctctattttataagtgtacattttgtaaaccctaattaaacgttagtaacctagattttgctgttaaagcttattttattttgatttatgtttgaatattaaagataaaatcaaagattcaacgtcaaaaatttacaagcttcatttatactggaaatttattccaaccgactagtgtttgagttctccgaaccagagtagctactttcattatattaaataatgtttgtacagaccaatctagattacaaccagaaaacaaatcaatcttcacagaagtaaatttttaccccaaataaccaaatcccttagttatcaattaattgaagatccacttgctttagtttgttgaaatctcccttcaataaaagttcaaatctatggtgccaagtctcaactgaaatccctttagctatcatgacttgactttagaccttgcaatgaaaccttgaactaccttctgtggaatttcttgcaagaacctgcaatgaaactcgaaatggataattgtaaccagtcgaacaactaaaaaacctaaaatatcttttatggacgtaatagtacaaaatgtagacttcatatcaaccactcctaacatttgtcactaccgaaaatattagtttacattttaatttatttaatttattattgttttatatttataatatttgtctttgaaaaactcatgcaaattataatagtaattagctagccatggctattccatgcacaggccaacaataaaattgaagtcgaatatataataatttgaaaatgctaaaatgtattagttttctcagcagtcactagctaagtaagtatcttactattttttttgtacaattaatatattttattttaataattattataaaattttaagaatttaactaactcaaactacctaactaaccagtgggggaactagcctctatctctatctaggagggccaataatataactcagtaattattcataaatgtagatatatctttatatattaaaagtgtctatctaacggcatttcttggtttaac

SEQ ID NO: 163245 - DNA, 2586 bp, Cannabis sativa
aaaaaaaaaaaaaaaccccaataagaaaagttattttttagagagtaatttttttattaattttttttttttcattttagtaatttattgtgtaattatttaattattttttatatgattgtatttttctttgagaaccaagtttttgaattttgctagacacttctcataataataaactttttaaaaataaaataatgataataataaacattcccttaataggttaactggtttgagaattggcttatagtttatactatttcataattagaactttgttattaaattagcttataaatttcaaatgttgtttggtaatattttttttttatttaattaaattttaaaaacattttgcttataaatttgtataagtgtaacctaatttgcaaatagttttataaaatacaaactaacaatgtttaaaaacaatacaagctgtaactaagagaccataactaaaatgactctattggtttattccaacacgaaaaaatatataaatatatatatatttctttctttaaaaaaaaaaaacttgtataaataataatataaaaaaaatatagaatttataaataacttataaacagattatttagttataacttataatatagacatattttgtattcggtaaaaaattatattaagccttaaaatatttcttgaaattatattttagagttgtatatatttgaagtctcatgtctttcaatatcttggtgcttgaattgaaggtttagacttgtatggatttgggccggaaattattgggcttttctgatttggatgaacttggcatgatgaatcttcaaatgagtaatatacaaaaatgacaaaaaatttacatttttatgaattttatttgttttgtttttacaaaaatatgaagtgttgtttttgtttgtttttgaaataacattgttttgacgttgctgctacatgaaaataacattatttttttaaaaaaaaaaaataaaagggagaattatttttccgttgtttcaaaataatattaatttcacgttttcacattgctgctacaggaaaataacattatacaattaatgccttatatagatcataggtgaacaactaactaacttcagctattgcagcttaacagaattagttacacaccaactaaatctctatttataatagacttagggaaaaaatatactaaaaacaactactaaactactaaaagtatatattacttatacccctaaggtgaagcatatatattgtatatggacatcttataaatgtgagtagttagtattggagaagatagtgtgaaagcgtcgactaattaaaaagagcttgatataggaacgagttgtatggtggaattattaattttgtctcgaataaaatgacagtcaagttcgatatgttttgtcctctcgtggaaagttgagttgttggcacttggcaatatgtatggtggattgattatcacaataaataaatactggatgtagttgaggaatctgaaagtcatggagaagatgttgtaaccaacttatttcactcgtggtagcttttggatatagtgggctatttttttgttcgccgtgatatgagactgtctcctagaaagatgcaataatcgattgttgaacgccgagtaataggacaagacgtccaatcaaaatcaaagaatcatcgaagtctcaaagctaaagtagatgaatagaggagttcttgaccaggatttccttttgggtaacgaagtagatggtgaattgcttggagatgtgttgtgcgtggactagccataaattgactaaggaaattgacatcaaaggtgatgtcgggcctagataaggtaagatacaaatttttgccaatgagttgtcgatagtgtgagggattgtctagagcttcgccaagttcgttgtaaagtttgagctttggatccataggtcttttgctaagtttgctacctatatagtccgtatcttcgaggagttgtaaagtatttttcctttgagagagaaataaattatctttggcacgagcaatttcaaaaattgaggaagtacttgagatttctaagggctttaagcttgaagttatggtgtaatgtgtcttgtagttaatggagtatggagagattgggaccaacaataatgatatcgtctacatagacaagtagagcgatggaagtgtcttcaatgcctcttgtgaacagggtgtagtcagcctgtgattgcctgaaaccttctttgattaattcatctgagagctttttgtaccattatcgagaggattgtttgagaccgtaaattgacttatgtagcttgcaaacaaggttggtatctacattaagagaagaagaaagtgtaagtcctttaggcaaggccatgtagacctcttcattgaggtcaccgcttaaaaatgcattattgatgtctaattgcaaggtgtgccaatgtttgagagttgagatggcaagtaacaatttaagtgtaactgttgggtgtacatccaaagtcccacattggctataaatgggaagaatcttgggtatataaggataaacactatctccattggaatgaggccttttgg

SEQ ID NO: 163246 - DNA, 1313 bp, Cannabis sativa
aaaaaaaaaaaaaaacatacaaagatgtacaaatatacaaatttctacaattatcaagtcttcttcacgcttcttttagcaaattccttcgtgaagtcgtcatacgtttcttccataaacctaaagaatcaaatgaaaaatttaattcattaaacatcatagtgtgaccaaataattcatataaactataaagtactaagtcgcaacaagtttgctcccgataaaatattaattagagcaatataaacaagcaagatccatttactctctatatctacactacattacatacatatacatatatacatagaagatcactattccatcaaagaatattttgtttccacaacttctcttttcctaatttatcaaacattttatgacttttgtttcaaaatcaaaacagagcccacattgatgacaatcgagcacaaataaaagaaaattaagtcacttcataattaaaaccggaaaattttagaaggaaataaacctccttgccaaatgaaccaaaccatccaacttccatagctttaaggagctccttttgccatttttacatctttctttttaaatttttgaagattgtcaacttaagttctagtatgtttagctttctttaaaactaataataacaattataactctataagagcattacatacactaaaaatccttgaaaacctatataagaaatttattagtctagattacaaaaatctaatcttcaaataaattttacaaaaaatagtttattttgcttgtaaaacaacacatatgtaaatgactgatcatagatattacaatcatatcaaaatgagaacataaaaaaagctttaattactttattgtctctacagtaagtattctataaagcaagaaagccttcaatcattataccataaattcctaaaattaactacaaaacagaacaatttaattgtgctagaccaagaacagtaaaaaacaaccaattagaccaaaaaaaaaaaaaataagtgaaagagaaacaatattcagaaaacaaaaagtggaataatacttttatataacaaaaaagactaacctcaaaaaatatatgtttttttacaatagaaaattaaaaagattaaaaggaaaaaatcaaatattaataagtaagataggaatttacttaaaaaacacaataggggcagccaccggggccggagcaggaatcttcgccggagaggtcatccatggtcttaaggctttgggtttcaacaatttcgacaccgggaggtcatccatggtctccgtctagccgcgagaacacgagagagagagagagagag

SEQ ID NO: 163247 - DNA, 2625 bp, Cannabis sativa
caaataattgcaaatgttggcacgagtattgttcttggaatgaacctttaaagtcttcattgtaaatccttaacgaaagtgaaacaaccttgcaccattgctaacccattgctaacagcaccttgtgctcatcatttataacttctcaaattttatttcatgagaaaccaagctaatcttactcatttgtagaacgaactttagctaagtcttttatgttgtaatgtttgccatattgaccttttgccaagtttaagatacacaaatctttagacattgcatgtgtaatgattgatcaagtactactaaccctatgaaaactataatctgagccaagtcatgtaagcacttctttcaatcttggtttggttcaacctaatattttgtttaaaatataaatgaactgacagcctgaccaagaaaaaaaaaaaaaaaaacactagggataattatattgtagatacttggtcttggtagagttatagtctgtattatgtaagccttcacgctttcatttgtataagatattgttataatgaccccaatctacattacaagatactctgcagaaggaagaaagaaaaataatacttatgggagatccatagctgtcattatacccaaaaataaaaaagaaagtcaaaaggcagagctaaccccattttaaaacaaagtataatcttggatttgctaaaaaaatttaggaatccatttaggaatcccttgaaatgaccttttttgttttcaaatgacatatgggtttttgtctcttcttctctggtgctttgaaggatttggtttgttatcatgagtgatctgccagtgccactcctttctgctatctagactggaccattttaatgataaaattcacagactattcttgtttattatatatatccttataccatataagacagatatacatgaatggagatcatttaactatgaaaaaatctctcttttttggtaagatggaaaaatctctcttgtttaatgtaaaatgtcataattaaattattcaaataaatacccttttatgttttttagttggaggttggggaaaaggggtttaattgaagatataaagatttttcatgaatacatatataagaattctgattagacattctttatgtttttatcagaagagtcttctcttttgatgggtcaacctttgtcatatccatggagtttgatatttgttgtattgtatatttgttgtgacacttttttcaaaccaaacaaacccttcactcattgacttccaatattcttatgctgattctttgatgacgttacacactcaatagatcctcccatcactctctcttcagacagaatctgaaggaaaagtcccctttcatatctacaaatatatttgtttattattattattatttatttatttatttattaacttataaagaaaaaaaaaacataacatatttcttctgaggaggacaaaactatcttcgtactatatccaattctcccaacacttacatggcatataaaatttgttatttggattttaaactctttccctctaatccaatcaccagttaaataaatctcattaaatatttggatattaaaactttgaaaaacaataaatgagagaactaaaaaactacaatatgatattatatttgctttctagcatatataggctgatacatcccctgtattttctgatattcatatccaaactccttcccaaaaaaaaaaaataaagatagtaatagaagagaacatttaaaaccccccaatatttataatatttaaactaaattacttaaacactaccaactgttgactaaggtatttaacaaaaaaaaattaagccttagtggggtcatgatatataatttttttcctttttttttttttataattaaaccagctaccatagatgatgatggatatgatcagttgtttgaagatgaagcattttgaccagaaccacctgagctcagattaagatcagggatagagtttttagcattgttttttgtgttgctggtcttggaaagtttctgtttcagctcagtaagcaaagcttgattctcttggttcaaaatctgagctttcttcctaagtctctcgttctctttcattatgtaacagttctgcaagtacagcttcgagttcaatctttccattgctatcaataacacaaaaacaaaaaaatatccttctaagattttcctctgaagattaatgatacacctgaaaataaacaaaacaaaacagaactcatgttattacaagttatagagaaaaagtagatatatgtaatgtgaatgaatgaagaggaaatgtttaccaaagagtaaaaaaatttagaattgaatagaagatctagctaacttaaaagggtcaaaagatttcaggttagaatgtactacaatccaaacatgttaattactcttccttgcaaaaaaatctcagtttctagtgacaagttttagtatatataattggcaatagggggggacaaggtgggagtggccagggcatgtggtgttgtctctctataaaatttggttttggaccacttaaggcacaaaataaatagagcaagtgggtatgttttgtgaaatagtcaaaaaaaaaaaaaaa

SEQ ID NO: 163248 - DNA, 3847 bp, Cannabis sativa
aaaaaaaaaaaaaaaaaacatcgtctattaataagagaaaaattagacctgacgatcattacaaataatgtcagccgggatagtagataccttcgccatacaaattaagttatgggccaaagcctaattagcgatattgtaagccgcaaaattacatagtctagaaataaaataaaaaataaaaaattacaacccataaacagcttagagagtttaatacattgattaacataactatctattcttcagtcgacagaagaaccattcaaagaattaataactatttcaaagtcgctctctatcataacaaaatgatgctgcaacaggttcgtcgtcttcaaggcaagtaagcaagcagtagcttcaccaataagggcatcagcaaagtcaagtagatcagtagcagtccacaccacagtgccccaacaatccctagccaaagccaccacacacatagactcactcccaactctaacatcacaattaatcttcagccagtcctccgggggaggagaccaagagagagtggctttagtcggcatcacagggaagaaacacgagttataatctgcataactaagtttaatagaatcaagataatgagtaatgttatatagattattattgtggaccttatcatttcgggcttgccaaatagtatcaaccactatagaggcgtaaagaaaaacatcctcgacattaatccccttagcttttatgccccaccgaaacttaatccaatcccaaacatgaccactagctttaggcaccggccagcacggagaagatctccacaggtgataggcaaagttgtaaaagagaaataagtgtttcgacgattcctcccccctcccacataaaggacaagaggagtcgttgatatgcattctcttggctaaaagagtacgaatagggagtgcatcagagagaatactccaccacataaccttgtggcgttccaacaccttactattccacaatctattccagagagaagaagccaccaccacagggggcaccctgttcatggcttggaccagataagcagacttgcaagaaaacttaccagaattatccttggtccaaatccaaccatcatttccctgtccactcggtctacccccttcaagatattacaaaccgtatcagagtcaaagagagagttgaatttagcaatgtcccaatcaccattgtgcaataataagtctgataccaaacggcaaccattcggttggttatgagttggttttgggataaactctcttccatgcttaatccaaggatcatcccatatccttctgtcctttccatcattaatactcttgcaagcacctttcattaacacatcttggattttgatgacgcttttccagaaccaggagtctgagtttttgtaggagcaatccaagaaatgcttgcccttcatatatttggcccgcaagacttggcagcaaagcgattggttctcattgatcagtcaccattcccatttaactagaaaagcctgattcatctccaaagttttcctgaaacccaagccacccctagatttgggtaagcacaatttgtcccaggccttaagacataagccacggttccctttttctccaccccaccaaaagtcatggatcaacccatccaccttggacgccattctttttgagagttttgtatattgcataatgtaggcagggagagcaaggccaaccgattttatcaaagtagcgcgacccgcttttgaaagggttttcattttccaaccttgtagctaagacatcaaattctccaaaataaaatggaaagcaacattcttctggcaggttctgaaaagagggaggtccaagtagttaatgttcccactcgttccctcaatccccagcagctccttgcaatgtcttctccttctactactggtgttattgctaaagaaaatggaggttttgagcttattcaccctttgaccagaccacttacagaacttttcaaggcaattccagtacccaatcagtaataagactaattgtcttatttctttacatttttatatttatttaagatgtaaagaaatgggtatatatatataataacccaagtgaaataccaaccacacatcttaatttggttaattaattatgttatatactaaagggtaaatactattttagaccctgtgttttgtaaaagttaccgattagactttctgttttgttaaatgacaaattagaccttgtattttctaaaagggtaaaaataggaccctgagcttaatttttgacaattttttttttatataacaaacttgaagaaaattcctaatacgaatagatatagaaaatgtaaataattttgtcataatacctttagatcaaattattgttaaattttattttgacaaaaaattagttcaggatcctatttgtaccattttgaaaaatacagagtccattttgtcatttaacaaaatagaggatctaattggtaacttttggaaaacacagggtccataatggtatttatccaatactaatttatatatacttaatttagatttagcttaacttaggagcaaatattgattttaacttactctcaatgttagctcccattctttgaacaactccaagttgacgacaaaagttttcaaactttccaatactcaatttttgtgagcaagtctccaacttgctaatctattttcacttgtctcattaaaatctcgtcttgtagaactttctctcaaagaaaatgaaagttcccttccacgcgcttaatccttgcatgaaagattggattgtttggcaaacaaattgttgattggtagtacaacagagttgcataatctattagttggtacaaataattcattagttgtatcaaccatgtactctcttgagttgtcattgctactagaattgaacatcgagcagattgaccgaattttaggctcacatatataaacacttacaatacaaaataatgaaattcgcttctcaaaatgaaattttctatcacatggcaaaaaaaatattataaaatttagcgtcatataaatatctagcatctttataaaagaaaccatctcaatacatacatacgccctcaaagaatatatttgctatcagtattttcagattagtgacgtgtgcattttaaagcccaatatcaatcaaagcaggcccatgtttgggcccagtcaagttaataagtcaacccaattatggagtcaaactcacctccatatctggatataagtccagcttacaaatgcagcaaggtcagaccacttctattcgagaaatattgtttggcctaaaaggcgaagggtccatcaagatctatctgatactctcatgggataattcggatatggaaaattgaagagacatccaaaagtccctggatatcatcctatctggcatcctccaaacacagacccccaccatctcaagggtttgtctcctacgtcaaacacaaggagtgtgcgcaccaccaaaagaaagccacttttttgtctaataccatatcctctcacattctcgtactgacacagtagctcacgacacacggtgtaacactctaatccatatggatgcctagatttattaatttttcatctactttctaagaaaaatactttcagaatgaaactaaaaatatttatcatcgtaaaattacgattccatacaatcatcaaatatgcacatacaccagcatgaatacattcaaatcaacacaaacattgtgttaagtccatatttcatgaaagtaaatcattatcatggttctaaagccagttgttggggattgttttaccgtgatctagatttactaccatatatgttgttta

SEQ ID NO: 163249 - DNA, 1493 bp, Cannabis sativa
ttgccttgaagtgagtcattaaaatatcttacttggaagtaaaccattactagtctaaatcattggtctcctttttctaatttgctttgctttttttctaagatcatcttaattggtttacacttaatgtttatcaactaatcaaattgatttataccaacttattgtatgttatagtaattaaccaaagtgaccataatggcatcacctccatgggggccatataatatcactttgttacttatactaattgttcacaaaaagtgatttttatagaaaatgatatcattggtcagatgtatttttctataaaaagaaaaaaaaaggattagaggttaagcccatgtgttcaaaagcccatatccaattgtcattataggctcaatataatagatttgatttaacattctccacatatcaaaactatattattataaatttagcataaaaaaaaactatattattaaaaaaaattgataaaccaatcattaaagatagaatgatgaatattcaaaaagaaagaataaaatatgtatgaaagtgaagaaattccttcttgagtaataataataggtagccataattatcaattttttggtgcttgttgttgttgtccaaagtatcatcgtcaactatgaaaaccgaattaatatttatacataattataataatgtcttcgtcaaacaaggaatttaaattttgattatattataatgatattgacttgtttttatataacaagtctaacaatctaaacacatacatacataaaatcaattggagcaatcagcaatggagataataataataataatcaacaaatgaatgtgaacattctaatatattgtgaggtagctagggtttatggtgtcaaaatcaagcaattccttgcaattgcatgggaaatatatagggggtgttacgtccatctccatgaacagaaacttggaaaacaaccatatcaaaacaaaacaaacacaattaactttaatttgcataattattcaactacccaaattctaatctaaaaggatatatataataataacatgaggtggccccattatccttaatttataaccaatactcattcacacatatacaaaatttaaatttataactacacggcacattctttttatttatgtatttatatataccacaaaaataaaaataataaaaaagtttaaaaaaaaattaaatttgaattaaatattttaagattaatatatatttttttttaaatcaaaatttcagtaatcattaaactaaaaaatcagccaaagcaatggcaactaacttaggagacagaaaaccctccttgataaacaccatctcaggcattgaagccaacgatttcagccatctcaggctgaacccgaccttcaaaagacttgttgaaagcagccacaatttttccttcatgatcacgggctgtacaaccaacaccataacgcccccactgctcaaaaattgcaccatcgacattgac

SEQ ID NO: 163250 - DNA, 1404 bp, Cannabis sativa
atgaatgaacatatttctacttatcaaaataactcattttttcaatccttatccatgtggtacttatgattttcttaagaactaatcacatctcttcttagaaattaatgaaaatcaatatgctttgattaaagttaataactaaagtttggaataatttttcctacagctttaaagaggccaattttattttcatttatttattgttttttaagtttttattatttaaattttggatttcctctttgttttttcaagtgtgaaaccactatctattttttttttttttgaaaatttagatcttaaattttgaaaataaattaaatgaagagttttttaatcttttatattttaaagtgaaaaaactcaagattttcattaaaggcaataaatatttaatctataatttagtctagtactaagcaactctcccataataaataaacaataataattaaaaaaaaacaccagatatcactaatccaaactccaaatgatgagccaaaacattaattattttcttaaaaaaatatttaattttttcaataaaaaacaagagttagttttcaacggatgagcagtcccaatcaagatagcaattcattgacaaagctcaaatactatattttgccatatatattatcataaccttcaagaccagcaacacattggaccatctctaatatatttggactatgaaagtggacatttcaacttattaaatcacttacatctagggctctactagctagctacatagagctactgtcaccttcattcatttattaatttctttgttaataaatgggtgtgcaactaattccatccaccaccaccttagtcttttgctaaagtacatgttatgtggccaagactgtttggtggtacatagcttaaggagcacttttgatgatactaacttgtacatgtaaagtagtgtatttccaactcttataaaacactattgtattgccattttttaagcacattttgatatagatgatattagatgatgtaaaatatgaattttgcagaatttgtgttttaaatttagcacaaatatataataaactaaaattataccaaaataaatgttttttaaactctttttctattaatgagatatttgcaaagaaagtacaaaaattattatatttgtagcatttaaacacttaaagttatttttttagtaaaagtatctaagttattaaatttgtagtattaagtatcaatttaattttttttaatagcaaaactacctaaattattaaatttgcagcacttaagcatttaaggtattttttgggattatttcacaaatacataaaaaaaataaaaaattataaaaatataattgtatggaattttaaatatttttactattttatttacagaaaatacggt

SEQ ID NO: 163251 - DNA, 1808 bp, Cannabis sativa
ttttatatttttaaggtataagtttaaaagaaatatatattttttaaaaaatatatatttttttcttcataaaataatattttttaaaaaagaaatttatatatgagatggtttgaatatgtaataattgtgtgacgtgtacagtacacgtatgtacacgtcacagtgctagttgaattattatgatgttaaagtcttttaacttattttagtgatattttgttttggaaaattttatttgtactttgataaaatgatagtacacttattattaaaaaaataaatttaaataatattatttttttctcatattattttatatttattttgattttatttttataattttttactaaatcatgtatatatttagccaattttttaaaatttatcatatatataatgtatttgttattttttttttcatttttaaatgaaaaagccccaacgtttaaccataatagaaatttgataaaataattgattctttcatttctcttaaaaaaagtgtaatttacggcataaatatttaagtggcatgaccgtttatctctctattggcgtagcagccactactttggggtgacactcccgaactcattccgtaggaggtgatagttgccacctcaaggagtacctccgagaccccttccacttgatatttgacgttgtgtagtcttgacgatatgaagatgcattatataccaatcatgttttatgtggatagaatgtgttgcttggaccatgagaagtgtggggatttaagggtgtacacccctagactaatcccatcaccttttgagtgaattgttatatttgaggtagatgtagtagtatatagtatatactcttagactggtttgacttttttaagtgtgtgatgatcatttatctcacatgtgagggtgctatagtccaacttcccctgagaatagtcacctttacttaaattaggaggaaaggtaaccgttagacttctttttcaccggttatgactttacacatactttatcatttttgcctagtgtcatcatttttgccacattaccattgtcaaaatttaagtaaatacagtgtataaaaaaattagtcatgcgtgaaataaaatatttatactttatttttgtcatttacaaataatcatatataattataatgtatacgattataaaaaaaaaattaaattaaaacactcttaaatactaaaataaataaaagatgtatggaaacaacctataattatagagatcgatacgataattatatatttatatactataatattactaatagttattgaataaattaatgaattaatggtgcaattgatctctcgttaattttataattagtgtgttattattactttgctctcatggcattattatttgtcgggtgaattttatcaccccataatttttttgatgataaacaacattgtcaaaaatcatcattacataaattttgtcaaaaatggatcattatttacacaaaattctttgttaaaaatgaattggctggattgtgacgaaagccatttgcaatattatttagtagttttaaaaggaaaatttgataaaatatacttaaaaatttacactatttttttaatataccacctttaaataaatactctaaatattcttcaaacaccctaaaactccaaaattacccttacaatttcaaaaactctcttctcccactttctttttctaactttccccccctctctctctctctctgttattcccatccagccccaaacctttcaagcccttgttcacgagctccgaccgaccaagacgacc

SEQ ID NO: 163252 - DNA, 791 bp, Cannabis sativa
ttttttttttttttttgtgaggggataatccagacttttgcttctattgtatttttaggttcttgatttgtcaccattgcagattgctccttaagggtggcctttttatgtgaagagttctattgggacctcttcaagaagtttggggaggccttccccatatcctatttgacattttgatatggggtattaaccacttaggtgttctttttcatcgcattttacagtgtctggtgaaaatgatgactcctattttgaaatagtgagccttgacaagttctctggagcatcttcagtgaacgcaccccctatgtgttcgggtcttgaggacccagctctaggataagggccttctcacgacatccaagttacaagaaaagtgaatgagaaaggtaaacgtaaagcctgcgctacttctctatcccctttagcgcttaatatctcattctgggagattgattcaacatcccaatatgctaaggaattatagcttgttggtggtgcattctagtgatggttgcatatttcatgcattgcccacagctcaattttgcgttaaggcgagaatcatgccttttcagcttcttccagtttcttacaaactgttatccaaatggtttgtattttgtaaatcctagggccaggccaccccaaccccggtggaaatattgtatttttatgagttaaaccgcaacccttccgggggcaccctacaaaggttgggttctatctgttggaaatattttactaggatctagatttactacgaagtatgtttcattaacatccta

SEQ ID NO: 163253 - DNA, 1809 bp, Cannabis sativa
aaattctgtgttctcaccactgatcggttatgatctccagagaaataataatcttttttcttttttctttttgtaaggagagaaataataatgtttagattgtactgaaaagtggaaaattgtttaaaataaaatgaaaataaacaaaatcaaataatattatgagtgagaccatttaagaacaaggaagcaaaacgatccatttgatgcttcttcaaaacgaaaccagcctcaacgccaccacttccatctccagactccgccattgaaatggatccattctctatagatatcacagccaccttctccggccgaccccatccaaaatctatgctgtaaacgccgaacctcggcgacccagctactccaacgtagcaactattgtcagatttaaacgaactcattctcgagaacatgtcctctatttcgctctgtaaatccatttccttgctcaaatccttcactaaatcacttaccttcaccgcaagagcagtcaatgaatcttcctccttaccaatcacgtgctccctcatgtccttgaaattggccttgattgcaacgcaattgccgaagtaattttctggcaccggaggtctcaaacggctccggtaatcagcggcgaatcctaaaaagactttacttttacttttatcatcatctgttgctttgagaaagcaatcgaacatgtaagcgtacgtaagtacaaaagaagataaatgaagctttggctttgaactatgccaattggacgatacccttcgacgtagtttatctatatcggatcgggttagttcgaaagtggctctgtataagtcggaggaaggttcctcagggctttgaaagaattcaaacagttttgggttgtttctacaatctgacgatgtcgaaccaggattccccatccaataattcaaaagcttcatttcaaacccagatgggtctattagggaactccggtcgtaaaagggtgtaagctccggtaacaatggggaattctctttagataagtaagcccacgatttcataaacatggtcgtggatttcccatctagaacagcatgatgggtagtgactccaatacaaaatcccttatttggaaaaattgtaatttgaagagctattaccgaagcccctgtttctgaaacatgtaatggagaaaccagaggacgaaccgccgaggcttggaaaggttggtttgcggaaaggatgtcaaagtcagaatcggcttcggcaacggagattgaaacgacgtcgcctggagtgtaaagaacgattggtttgggagaatcttccggccaagttagttttccggcaagaggaagaaaatgttgaagtgtgagagagagggagtgtttgagttttgggagaacagagttgaggaaagtgtgtttagtttcaggaagagaatagaaaaatagacgttggactggtggaaatttgaaccaaaaggtatcgaaactagttaatgggatggtgaaatgggcggtggattcgggtgaggccggaaatggagcgacatgggagacctcaagtattttgagtgaggccattacttatgtaaaaccaaaggttggaatgtatgattattatatagccaatctatcatcgtacgtgtaaagataatgttctcttttttacttttacacttaagttgtccgggaaaaaaatcactctaaaatcaaatttataagtattgctgaagagggagaagatgtacactctattattaaaaaaatataaatttaaataatttttaaaaattacttttaattttttttctttaagttttttcttcacattattaatgtt

SEQ ID NO: 163254 - DNA, 1531 bp, Cannabis sativa
aagaaatagttattatgtgtatctatcctatatataattagggttagctatttctcattggatttttcttggtcaggtttagctagacgtacacataacacgatagtatttgtttttgtttcctattgcacagtcttccactgttaactcttttgtaattatacaaatatatttttatatatatttatgtgtgtgagtatgtgaattctagttcgggctggacgatcatttagttttggcggattcgatcctttgacaaattataatggtagcttttggctgtttggtaataatgaaagtttttaaatgataatttaattaattatgtgtgaaaattttataataatgttcaattaattttgcatgagaatcttaatctcacatataggatatgatgagtttcatttttaattaacacaatgagaaatcaaaaaaaaagtgaataacatacattataatatcaatttaatttattagggatgcttttagagcaagatttaatgtttatatatgctcgatcgtcttttcacccattataactcctaagatttttctctatttggaaatataaatacaataaaattcataattacgtacatagagatatatgtttcaagatacttttgcagtttattagttcgtcatctctctgcgcgtgatcatttttaaatttatttatttttatttgtgtaattagttaatatttaatttcacaaataatagaattacaaggcacagggtttgatcagtccagttgacatgatccctgaccatgtacagttataacaattatagttgtctatagccttgttttgttaaagttaatccatcatatttctcttttattatttcttttttctttttgaacaaatattttttattatttctttattttgtgagaaacgaataattgtttttgacttttcataatactaagaatatatatatttatctcatagcataatggaggtcaatattttgttttgatcggtgacaagtaaaaaccttaataaaataacatattctttaaaatagtacttaaaatgtatattcgtactatatattaggtggctaaaacaatgaacagattaaattgaaaacacataaaatatatataaaactaattaagtacataaaacggaatccgaaatatatttaagagaatttaatcatttatcttcaataaataaataaataaaaatcagaggctagatatatatagctaggtaggaataatttaattaattatatataataagttcatgagccaactattctcttgcatgcatcttagagcttttacaggcactatttcaattttctctgactgtttcttcaatctagaaacgtgggttcttgtcttttctgtttttgctatttatttctatcaatattataattttcttttatgtttaattataaaagcattgggattgtcatcaagaatcaagagagttgattctttcttcttcttcttcttcttttttttctgtgtgtgtggggattataagtaattaaaagaagcaaatat

SEQ ID NO: 163255 - DNA, 2264 bp, Cannabis sativa
ggcataaaacccaacacttacaatgttggatgtgtgggctttcattcatttgctcaggcccaacaagagccataatagttgtaataaccctattattagcagtggtaggaatagggcgggaagagaactttttaataatattattggacaattcaagagaagatttacctaaagcatgtctttgcagcaacccaggagagattgacctagacctgttaactctgtttgggttgcttgatgaaaagtaagatgagctcatactatcttctctattgctcgttgtatgcaggggttgtttagacaccactttcaaattttttccacaaacagctcctgcgacattttcctccactcttactactttccttgcaagtttcccaataggaatggggatattagtagtttttgatcagttgttgtccataggacaaatgcctttaccattactcacccttgacaatccttcaggtggcttttttgtcggagaaaagcggtgctccgcctctctaaaccagtccaattgatttcaaggattgaaacaactaaagcatgacgtctatgctctaatccacggcccatatgatggaatagctttgccttcgggtggaaaagcataagttgttgatctctaacactttttttgtcgtgaccgaggtacccacaattaaaacacaccttagggagtttataatacctaaactagatacattccttctgtcctttcttcatatccaagtaaaaacccgaagtaagttgatgataagtagccagctcgacttgaaatttaagaaaaccatgcctaataatggttttttaatctgccatgtcaaaacctttgtagacccttgctttggcagcaatagcaggagtattgacccaattaagatatggtgtgggaagtccagaagcttgcacccaaaaaaatagctttacccatgtttacacaattccatgcaccatcatcaggccactcttgaacaatcaagagttttccatttatgagccacaatctatgttccagaactactgtaacacactcttcttccgaatcagaaaagataccccacaaaccagtcttcaaagtcttgaatctccaatcgcctttgattgattttttccaaatctaggataaaatttcctttatgcgggatcttgaaactcctttaccttcaaagaaactctctagaatacatgttctggtaatctcagcattaatctcaaagtctagttttaagtctaaagtcatagactccaagaagctttacctcctagcttccagttcaccatcaccagatccttgtccggctttgtcatggaacgtagtaccattttccacattagagactccaaccatctccttataaaagttattatcatccctaactatacgttcaccaaccgcagcattattctcttgagcacgtgagtgtccatcaatgtcccccattataaggtcacagacaaaataacttaaaagaaaacaaaatcccctcaaaagaatattccttccttaagaaaaaacaccaacataaaccacaagaccccaaaaatgataaaaagaaagataggagaaaacaactcagaactaccacactagacaaagattgactcgacgtcaaagactatctcagtctaagttggatctccaaccctctcaataagaaagaaaagtgatataatacgaccctctcattaaggtttgccaattaaacacgtcaattcgtataatacgaatacaaatatgactagctcataaattcctatatgtattcttaccgttttgttttacaaaaaaaaaatcttttacctaaatatggtataatgtataataatattgttgtgcgccttaataataccagttaatactcactacaaaagtaagaactatgaaaattataatcataggtaaaaatcaattcattttaaacacaatccgatgtatacatgagttcaaattgaaaacatgatagtgaatactctttttggatattcaccaacaaagaattaaaagatatatatttttcatttagttcatttccttttgtttagtagaatgtccacaatataaatatatatatatatattaataatttttaaaatattaacttattaatattcaattatgggactattacagtagagattgcgtattttatctcactacaaaaaactgtaatttttagtgacaactttttagtcacagcataatttttttgtgattaaatgtaatttttagtcataacaaaaatgttacttgtgactaa

SEQ ID NO: 163256 - DNA, 1412 bp, Cannabis sativa
gaggagagagaagagagcatatcatgtgcttttacaaactattgttgcaggaagaggaatgttgtgatgatgaaactgcacccttgagaaagtagtgatttcactttcattgatttaaaatcttaaaatttcatttgttttcaggcttttgtacacgatcctctcatcaattggcgtcttttcaacttcaatgaagttccacaaatgtcaatgcttgcaagtactcatgtccctgccgttgtgaatagcgaagaatctcctgcaaatggagatatgcctcaacggggcgttcgggaaagagaacttcttcaggtacattagaatctgagtgtgtcaagtagttttgcatcttttattttgctgcttatttattatgttccatatgcttttaggctgtcaaccaacttggtgatgcaaatgaggtcttaaacgaacgtgctgtggttgttatggctcggatgagtaataaacttaccggacgtgacttttccacttgctcgtcagtatcatcaaccaatgctgttcaactttcagtagaccacaataccttgatctccggagatactcgtgaagtagaacacggtttatctgttaagctgcaagttcaaaagttgattatccaagcaacatcccatgaaaacttatgtcaaaattatgttgggtatgtgccaattgaacccgcttcttttcaccaagtgttaattttggtcatttattgattccatcttcccataggactaaaaatgtaggtgatatttacataaaaatggtattgcatgactaataatgaaattgctttggttctttcaggtggtgtccattttggtaaattccatcacaacaactgtatatattgtacatatgttgtacataactttaaagcctaaaaaacaaccgtaagaaacttggcatttgatgatgtgtatatagcgcatgtatgtacagcttctcatgtaatttatgctctcttttagagttcttaccttttattattattattattattattttaatttttcaaccacgtgtttgtatgatgccattgtatatttaatttatgcatatcttatgaatggcgagtaatattcatttttatttacagttgtcttgcattcaattattttaaaaattaaaaagtaaaacgatagctgttattaaaaacgactggattatttatttatgggaaatttgcggcaaaagtccccaaaaggttcacgttgatgctgattagtgcccaaggttcgaaaatagcggcaatagtcctcaaggtcacactttttatttgtccattggtctccaagttaacagatatgttaaatccaattcaaatgtcacgtgtcgaaatattattggtggatattattattttaatttaaaaaaataaaaataaaaataaataattttttaaaaaa

SEQ ID NO: 163257 - DNA, 2117 bp, Cannabis sativa
taataatcataatcatataataatcaacattatcatcaccatcatgcatccaatgtcccttttttcatcctgggatgctttctgttgttgcccaaatactggacacgacccccttaaatattgcatttatatttttatatattaataaaaataataatgatgaaacgcacacactttcatcaacactcaacagccgaagactacttttgaattttgattgtgtttctcaagcgtgacgaatatgaaacttagcatataccattaattaattcatcacattttgtatgctaattaattatatataatcacttccaattcaactatttttataagtatactttatatattatatttatgcacttcgaagtttgaagtagtgagcggcaattaatgaattattatggtaacgtgatttacgtgattgaaaagttgagaatatatataacattataataaatattatatatcaataatttatattagtctaattttattagtgtggtttcacccttttatattaatctaattaatttgtatcaataatgattcctataattcctctcatatgaatatgagatcatgagttccattaatttatttttatacatagaaaagtctaattgaagttgtaataatgaaattaaagtatgtgaaagggttttatttctgtcttaatgactaaagctttcttgatccgataattgtttattaagtaataataataagaatatatatatatgatgtacgaaatgaagatggtaataataaacaatatagatgaataatcagggcatgataaggaagacaatgaggcaaaacaaattaaagttgggaaaaaatggtagaaagttgagatgttatgataatgatgaggataattgaccagaggacaagttgattgataaataaataaaaaaggaatatttatggcttgagatatactctctctttctctctcgtgtgctcaatcatagccttaccctctcccaatcatttcacctcactccattattatccctttttcttacactttccaggcctcaaccaaaataaattaagaaaaccaaaatatgtgtaattacgtgggaccaaacaaatttatataaatatataatccatttttttttttattgaaagggaaatgttttcattactcaactcatttctcaagaaaaaggaataggcatgacaagcagcaaggcataagttcatgttaaatactcacattacaagatctaaaacagatttttgttttaatatttaaagaattaaacacaccacatatcatatgctttaaactctttcttaattttaaagtttttttagaatttatatttaaattatataatactatattattctatatatattttgctaattattttaaatttaattttttattttacaatgtgtatatattgatacacacgtttaaaataaataaaatatattaaaatttaaaaaacataagatttaggtgatgtattttaaaaaagttagtgttcgtatatagtgtataatataaaaatttgaagtaaaattagaaaaaaaaaatggtaatatatttcaaatatggtaaagtacaaaaactattatgactgcttataggccattcttaatattagtaattagggcatttagccagtaaaaaataacaaatatagcaagaaaatttcgagtttacaggactaaagaaaaaatgtaaaggacatcaattatgctaggaaatatcatacaattattaatatatttaaatattaaatgcataaagatcctcttaattaatcaagaagctcaagctcggttgaagtatactgaagctctagttctagcgagtggattgatttattagaattagtctcacattgctaatgtgtagaaataaattgtgatatataagatgaatgggctactcctcccattgccaattggttttgagatggaaccctattcaccttattccccaaattctaacaggaacaggttgttcttttcacgatcatctttgttagaaacccgtttctagcctgtagtcctggggtttatcatttatttttatttttaatttaaaataaatttatttatttatttaattattttttcttagatatattacg

SEQ ID NO: 163258 - DNA, 2540 bp, Cannabis sativa
  modified_base (2209)..(2214): a, c, t, g, unknown or other
  modified_base (2453)..(2460): a, c, t, g, unknown or other
tgaggattctgcatttcctcgactctccatctcccaagatgaagaagatgtcgaaatccctgaatggctagatgactggtagagaaatcttatttccatttccatactattttatgggtggagttcttattcaatattgtgagactgagatcaactcttaagttgctcagactatgagaacccgaggctcggaagatgataaaagaaagtgcagagaagttggtggatctggttttttttacttgtggtccacaattatatcttacattgattacctatcttgtagcatagtagtggaattccttttctggagatgacctgctctgctggtaatcaatttaactaggctgaatgcttcaataaaaaaggtcagttgatagattgatttatttgttattttctttccttttgtttttagcatatatatatatatatgtaagtaaatgcacaagggattcactatttttaaggatgaagttcttgatgtcccaggcagcgtatgtaaaggcagatgagagtaatttgattattattattattattattaggtcagcccttgttcagtatttttacttggatctctgttgtctcttcatgtattccaccctgttatgagtacatgacacagaatcagatatgtgtaataaatttgttggaatacttaacactgaattatggatggcttaataagaagggtcaacctgaatttatggagtgcaaaatgcaactttttcaatactatatgatgtcaatgctaaattttggcctttggctaaaacacattgctccttggattggactttataatgttttttttttttttttttttacatatattgttcagtgagaatttacaactttgttactggtttagttatagaatctgcaattgaatgtaaattggtcggtcgagtttagagatcctaagataatgttgttagaactgtactacactataggtaagttttgtttatctttattttattgctataattattttattcttattttttttggttatttgaaattcttatatccgtttcctcaaaatagaaattaaaaagaaaaatctgagaaattccaattttatatacaaatattttgtacccaacaaaggccaattgacatttttactaccaactaccaagcatgtcattgtcaccaccaacaaaactccaaattataatatagaaaccaagtgtgtcaagttggagaaataattttacacttgtggagtttccataatcataaaatatatatcttatttcctcttggatataaaataaatgacaactatttctgcttgtagggaatcacctgacaatgtcattttccaaataaaaaactttctaatttcttttaattagaattaatttatgtaccatttaattataagattttcaaattgaagcgttcgatacctcgtcagattttaaatttaatttagaatttttcttcattattatagcattattaagtcctgctaaatactggactaaagtggtgtaaggacccattttttttctattttttttttttttgaaagagaaggaccataaatttagagtatttagttatttgtttgtcatgttgtctagtatatgctttttttttttttaacaaatactatatatatagctatatatacaagtactctatgacatttttacaaaaaaaaaagtattagatgacattataaaattaattctcttggcgaagtttcttgattaattattttttatcttaaaatttttattttactttttcaaaattttgttcacttacagttaaaaatgtctattcttacaaaacaataattatataaaaataatgttattagagggttaatgtttgtatacaaataaaaaaattacttgtcttatatattattaaattttgaaaatgtaaattttattaaacaaagtaataaagctaaatgaatagaaaaagcaccttataaaaaaaatagaaaaaagaagaagaagaagaagcaagattagtttatactactgcaaaataatactttcatttaaaagtcaataataacatggagctctaaaaaaaaatatttattataaaagaaaacgattgattttggtgagattagtacttctctgatgaatgagctactgcggcaagctttgataaaatacataaatttaaatcaggcacaccggctaggactatatcaaataataataataataannnnnntaataataataataaatagttaaaatcaggcatatctaggactaaattaaaattttaaattagttaaaatcaggtacatctaggactaaattaattaaaaaaaaactatgttatataactatattaaatataacataaacatagatataaaaatatttatttaaccttactcatatattatatatgtgtggagtgcatactaatttattatgtattgcccctgattttgtccaaaatannnnnnnnaaccggatgatgacacgtggatgggaatgggttagcatttgaataaaacagctaagtcttaaagcaaatgattaccttag

SEQ ID NO: 163259 - DNA, 4326 bp, Cannabis sativa
cttgtctttcaagtatgagaactggtttgttgacagtggcttagtaaatatgtcagctgtctgttctgaggtgggaatgtgcctcacttcaacgattccttgcttgatgagatctctaacataatgcacatccacctctatgtgtttggtgcggctgtgaaatataggatttgatgaaagttggtttgcaccagcattgtcacaccaaatgacagcaggtaatttatgtttgatgccgagttctttgaagagagagttgagccaagcaatttctgtagcagtttgagagagagccctgtactctgcctctgttgaggattttgccacagctttttgttttttagaacaccaagttataagatttcccccaatgtaaacacaataaccagtagttgactttcgatcatcaattgatccggcccaatctgcatcgctgaagcattcgacattccactcttttgacggtttgaagacaatgccttgaccaattgtaccttttaaatatctaaggaggcgtttgcaaacattccaatggtgttgtgttggactatgcatgaattggcttaacttgtttactgtgaaggcaatatcgggacgacttagagtcaagtactgtaggcctcccatgacacttcgaaagaagcttggctgatcaaaaattttgctgtcattgaggctgagtttgtcactttgagatataggagtagggctcggcttggagtgtaacatgtgagttttgttgagaagatcaattgtgtatttgctctgtgagaggtgaataccattggccccccgaatgatttcgaaaccaaggaagtaattcagagaaccgagagttttgagggaaaagaattgctgaagtttggcaataataccacgaacagtgtgatttttgttacctgtgagaaggatatcgtcaacatatacaagtagatataactcggcatcaccttgtttgtagaaaaatagagaaggatcagatacagagctgcaaaaaccaatggaggatagcacctgtttgagacgatcgaaccaggcccgtggtgcttgacgaagaccatataaagccttctgcagtttgcatacataatgaggatgagaagtactaacatagccagggggctgctccatgtaaactgtttctgagagggtgccgtttaggaaggcattgtcaatatcaacctgctggatgtcccattgattagaggcagcgagatgaagaataactcgaatggtggaacttttcacaacggggctaaacgtctcataaaaatcaattccaggttgttgctgaaaacctttagcaactagtcgggcctttagacgttgaaccgttccatctttgttgagcttgacacgatatacccatctattatcaatgacactcatccctggacgacgggggacaagtatccaagtcttatttttcaagagagcataaaactcagtgtccatggccgatttccacttcggattgcgtagagcctgctgcacattctcaggttcaaattcagtcattaaagccaacggtaagggtgaaaaggcatgaaagacacggggtttacgaatgccggctttggctctagtaatcataggatgggagggttgtgttggacgtggtgaggggcaaggaaggtgatttgtttggtgctgaattggaggttgctgatatggtggtctggtgtgggagatgggtgaaattggcaggtcaatgtgaaggggaatagtcgggtaagacttgatggaagttgggctgggggattgtggtgaagtagatgaaggaatggggctgtgtagaggagaaataggtgaacccgagagatgttcatcttgttgggaagcttgagaatgaccttataacaacaactacaccaggagcatgctctgaagttacagtggataaatatggtaaccattggggatattgactaggtgagagtgaagaatctgtgtgtgctgtagggtatgtgaaaccattagcaaatggaaaatctgactcatcaaaggttacactactagcaacataaactctacctgaggtgtgaagacacaagtatcctttgtgtctaggactatagccaatgaaaacacattttgctgaccgaaattgtaatttgtttgtgttgtaaggccgaagataaggataacatgcacaaccaaaaacctttaagaatttataatttgggacaagaccaaacagtttttgaattggacatttatagtttaaaacaggtgtggcaagatgattgatgagaaaggtagctgtttggaaagcctcccaccaaaacctttgaggcatacttgaatgggcaaggagagtgagaccagtctcaactatgtggcgatgttttcgctcagcctttccattttgttgatgagtatgagggcaaggatgtctaaatttcacacctatggattgaagatatggttcaaatttcctatactctcctccccaatcggtttgaacagttttaatggtggtatttaattgtttttcaacctgcatttgaaaggttttgaaggtggataaagcctcatctttggtcttaagaggaaagatccaggtgtagcgactaaaatcatctagaaaatggatgtaatatcggtagccatgcctagacataatgggtgcggggccccatatgtccgagtgtacgagttcaagggcctgcttggattcttttaaagtagcaggataggatttatgatgggctttaccaagttggcagctagaacaaaattgtgaattagaaggtaaagatttcttttcattgattaaaatatgcttgagtacattaaaggaaggatggcctaacctatgatgccacaaacttgattcactagtagaaacttgaaaacaagacttgacagactctaaactaggactgaaactaggactgttgacactagacttttgagtggacaaacaggaaggtgagtaactagcagagcaagttgctggtgtggtgagttgatagagtccattgttaagtttcccttgaagaagaaccctcttcgaatccatgtccttcaaaacacaatcattagcagaaaacttggcataagcattattgtcttttgttagttgagaaacactcaataagtttttagcaattttaggtacacacagtatggaattcaatttaacaggtgtagaagtaccatgagatttaatgactgaactaccaacatgagaaatagcaagggactgcccattaccaacaattaagcgactcttaccattgtattcagcaggagtttggatgttgttggtgttatcggtaatgtggtttgtggctccgctatcaacataccaatttgtgtcgtctggacgaggatgctgagatgagttggctaggaatgcctgctggttcgtgttgtttccatgctgctgatttgtattattgttctgggaagtattctgttgattagcagctggtgtaaaactcatatcaaagcggtagtagcacttgacaacagagtgtccaggcttgttgcatagttgacacaccacacgattttgattaccacggcctcgtccacgaccacggccacgaaaaccagatgctcggcctgtgtttgacgatctgccacgaaaaccagatcctctagcagcaaagttagcagagggggcagtcagatctgaagctgaggttgagttaagttgatcaatacgcatctcttgactttgcaaaagaaattgcacctcagagagagttagttggtctcctcgagacgtgagattaatgaccacagagtcatattcggggccaaggcctcccaatatgtaaagtataaggtcatcatcagtaaaagcttgtcctgcagagttaagaccatcagctaaagttttcattttaaggatataatcatgaatggtcatagaccccttttttagagactgaagttgaaacctcagttgcagtacacgggcacgagattgagtagtaaagaggatttcaagtagagaccataactcatgagagatgcgacatcggaggacatggccaagcatggcttctgaaatcgagttcaagagccagcttaatatggcctgatctgtacgaacccaaactgtgaataagggatttacctgctgcaaaatattaggatttggttcgacaggcgcatcaagaaactgaggcggacatggtctggttccgaagataaaaccgtcaagatcatgagcacgtacagctgggacaacttgggaacgccagtaaggatagttgtctctgtccaagcggatggtgatgggggccaaaggttgcagcagaggtgcaggaagcgcaggagcagctggtgccggagctggagctggaggag

SEQ ID NO: 163260 - DNA, 2629 bp, Cannabis sativa
gtaaaataaattccaacatcttttcccaaggtttttctttatgttcttcactttggaatttacttcacattaaattaatctcaaagacacacaagttcactaagtaatagtagaacaactatcctttacagaagaaacaccctcttctaaaaatataagaaatgaagaagtgaaatggttcaaccttttactgttggtttaggtcatatttatagtgataaatgacccttaaaaccgagctccaaaaggtctaaatataaagagaaaacattaattagttttcttacaaaaactcattaaatgacgaaatctatctgaatagatatgaaaagtatgcaggtgaaatcctgatctgtctagtcagtattgtaaatctaaactctatcaaagccaatttcattcccacgaaatttttcttagacatcacacaacttcaatggagagatattaatgaaaacatatcagaaaagaaataaaataaatcaattataaaaaaaaaaaaaaaaacatatataaatatagtttttattacataataaaatattttattcttttcatataaatctataatctaagtaacaatatattctcaataaataaacatatcgtgttttacaagtaaggaaacaatcaaaaaaataaatgaaaaatattctaaaagaaaagtcaatttctttaaacaaactgtcattccgttcaaatagatccaccatggacaaatttttaacaaagtttctttatatatataaaaaaataaaatatatattaaagatataactgtacatgttttcttgactaggaaatcaagtaagaattaattaataaagtaaatattaagacttttcttaaaaatataaattaaatatcaataatttaaaaaaaaaaaaaatcacatatttattcaccataaaactacaatctgatttgaaagacttttcacattaagaaaagagaaactattttcaaaaaaatattaaatttgaaaaacaaccaattttgaaaataccaaatataattaattttcttatttttaccgtatatgtcaattaaagactttacaactttgaatgtcgttactgattttcaatgacgactctttagtaccgaaatatgatctaatggtcatcacttacgcaaaagacccctttagtaaggagcaatgctcatattatagtatatagatagataccatgttaattaaagtggcggataagaaaaaagaaagaaaaggagtatgcaataacataaaggaaacattatattatgcattacacattggatccactcacaaaattattgggacttgacatacatcccactacccacaaaaacttaaaagtgaacattattagtgtctcttctttactaagatatatagtatatataaaaatatgtgtgcatgtgtgggaaattgccatagcttaattatcgagtttacattctgtgacatgggcttgcttctttatttagacactgtactagtccccttgagtttcttcatcacagtgggttaccatgcctaccttttgcactgtttcaagatcaaaccctcaactacaacctttggcatcaacaccttaaaacggagagcttggtttctgcagttaaaagatgtaagtatcaaatattgatggaataattaaggggaattactctatatattgtttttttaaatttttttttttttcaaatttacgatttgtgtttctaataaagtagtttttctagtggtttctacttgggttgctacacgattttttgttgttatttaggttgtagtgccagttgcaatatgagtttttatgtagaatttttgtaaaaatgcaaaaaaaaaaaaaaaaaacccgagtaattaattcataattttacttacatataattttgatctattaatatttcatttagggcgacgacaaaaaaagtatgttggcgattcaaagcttgagaaacactctaatggagaccatactcacagcctcaatagccattttggtgatactatgtttggcggccctactaaacaacgctttcaacgttactaatctcttgggcatccatccaatttttggatctcaatcaagtaagatctactctttgaagtacggatcatcgtcactttttctatcagcaagcttcttgttcgggtcaatggccattggatctctaattgatgccaattttatggtgaacaatgtttcctctgagttctctaattcttctttgaacgttacgaacacagtattcgaaaaagggtttgttttggcattggtcagcaatcggatgctttgcattagctttcctttcatgctatggatgcttggtcctttacctgttttgttgtcttctatggctcttgtatggtgtctttatcagcttgactttgttgcaaaatttacaaaccagggtaatattaataataagcactctctaaaactataattattttatatataatacatatgctcatttatctaattactgtttaagtgcatgtgaaatcgaaggagtttttttcaattaaatgacttctttaattagtttgtaaagatactagtattatgtaaaggactatgattttttttttttttttttttttgaaaaaaatgaaaaattttttaaaaaaaaattt

SEQ ID NO: 163261 - DNA, 2459 bp, Cannabis sativa
tgttaccaaacgacaccttagcaattagaacatttgcaaagctgatcatgaatgaattttttcatgcctcctttttaaaatcatattcaagttggtggaacaaaatttcttatgtgctgaatttttaaaaccaatcctaaaaaggttaagaagcatctcaactccatgtccaatctttttggaatctacaatgattattggacaccaataacacataatttagtcaattgttagattcagttcttcttctatataaggattattggagattagttctatttttttttaatttaattatgtggttattgcaatgcatcttaatatacatgattatattaaacccatagtaagtattctttttcttttatagaccattcataccacaagagaactattataagaaaaagattgagaaacatttcaaaaaaaaaaaaaaaacagaattgagaaaggtctgtatttaaatcttcttttacatttacatttgacactataacttgattccatattttcctatattattattttttttttgtgtaattgaaacactattttaatgactcggtataaattcattgacaggtttttattttctctattgctatcagaaaaaaaaaatcatgttggtgcaattttttttttttttttgatgggtaaacaacttttattgaaagcaaagaaaaaactagtaaccacatgagggggctacatcctttaaaaggccaatggcctcggccttatgcactctcgcccagcgagcaagcatgtcaaccatcaagttgttctctcttttcacatgaaacacaaagaccttagtaaaagacttacataaattcaaacactcacaaaacaaaggaaacgtctcccagccaaaaggaagttgagcattttcaaatgctttagctgcaatcaaggaatcggtctcaatttttacaactgaggcacaattctctttagccaaccgaagggccatagcaatgctcaaaagttcaccctccaacactcccttgactttagtccagcctagtgaaacgagagaagccccagcatccaactcattgaccttgatcactgccaaaccagcttcatcatctcgaatggaggcatcaaccatgcaacaccaagcctcgtctagcagggtcgagtttggcacaccagactcaactctctgcaattccacatactgttcttcaaagtgttcaaaccagtgtaccttagtattgaactcctgggtgcggcgagtgaagttactgaataagccatccatatcaattgcagtccctttaaagactgtgtcattacgccactgccaaatcgaatcacacaacaccgtaaccttcacctgcaaattcagattgttcaaactaatccaccacataccaaatgccagcaaactatcccagttacagtcctgtgttcgaatgccacccctgaaccagaaagcccgagtacaagagcagtggcaaaataaatgaaaagcagtctccttttcggcatgacaaagagcacacatctgaaggtcatcctggagaaaaccaagtttgaatttagtggggagaagatcactgaacagcctccaacagaaatgctttaatctaggatgcaattccatcttccagagtttttcccaaagcttctgtggctctttgaggcggctttcctgacttagccaataagcactcttgactgagaaatttccagaagtggaagccttctagaataaaacatcacccccccccccctcattcaaggttctaatccgaagtatctcctctgcaatgtcctccgaaaagcagtccttaaccaccttctcgttccaagttctagttctgggtatgaagagatccataactctctacagagattggtttcgttggaattgaaagttgtccttaatatcttctaagcctcgccttgggagccaaggtctgtcccatatttcataagatccgtcgcctatcagaatgcctgccccattaatgcataattcacgggcctctaaaatgctcttccaacaccttgaggcatttccagttttctctacatcccaaatatcagtgtgtttaccgtacttatttcgaagtagttgcacccacggtttatccttcttctccattaccatccaacaaagtttagccagtagagccaagttcatatccttaagtcttcggaatccaagacccccgcatctcttcggttgacacaactcactccagcttcttaaggcgcaataattctttttatccacacagccaatccaccaaaacttagcaattacccgatccaactcttcacacaaagtgataggaactctcactgttgacataaagtaattggggatgctttggagaacagagctaaccaaagtagtccttcctgcttgagagagtttttttttccttccaactgttaggttatttttagtattaattttagattaagtttagtatatttttaat

SEQ ID NO: 163262 - DNA, 2800 bp, Cannabis sativa
atacaggtgaacactaagacttgtgatactataactgcaggcatacaacttgggtttttaggttgtttgagtacggtttcgaccttcattgccgagtttaatgcaatgagagaaagtaagcatccttggagggcatacgtatatgctatgatcactatatgcttctcatttggcttgggaactcttatcttctctataccagtttggactaaaggatacaaatacaactaacatgggataagattctttcttttctgttctgctcaacttgacaaagtccttaatacaagggtcattttcgaaaaataagatcgaattggataggatgggattggatgatttttatgtatgagattagaaaatctaatttatccacctattgcgcggaatttaactacacggagaggtttggttagttttatgttattcaatttctcatcttaatgtgtattagcaaaaggaaaaagattaagcttgtatagtttttttccctttcataatttactgttggcaaatgttactaattcatatatatattttttatatgtataggattctgaaatagtcttgggcatggatcagtctgtaaaaaaataatatataatgtggctgtgagtccagttcaatatactattgtttttcatatttggcatacgatacaaattgctaacgtcaggtggaattgtatctattgtaatcgatttatgtgccaaaacatttcacatttaataatattattttttgaaggatataattgtaatgttactctatttttgttacaggatgaattgtttcttcgagctttataaatctatcttctgagtttgagaattctattgttgatcctatagtatatctttttatgtctttcaacaattcttatagaggctcaataccttttaagattgcggccaacctctcttcttctgtcaacccttttacctttgttgcttttttttttttttcatgaatttatggatgtaagtcctcaaaaatttccctggtatttgcttcacttctatcaagtcttctaagtgagatgggagttgccgagaagagaagaactgtgtacgaaactctgacatgaaagaattccacgaattaaactttcttggagctaatttgaagtactactgctgggcagcctttgccaaagtagcagagaagattttacactgtatattacctttaactgcttgtaagtccatttgtatttcaaatatttaatgtgagacaaagaatcttctttgcctatatacatttttcatgttggcattttaaatttgggcggaaggtcgagagcgttgatttctagtgagaatggtgatcctctagtccggtcaagttctagatttgtgagtttggagctggtcaggccttgaacgaggctcttaagttgatctatttgtgcttgaactaatgaatcaacttgacctgcctattgatagacctgtgtcacctgaggatctcttagagctggatcgggcacgtagtaatttgtattgtctgattgtatggtaggaggaatatcctatttgtccaatcctcttttacgattcagatcattcttgaggtcgtacacggtacccagtcgatcaaatattgatgtgcctaaaggcctttgtgcttgatcgttgtgaattatgggttggcccgatatctctatttgaggatatgtattaagctgatcatttcttcctaagtaacaagttggtaaaattttactatttggcccacagtttgactctgcgaccttagattgaacagtccattaattgggatttgttgagtatgtttagctggtcgttcttctagctcgtgtcgtggcctagtgggaatataagcatcaatcactgactgttggctggtgacctgatagtctctcctgatcagcacaatagcctgccttgaacggttgttgattgccgcttgctgggctctcgtgaattccatctctcaatcccttaactattcgaactggcgccgctgctcatgaaaaacaaaatttatagctggtcgaatatcttgctagtcatagtgaagagtgttattgtggctttgttttattcccaatgcagctcgtaaattctgtagttcggcgtcatcaccgattggcctttgagaatttttagtggatgggattccagtaccgggagtagtctgctcggttgcaatactagtatttcttgtctcttgcacgcgtggagtgaacccagctagaggggttgtcactccttgacctacagattgtttacatgttggtggctgaaaattaattacgacagggcccatcctagttggatctcttgggtttacaagtgtctacacgcttggatttgtcaccattagatcagttgtattagtttgatttctccttcgtgtttgcacaaccatcatgtgtcctgaaaaagacttaagaaaaaaaatttgtgtgtcattgctctcaatgaaagcattgaaatgttgaccttccttcagcaaacgatagtgagtcaaattaaagcgattgagaatagttaaataaaagaatataaataatataaagtaaaaagaataccaaatttatagaggtttgaccccttatagttagtaatagtctactttcgtttttgttgtattgacttgtgagatgatgaaaaagaatgacttattctctctcaaaagctcctacaataatctctaagtaatttactcttagtttgaagtttctctcttgagtgttctctgttaaaaattattggggtcacaattgtatatataaaatgtgtgttgagtcatcaaataaataagtcaaatttat

SEQ ID NO: 163263 - DNA, 1758 bp, Cannabis sativa
ttttttttttttttttataagaagatcgatgagatgagttcatcacattaattgccttttatttgttgaagtggtgtccactcttcatagcacccactcatctttaccaaaaaaaaataaaaaataaaaatcatataagctttgcctatgtcattgaaagagcactaaacctaatccccatttgatggtcaatgaattaaatccccacttctaaaaaaataaaataataaatagataacaaaaatataaacacacacacacaaaaacatagtaacattattttcaaagagatccaattaattatgaactcctttcttctccttggttttatttaatttttgttttacttattatttgattctgatagcacacaaggattctattgctttggaatgccacggaatttgtattcgcttaacggataagggaatcctagctagggctaggggagagagagtagaggacgtactaaagtggggccatttttataaaataaaaacaaatacattacctctttttcttttatttattgatatattgcttcctttttgtgcctataagaagaggcatttctcattttggtgttcattggcaggcaggttaagaagtatcacctacatatatagagagagagcttgagaagctagctagctagttagatatataaatatatagaattgatagagctaactaattttttaattaagttaaattaattatttattatcaaatatgggagataataatagtattattaggtcatcggtacatggggggaagattacagaggctctgagaaagatgaagccgtatttggctatggtttctctgcagtttgggtatgcagggatgtatattattagcatggtctccttcaaacacggcatgagtcacttcgtcttgtctgtctatcgtcacgttgttgcctttgttctcatagctccatttgcctttgttcttgaaaggtacttcgtacttacctacctacgtatagtacgtacgtacactatactatatatactagctacttaaaaactaatactattatatatatatatatataaatatatatatatatctttactgatgattttctagctaccgatttgttcatgctactgctaatttctttttatattctaattctaatgtgtatatatatatatatatgtgtgtacgtttcttctttcttctttctttttcacaggaaaataaggccaaagatgactctcccgatcttcctacgcataatgctgcttggtttcttagagtaaggccctatatatgacacgctgcgcttgattaattattgaataattgtttctcaaactacacatacataaacatatatatatatatatatttatttatgtatgtttatgttttgtatgtgcatgcatggttacaaataatttaacatgtgtatcataattcaaattatatgtatgtatatagtttatagaacgcatttctatatatatattaattatatgacgcatatataatttaacatcatttgtgtatatgatatataatatagctaataatatacagttacatattatttaataataattggaaaaaacatgagccacctgaaggtgggcctagaggtatattcctatgcttctttatcagaactttttcatgcacacacgcacacacatgctgacatgcatgtacagttaaaaataaccctcaattattttcttgatcttgactactctttttttctttcttttctttttcttttttctt

SEQ ID NO: 163264 - DNA, 3116 bp, Cannabis sativa
  modified_base (639)..(652): a, c, t, g, unknown or other
ataaatatatttttaatatagtgtcaaaataatatttttttttgatattttttttaattaaatagttaaattaaatatataaatataaataaaaatttaattaatttttttttattatttgttattgaaaatctaataatttaatatttataattaaattatttagtaatcatcaatcaatgtataatatccattaagaattttttacatatatatatatattcgtaccttgagcacataaaagaggcctcttgatatcaagagcacactgggggcaatgtaagcttgctttgtaaacagcggtgatcactccaatatcttttgttgccatatattcagagcctagctataattataaatcaatcgaaatatatacatacgaaatttataacattcatcgactcaattaataaattagtattaccattttgatgtttgtcttccacgataattaattgtgttggtgggactttgtgaggagttaggtcactcccccttttgatgcttgaaatattgcaccttaactatagatattagaaattgtcatttgtcataccaaacgaaacgaccaaatggagtggagtcggaccatgcacactcgcctatacatgtatcatttatttatatatttatatatannnnnnnnnnnnnntatatatatatatatttctttttctttcttaagaggttaatatcaatcaactcatctatttatataaatataataaagttaagtacaaatgagtgatttaaaccacgtgatgctagctcaagtggctatagggcttattggggtgcgtgtgggggagtcctacgggtggtaaaacaggttcaatatagtacacgaacacgacacgaattttacgggttaggattgagaaaattagatgcgggtaaaaaataagtccacacaagttgacacgaaataaaaacgagtcaagtacgatttttaaataaattaaaataaaaaattattaataataatataacaatgtaaaattttatatttagtgatttaatgttttgtcaaaaaaataaatactttataaaggagtttttcgtggaaaggaatagaagagtctaatgatgcagagaaagttgtttggagtaagctttgcattccgaaatcaatgggtggattaggattcaggaacattattacatggaatattgctaggattgggagatttgtgtgggcattaacttcaaagaaggacaacctttggattaaatgggcgcattgtgtttacataggcaaggaagattagtgggcctataaagctcctggaaatagcagttggtattggaaacaaatatgcaaggtaaaagatagtctagttcctgtcattgatttaaaaagttttgcttctttgaattataaaattggtgatggatatactaagctttgtagtccttcacccaaagttgattggaagaaggaagtatgggatagacttagtctttagaagcgtaagtttattctttggttcactatgttgaatatcgtaatagataatgtttgtgtagtttgtggtagccatgaaacgactacccaacatctcttatttggttgcacaaatagtattaaaatcttggagactctaaaaagttagttgaactgggtcacttcagccactaccattcaaaatctcttgaaaatggattcggaggagcaagctatctaggtggaggaagaaggttttttctacagtaatggctgctgtgttataccatatttggaaaaatcctaatcaagcattttggcttcatagagtctaatgtcctcgtgttattgtgaaacaaatcatgtttgaagtcagaagtagaatacaattttaaatgtcaaagaaaatatctatatatacatgatagaaattggagtgatcacttataagtttgataatatttcaggttggaaggcgcttctaggatgtaattaaaagtttgttggttgaataattataactcatttgattcatcaaaaaaaaagtaaaatttaattttctttaaaaagaaattaaaaatatataattttaaattttaaaattttgttatatataaaaatttatataaataaatgttgacgttacctatgaatgaaaactaaagaaatatgatccaaaggtattggacacactacagaggtttataggaaagagaaaaagataggacgagttaagaaaatttggaagactaaagtttttatggtggtcgatgctcctaaaacagtagtttcaaatggccaagattttcacgcaatcaaggggaaaaaatcattgttgctataccttctaaagttcaaattagcaatgctttttaagctttagaagaaaaagatgttgtagaggtctaagttggagaagttgattatgagttgaggtccattattgatggagggcgagattctttaccaataaatagataggttgtttttaagaaatgtgaaggggattaataaaactaacaaataaaaagatatgagaatgatgcataataagatcatattagttttgttggtctcttcgaaacaaaggtcagggctcgtatggggaacttgtacattaatatgttccaagaatagtagtgctttacttcaaatcatacttatcatcctaataggagacttgtgattgcttagaattcgaactcttttgaggttgatataaaaggagggtctagtcaatggattaattgttatgtgaagccaaaaaagagtcctagttttgctgtttcggttttggttgtgtatacttttaatgataataaagggaagcttgatttatggaaagccttagagaattttgttgggaataataaagatccttggattgtgggtggtgactctaactcaattttataaataaaaaaaggttccattttcgtggtaatattaatgggtgcgctcctttttagtagtgtgttagcaattgtggttagaagatgtgaaattcaatgggagtttttttacttggaacagtaagaggggaaggacaaaaactatgggaagctaaattgtgtgttaggtgaacactttttaccagtaaaaataacttatgcagtggatcaatatgcagagttgtatgtgaaggggatagtgttggatatttattttacca

SEQ ID NO: 163265 - DNA, 2336 bp, Cannabis sativa
agaaattccaaggctagtagttcgaaagaaaatgaaaatccaaattactattcaaacccatatcaatccattgtcatggctagagattcccttaaacagagagaagaaacttcaaagatgcaggcagaaattcagaaacttgataatgaagtaagcgaaatgaggcgaaagaatgaagaggaaaaggtgaacattcaagacttggaattggtacttataaagcgtagaagaagggcagagaagtgtaggagactggccgaagcacagtcatcatataggactatgcttgagaaaatgataagagatgctatgcaccagtaagttgattgattataattattaagtgatgagtataacaatatatcaatgattacaacatcacaacaacacaccttgaatagttgatgttgagattctttagagtcctccataacctgcacacaaagagaaaagaagaactaaaggagtacatggggtgtacatgaacactactccccatttctctctctaaaatctcacacacaaccatatttccatgaacataattgacataattgaggcataacccttttgagaaataatgggcttattggcccaattagagagaattagatgtcccgagcttgttagtagttagtactttatatcgattatggcccaatagtaatactatggaatacctataatacagttattttatatgttaaggaatatatatatatgtattccttcatagatgagattacaagttcatatggactgactttttgttttatgtattgtttctttcttgaaggagtgtcatgtataaagaacaggtgagactaaaccaggctgcatcaactgcactcatggcaaggcttgaagctcaaaagtctatctgtgatgcatctgagaaagacctccatagaaaatataaagaaagggatgatcttgagaaacaaataagaccagaatgggagcaagcaaggaagaggtcaagaatgaatgctaatgatgatctattaattgaagaaagacaccatcataataataagcctatgctgtgtttgcccgaaaccaaaccaaaaacacctttacacaaggaactcagagtttttcttgaggaagagcaaaaagcttctaatgctggattatcactgagtgaagaagaaaagcaatttcgtataggtaaggtgttgaagaaatccgaaaagaatttctccattgacaaacgtggcggggatcagagtaaagccattgttgtattggaggatgacaacatagttgagcccaagtttagtgaatcaaaagaagaaaacaacaaataccaaatgagatttccctctcaagaaccaaaagttgaggaagaagaagatgaggagatcaggaaagaacgtggcaaaggcaatgtagagaaatggctgcagttgctgttagagaatgctcaagaagacttgttggaagctcaacatgaactcgaaaacaaaagaagcaagactaataatgatgacagcattatcactaaactaaataacaagtaccctcaaatgaaggaaaagattgcccatgaaaaagataaggataagaagaagggaaaagaaaagagaattgaccatgatgatgatgatgatgaagtaagaactgtggttgaaggaggagttggtgaaacaagcaaaaaggcttctgaagaaagaggaaggagtcaaagtgttggaaaggaaagaaagcttgtgaggtctgagagtttcagggcttttcggcgaatcccatcatctccatcccttatcttaggcatgaagaaaagtgttgactgcatgggaaagaagcccatggttagtggtgatgatgaagattatgatgtaggaaatagcaatggcttcctcaacctcaagtcatccattaagagtatcaagagagcagtcaaaatatagaatgctcagttggggtttcacattattacatattttttttcttctccttaatactattaagattgttacaatatttttaaaaaaaataactgtgtgtaagttttaggtagtttgtttctttgattgattgctttacattacgtcttttgtttttgtgtataagatttgttgggtcaagtttgtaataacaacttgttgtttgataaaaagattataactgttgtgttctgtttcttccattctctttactccttttaattaatcctgttttagtgttttatacaagggataattgcggcaaaagtccccaaaaagttagggttgatgcagattagtccccaacttcaaaaattggcggtaatagtccctaaggtccccattttcgttagtccgttagtccctctttctaactgatccgttaaa

SEQ ID NO: 163266 - DNA, 1224 bp, Cannabis sativa
ctatgttaaatactttcaaaatgattattttgaaagaataatgataagaatgtttgagaaaattattgcatgatttgatccaaattggtcttattatatttaatgaaaagatgattgcttttccatatttgtttgcttatgcttaaagtgaaatttaagcgatttaattagtccattcatttcatatcatatgaaaatgatttctacttcatataagaactaaacattggtatggacaggttggctccgagggacggacccacatataatcgaggcggggcaatcgctctcctgaaaaaaaaaatcgggaaaaaaatatctatgcaatttaattagttacaacatgtatttgtaataaaagatgatatttgtaattataatattaatttttgtataatgattaagctacttagtatataggttagaggacaagtgttctaatcccattaaatgtattttttttaaatacatccccctcactttgaatcctaggtctgccactccgaccacctcatgcctaattaagcctccacttaatgaggctttcaatacaattagaaagatcaaattaatggtattatgagaaatgagttgtttatagtgacatgtgattcttgagattatctataacgaaaggagtcaagaaggaatcagcacttagccaaaagaaagataaatatcatatcataaataatagtattggttggtttaggctagtcggcattaattttcaatgtttatacatcaaaattggctcaactactgttttgttttttacacatcaacttcgtaatcttacttccattataccttatatcagtttaatacatttttatacatacgttatagaaaattatccatatttacaaatatacatgggaaaattaatacacattactctaatgcatatacatgtgcaataattttttttaaaaaaaaaataataattgtttaacaaatatttatcaaatttttagtttttctcgtgtattaaaaaataattttcgatataaatacataaatttaatttttagttgcatattttttatggtattaatgtagaacctctattcaagaatacattggaactaagcaaattatattctaattgagaggttataactaaataagttacactagaataacaattaaaataccaaaaaatatcaatgtaacaataataataataaataattattcatactatattataatagaattgtt

SEQ ID NO: 163267 - DNA, 1763 bp, Cannabis sativa
aatgaattacttcattaatcacaacctctttacagccaacaacaatcaaaccagcagccacatgcgactcacttacagatcctctctatatacactttctcaaactcttttaacttcttatttttcaagtattgtaatctatacataacaactttatgcacttcattaacaattgctcttgtcgtataagagtaagaattgtatatgcatctatttctattgatccaaagactataaatcacagcagccaaaataacaacatttaccctttgcttcctgttctttgactaccaagccagtcagcttctccagcctttaaaatcagtgggccaagctttgctgccaaccctattatgcaccaaaaaaatcacctctcttgacagacagcagctgaaaaataagtgttgttgcaattcctcagccaacccacaaatagggcattctttagtatctaaatcaacatgaaattgtccaagtttgtctcgggtcaaaaagctgaatatttacaacttgccataagatgaatcgattcttgggaacgtttaaagagctccaaacactgtttttgtaatggaattgttgttgtgttatgaggctgttatacagccagttggttctgaacttcccaccagttccggcagcttggatgttcccgctcgagaacttgtccctcaagtgacataactttttacaataccaactagagtcaagcttaagatcatacgaccaaaaggaagaattcttcaaataaacattgttgacccatttcacccaaagaatatctcttttggttgaaatggcccaaaatgtaattggcaaggttagcttgattccacttgattccctccttaaatcccaaacccccataagcttttgggagacaaacttttcccaagaagcaacatgaatcttacttctattgccatttagaccccaaagaaaacctgtacagagcttttcaatcttctttgtgacgctatacaggagaataaatatgatcatccagtaattacgaagaccaagtaacactgaatggattagttgagctctgccagcaaaagacagatgtctgcttcccagaatagacattttaatcccacattgatattagataaaataattaaataaaaatctactataaaattaaatttattttgttgaaaattttattaaaataattaacaaaaatattaaaaaatatataaatttggtgcttgaactaatttttgtttttgaagaatttgattgtaataaattcaactttaattttttcttaggtagggaagcatctatatatcttaaccctaataattcattaaattcacctcaactattaatgtgttatattataggtttttttcaaaaatattatcatcacataattataaaatataaaaaattatgtatctaaagtaaaagtttacaatactatatattttttacacttaatttacaataataatgttactactattattgacgtgtcacgtcagtcaaatttgacatttctaacattttcctatttttttttttttttttgcgttttaaaaataattttttagttactaataatgttgataagaaaccaattagttatctttatgtaaaaaaaaatatttttatatcatttaggcaaccttaaaaaaatttcaaaactaataagttgccatgtaatataacaaattaccaattttatttttatgtaccgattattttatatacctttttgttattttaaaagctaattagcatgtcgtaattaa

SEQ ID NO: 163268 - DNA, 1022 bp, Cannabis sativa
  modified_base (977)..(996): a, c, t, g, unknown or other
cgttttcatgaattgaaaaaagaatggggttttgaacaaatagagtcacttgaaactttcaaagatgtatgtaatggatacctctttaacgactgttgtgcatttggggctgatgtctttgtcatgaagcacactctcaactcagaaactctttctgtatttagacgtgaggatctaactaatcctactttccgttgggagattaaagagttttctaaaatggataaatcaatcatatctaaaaagttctgttctggagaaacacactggtatatatgttcatccaagacaatgttatttttgctttcaactttcagctcaagtcctattattactgtttgattttttttaataatgttataggtatttatcgatctatccgaagggtaaaagtagtaaagatggcaaagcattctcgattttcttatctttagatgatgatgatgatagtgctcacaaaaattcaacaatttatgctgaattttatttgcgagtaattgaccaactcaattcaaagcacgaagagggtgcaggtgattatattttcttcttttttatgataatatacaattcaatactatgtataaatttaatgtaattaattttcttgttgtgttgtaatattcaatttctgaatttgcagttaatcgatggtttagtggttgcaaaggttggggtgttcctgaatttatgttattggaagatcttcacaaatcttcgaatggttacattgtaaaggattctcttatagtggaagttgagttctccatcatgtcacgaactaaggtttcaaactcctagaattgaagaacccccagaatatgctgaacgctggaattttcaagcataatgtgactgaattttcaagattaatgtaaattagttgtcacttttttttatgaatcagcaggtcaatctttactccaaaaattcgttgactttggaacaaaaatcttagtgcatgtttggcatcatannnnnnnnnnnnnnnnnnnnttttaaaaacagaaaattgtttttaa

SEQ ID NO: 163269 - DNA, 4308 bp, Cannabis sativa
tgtgagtgtattatatgaaggtggctgcgttcattcttgaaaggtttctgtcaattggtgaagagggtctagaacactgctgttcttctgctgaaaattttctctctttgtcccgaactttagcccaaaatattcaagatcttggtagagaaccctgtaagcgatttctaaatcacataattaattgctaccttaagcttgctgagaacccaaggtgagttttaaacatagttttgattatgattatgatttggtttgaatgaattactttaagttcagcatttactaatgtaagctgtaattttcttgatagggcatgtgacattttagagtggcaactccctgcgaagcttactaatgttaccttccttcaagtactgctcaatttaacttttccctatgaaatgtaactttctgtagcattttcaatatgacatttttacatgttcagtgactgaaacttaatttgggtgtttttgcagaatgatccaacattaattacttcggtccgaaaattggttctcaaagtctctactggaaatcgcacccaaaagatgctgcacccaaatggtaaacaggtcttgacctttcgtaagtagaaagtgcatcctatcgatctctgaggtccatgaacgccgccggtattacagttgaagatgagccttggcgtttatgcattttttcttttcttttctggaactagttataagttgtctttgttctttaatttcaatgtttttgatccttaccaataccattgttctggtactgaaactttaaaccagtgtttcttaattttcttttaaactaatgacaatcaaattgtggaaatgagatcaaaacaacctatctcatatgtcaaaaaggtagtttagttagtataactggaaagacagatcaaagaataaacattacataatcagatataaagatggaaaatattgggcctcaattttgagataacgagttgaagccttcaactttgtgaggacgggactgaaagattgttgtcaagcatgaaagaaagatcatgcatttgggatagcaacatctctacatcatttgcttcggacttgatttctgcaccagtgacatttctgctcttctcgacatctttggggttccctcctaccattgtattatcaccagatgtcctgcaacatgaagataaagtatgagaactgaggtcttgactaatatttattctagattcgagaaagaccaagggccaaaatggttgtttcagcaaccttcttctcaaggttacattcatttgaaattgatctctaagtcgttaaaaaaaagtttcagagaagtaagaaaggtcaaaatgataaaaatgaggggaaaagaacgtaggtgaaatcaataagccaacatgaacagcatccacacaggtaagaactggaaaatgttgtgttctttagacatagtcaaatgcccaagaaatggatataaaatacttaaaaacatactattgtgatggatactacaaaagatagcattataacgtataaccaggcatgtcaaactaatattaataacaattgtatctgttataaagaaagttggaccaatagaagacctgtctaaactagaggcttctgacagcattttactcccttctgtggaaccagttggactgctaaatgctgctgaaacgacacctggttgtgaaatgctatcaaacaagtttatatcctgttggtgattagttgtgctaaacaaatttacatctgatgtcatgtcatcaagtggcacaagggtttgttttagagaactactaggaggattatttgcaacagttgagctggtaaagtcattccaatcatcaaatgaatcttcctcatcagccttattgtcaggtaacttgttgctagtgccttgccatctagtatcttggacccaatcaacctctgttgaagaagaatgactcacactttccaccaagtttccagtcttcacatttgtgttcgtttgaaacacctcagaaggtccagctaacccagagttagaattattccatgaatcatccacaaaccattcactaccaatggatgaagatcctgttgtctctacatctttagtgtcttttctagcaccaaatacttcatccatttgatcggaaagatccacagaacccacaaaagaatcaaacggttttgcttcctcattaggcattgcagaagcagcagattgaaaatttgcaccccaaccagaatcagagacattactctccccttcattagatggatcagcagcttcaaagtgctgaacattctcaaacaaatcaagatttctgtgaccttgtacactttgtttggcattggtctgattggtactcaccgatgactgtacagttgcatcggtagtaacacctttcttttcctcaggaaaaaaattctcaatattgactcctgacaaatttaaggaacttttactctgacctggcgtctcctttaggtaacgagattcaaatctctccgactcagaaggccactttatctccaggtctaaaagttcagacaatggaaattcatctttgggtgcattctttcctcggagtgagctattggtttcaacgggtgatgccacggtctcctgaaaaacaacatgccaaacttacaaatatatcatcgaaataaggttcaatgtccatatccatgctagtatgtggagacaacaaacatcttttcttatttcagcccagaaaagtcacacacttctaatctccacaaaacagattgtaggacagaacaaagattatggataaaaattacattctaagataatggtctgaacttggtattactatcgaaaccagcgcaataacaactgactcccaaagtcacatctgaaaaacaaaccaaagctagcaaatttctatggcacttgcggaattaggcaatgcttactgatccgtgatgagaaaaataaaatcataaaaaaaaaaggttcccaataatggaaatgaaacaaaatttgctgatattactaattaagtgaaaattcccagtacgtcaccactttgcaagtatacacaaaaaaaggcttaaaggaaaacactttcccaatatccatttccattacaaattagtagacaccgtgaagaattagaatcaaattcaaaatataaatcttatcttatctactaaagcaagtagaaaaatcctattcaaataacagttgaaatactcacaaagaactaaactaaattgttaagaacatcaacagttaaattaaaagcttcattgatttcttcctctaaaacctaatgtgaagcgacccaactgatatacgccaattaaaaacgaaatagattaagactaagaaaaaagaagagaggaagagagggagagagagaaagagagagcaggttataccgatccatccaaactcaatgactggagaagccattgataaccaagagtgtttcgaaaattgatgggttcaggtgggaggtcctccttagttgcttctccaccacataagacgcaaatcaaagactgtaagcccctaaggagtctgccattgcaatgcctgcaacgaagatatgggggcgagggatcaagggaggatagagcttcttcgagggaaggtagattggggaaggaattgtcgttcgggtcgtaggaggagagactggcgtgactcctgagcgagatctgtacctgttttatcagatcgattggaatttccatgtcgttagtttgtgacccttctctcagttgtaaatttactcagataggaaccattgacgccattttcttcgacattccattcaaactgtttatttatgtgaataatcatgttacctttgccaacaaaagccttacttttttaaaaaaatatagggaaattttatttattattttaaaaaaaaaaatttcctattacaaaaaatattttttttaattattttatagtttattttaataatttctcacgttacttcaaagagcacccccaattaggctaaaaactctaaaatacaaatacaaaataaacccaaaaaaaaaaaaaaactaattaggctaaaaaaacatattaaaatatatgttttgggtattagatttacaaaaagaaataattatataagacataaattttgtaaaaaaattacatttttatgtataaagatttttttacatttttacggtttctcatgaaaacaacacaaacaacaaaaaaaaagaatatactcacttagtaacacatttggtaccttttattttcaataatacttatttagtaccttatattttgaaataatacatatttgataccctaaagtaaaatttaatcaat

SEQ ID NO: 163270 - DNA, 1316 bp, Cannabis sativa
ataatacaaatagcttgaagtttcctggctcacccagttttcgagagtactgcggtttcaatcatcaatattctcaaggtaaacagtactattactctctctctctctctctctattgatatatatagcttcatttgcacaaatttttaacaatttataaataatttaagatgaaatcatcattatatataaattaagatcgccaaaaaaaaaaagttaaagaatgttgattaaaaataactattaatacacgtgattatatatgaaatattttatgtttatatattagagtttgaatatatacatatatatatatatttatgtaagtgtaggtttaattgagggagcaaattatgacaatagaagattcgtggaagaaccttctgatcatatggaaaaggtagtacgtacatatgggttttttcatttttaattggggttttattgaggatatgtatacaaaaaattattattttttatttcttttattatttaaataacagtaatatgatataaaatttaataaaatagatgaatcataataataaataatattatagtaaataaaaaataatatttaattgttatgaactaaatttagtataaaactatatcttatgttattaaatttaacatataatatatttttattggagtaataatttttagattctaaaatctagcaaaactttctttgttcatttttgtaatagtcaacgacataaaaattaatcttctatatataaaactctatcactttaaatatataatgtaagtgaccgttgttcttatgattctaattgagatatattataatgtaattaattaatttgttattatatattatataatatatatgtattgatgagcaggaggagggttcaatatcaaaagataaaatatcagtggtggtgaaaagaaaggtgagtagagtaagaagaatacaatctgcaatttcaaggactgtgctacccacaaaatttctttatattactaagtacaataaaactcaaactcaaatatagcaaaaccctaactaattaaactgtaaattaattaattttttcattatagtagtattgataataacaattctttgtatatatgtaattatatcatctgcttttttttctttattaatatgcacgtacttctttataaagagactctcaaatcaactatccgagctcttttgtgaatatcctaagctcatatatatatatatatatattgaaatatgattttatcctgttattgtacttttacggattgtaattcgtgatgtacggcagccgtcagatgaaagacttatttga

SEQ ID NO: 163271 - DNA, 2349 bp, Cannabis sativa
aaaataatttccaacagtccctattttcaaacggtcggaatcgaagatctcgaggaagttgaatgcgactaaaggtcctcgggcagtcaaaagaaaaggtaatcagcagatttggatccccaaagcttcggatactgggcgtgaattgagtttacctgaaaagggtaagggggtcgtgtctggcttgactgaaggaggaaaagcttctgtggctttttcttgtttgagggatgctgacgtggacttttccaacaaaaagaaaatggctttagttagtttgagtggtgctgttgggaaggatgttgggtcggccctagggaaatgtgggcctgactttgctgaggctggtggtgaaggggtcctaagtgttattgaagctattgggccagcaggttacaagtctaattctaggtgcaagaaggtggttgggcctgggttagttcactttggagatgcgtgcgtggggaatggattggctattgggcctgggagttcttccattaatggtcaagagacgaatgtcatatgtgatgagggtagggccttgtctaatttttttcaagcccaagacacttttcttcaagaactaaaaatgtttggtaaccttgatctctttgagatgaaaaatttgggtggtgatataggagttaagacttcctcggagcaaaacgaaagaactacaccaatcaagtagaggaaattgcttgagtcctctactcctcttcactatggaccgtggaaaattcaacgtcctcacccgaaggttgtttgtgatttcccttgggatagagaggccaggattgatattggtcgttgtgtgtctctgtctgaggaacacagtggccaggagagctctgttaatctgattattagcctgaatgaggaccttgggcttgggaagggtgtgtcggaagtggaggattctggttcccgtgtttcctttggtacccctgtggaggagcatgagtcatcttcttcataggagccatgagaggagttgcctggaactatagagggttagggcagacctctacagttcgcgaattgaagtccctagtgcgatcgtgctcccctgacttcgtcttcctttcagagctcaaggtggacgcgtctccgttggtacgtatcttttactctttaattttttattctaatattgtggttccttatgttggtactgctggggatattattcttgcctggagagtggggtttgattttgaaactatctctatctcttgtaatcatatcacaggtttggtttattcgaatcctatttcccaaccgtggctgctatcttatgtgtatggccccccatatttttatgctaaaaagaaattctggtttgagattatggttttgggagattagtttgggggcccttggctaattttgggcgacacaaactttgttctgcatgatacggaaagagaaggctcaaaggggagagatcagtttattcctatcatttccgggctgtttaattcctgggggcttatcaatctcccgatccagggggacaaactcacttgggacaaccatcgctctgggagtaatcatgttaaattggccttggacaagactttagctaaccaggactggatcaatgtgttcccaaatgcaactatctgctcgttccaaacgtgcaactctgatcatcgtcccctgtgtttatactcttgtgggttgggtgacaaattcaaaaggagtttcaaaattgaggaaggttggacaagagatgatagaagtaagatggttgttgaccatgcttggatgtcgattgttcactcgtgggcccctgctagaattttcaagaaaattggcgcaacacaggttgccctatctacttggaacagaggtcaatttgggaatattgacagtaccataaaggaccttgaaagaaagcttaataatttgcaaaggctcccagcgggttctagaaactggagggaggaacaggacgtccgacgctctctgaatgtctactgggagaaaaaagagttgttctggaagcagagagcccgggtgtcgtggctcacggaaggagacaaatgctcaaaattctttttcctctctgccgctataagaggaaggaagaatgcgattgaaagtatcttgagcaaggattatatctggcttactaggagagacttgattgggcaagagttcttgagtttctttggtgagaatttttctaggtcaaggattagacgagatcttaatcgtagaaatcttattcatgaaagattatcgtcccttgagcaagaggatctgctgaggatcccgcagcatgattgtaacaccctaactagcataggcatattatgtgatttttaaacatactgtgca

SEQ ID NO: 163272 - DNA, 1561 bp, Cannabis sativa
gtggttgtggttgttgaggctgcggtgggggtggttcgattcgggaagcattgggtgtaaagtctggtgcctttgggttcagatcatgaggtttcggtttagtataagtacagtataagtggtctggcaaattcttaatgatatcatcagtatcattaagattaagtttatcatgttgtggtgaggagctgggcagaggatcatcatcaaacaaattttttggaatgagattctctggctttagtaattgatctgttgcatcatcactttcactacccatttatcccaacaattactattctgcacaagaggatcatcaccaacatatatattattatttaattaccaaattaatatcataattatgaaaagtgtaataaattaactaatcaagatcattaactagtgacttgttcttcaacaagtcaaattattatacagaaatcactacccataacccaaagaacaactactacttctttttaataaagaactcaataccaaatgcattatcaagaactcatgatcatattgttaaagaaaagaaacagaactcattgtgtcgtgaaaaagaacattaattaacaaatatcaagactgtaaataattcaagatcattatgatgaaattcgtaagtaaaattaatccaagacccaaatgtacgaaaaatccatcatcacccaaatgaaactacttcttaaacaactcattaatgccaataaattcttaaagatgcagatcaaatcatagtattcatatatgattaattaaaagaagaaaagaattatattttgagaaaaagaattcaatcaaaacatattgtaattacgaaaatggatatacggtgagtaaaagaaaaacataattgaaaatggaagtggaataacagtcttaccagtcaagagatgaagagcgagagaagagagagaagaagacgaagaagacgaagaagacgaagaagaagaaggagatttcgcgctttgaggtcctctctgttttggaataaaatcgatcctctgcttaaatagctttctcctttctcctgttcacaaatcataatgatacacgtgtcctctaattctaaagaaaaaacttactttgttcgaaagtggagttgagtatattcatattggttatttaatagggtgggtgtatgggtttattataatattggttgtatctgatttttatcactgaataaattagtctacaattgagacatatattctatttcggtcagctcactaattaactaacttatgaccgttaagggctaggaatggcaattgggccgggccagctccgacctagtattgaccctacagtaatctggtccgacccgataactctcttgtatcagactgaaacagacctgacccatgttaaacaggtcggattttatcccacccgacacgaccttttttttccctgtactagttttagaaatatctaacaatgcactcaaaaaaaaataggctaattagtaattttctcctcgaactttgacatgtattaaattatgctccctgaatttttttagccgttaaaaattccccctgaa

SEQ ID NO: 163273 - DNA, 1180 bp, Cannabis sativa
tcgttcattcttcgatttggggtgttttgttttttgattttagttggctttatcggatcaaaccttcggttacccatgaaccctttaaacctcgggttaagggtaagagttttctgttgagtgagtttaatcagtgtaatagctctgctactcctacacagttgagatggaagccaattgatattccttcttctccaactgatttcattgatgggttgttcactgtttgtggtgctggaagctcttttcttcgccatggttttgctatccacatgtatgatcatttgctttacacttttatattctgttctgttcaaaatgtactctttttagttcaaatttatgtgaaaatactattgaattgttgtttaggagatatgatagggtgaatagttttaggcctattagaatctgaactatgacatgtactatttcatccttgaactttttataccgttgaaaatttctctgtgaactattaagattgttgaattattcgaggatttctgtgtaattttattcaattttactaattcggtaattgtccgtgtactaaattgttccctcgaactttagtatgtacaaattgtggtcacgaattttgaaatgtacctaatcgtgctcttgaaccttgacttggtaactgttcgagggcacaatttagtatatgtaaagttcaggggataaaaattaaatattatatgcttcttgttgaaatgtttttgaaaaaggtttatctatcttactattgatcatttatcaaattgtatgatgatttgctgactatgttatattctgtgttctgttttgttgggtcccatttttgaaacaaaagtagttggattttggattaaaataatgcccatgttcaaaatggactctttttaattcaaaatttaattgaaatactgctcaaaaatgttgtttaggagatatgataatgtgagtagttttattgttgagatagagatgaagctttttctttttcaaatgttcttcattgcaaaatacacaaaggctttatgtggttttcgataacagatattatcctgttactgtttgtaggtatactgccaataaatcaatggaaaattctgccttttgtagtgctgatggcgacttcttagttgttccacaaaaaggaagtgagtaactgttgtgatctgagtagctttaggat

SEQ ID NO: 163274 - DNA, 1751 bp, Cannabis sativa
gaaggaagacatggagagattagtgaagtctttggggtttgttaattgtagcattatccctgcggttggcaatgcgggaggttttgctttactttggaatgatgaaattaaaatttctgttaatgtggcggatagaggtgtgtatgtggctactgtttgggatcctaggaagatgttaaattggattctcctggctgtttacggtactccgtatgaaaatgaaagggtggccttttgggatttcattaccacggaagtagggaagtttagtttgccgtggcttctctttggagatctaaacacccttgctgatcctttggagaagagaggaggtacaaagattaaggagagggatacaaggcacctgcgaaatttcctcaattatgtgggggggagtggatcttggcttcaaaggttgcagttttacgtggcaaaataaccggtttcatggagggctaacgagagagagattagatagagctgtggcttctcatgattggctcatggagtttcaagaagcggaggttacaaaccatcaaatatcggtatcggatcatgggtatatcctggttgataccgggaatggcggcagaaaaagattcaaaccgtttcgatactttgatgcgtggagtagagaaccttcctgtgcggaagttattaaggatgtgtggggctctggttcggggctaatgggaagcgtcacccttcgtatcaacagtactcggagagctttgcaatcatggaagacaaagactttcggcaactgcgatcgagaaataaattctattgaggctcgactggcatggattcaaaaccaagggatctcaccgagccttgtagttgaagaggatgagcttcggagacgcattagggaattatggtataggaaagaaagcatgtggaagcaaagatctaaggagaattggttgaatctgggcgaccgaaactcaaaattcttccacgcgtctactgtgattcgccaaaggaggaacaagattcaagaaattcgagacaaggatgggaagtgggtttgcgaagagggggaagtggctatggtgtttcatcgcttcttcacggagttgtactcctctagtaacccgattattgatgacaagcttgaagaactattagctcctgccattaccatgaatgacaacttggaacttggcaaagttccttctaggaatgaaatagagaacgcagtggctaatcttcatcctttaaaatcgccgggacccgatggattcccggggtgtttcttcagaagacattggcgaattgtaggggactcggtggttgagatggtacaacgttttttctcttcaggagagattgaagaagccttaaatttcactcatatttgtttgattcctaaagtagtgaaaccggagtctgtggagaagtttaggcctattagtttgtgtaactttgggtacaaaattatctccaagatcattgcttctagattgagaacagttatggataagctaatttcgccagtgcaatctgcctttgttccgggaaggtggattgcggaatcctcggtcctcactcaagaactggtacagaccattcggaggaagagggggaaaggaggcctcatggctttgaaacttgatatgcataaggctttcgatagggtggaatggagtttcctccatagagttctcaaggcgaatggttttgatgatcacttttgcaacctagttttgaattgtgtgagatctgtaacttactcaattttgattaac

SEQ ID NO: 163275 - DNA, 2434 bp, Cannabis sativa
tataattagtgattccaaaaagcagtaccctgttttgtgtttttacgagcaatttatttcagtatcctctgttgtacagttttgtacactagattttgtgagtccgaaggcattgaatcaacaatattgcccaagttttgtgtctttatgcacttacattacattcaatgtctatgcacttgagggttgctttgttggggtctgtaagagtgtcggagtcttggagagtgttcctggttcaagtcctcgtcaatgtatatatgtgaaagagaaaatctatgttaaatttgtactctttgttctcttttcaaatttattgctgcactagttacccttaaatacattttctattgatggtttagtttttattaggacgatgttggatcatgaaattttatgcatctgaaatgctcttttttacaatataacacagaaggccaaaaggtgagtgaggagtccaatttaggggctactcaccaggaggaacgcttgaacgataaaaggccagattctggtgaagattctgatgatgatggtgatcatgctgaccctgtcgaagaggtcatggaagaggacttccaaaagtttactgggaggaagaaaagactctgggaattgaggcagaagatggttagtatctccctccctcttcttccttgaacaataattatctcgattttgatggattgaaagtgtagcttttttatagtgatcctttgttataaactaaaattagttacgggtaaatggctttctgtgtgtagaacaaagctagaaaagacaatcaaactgacattgcacaagaaaggaagcgaatggaagctccaactgagtcgcggggcatttctaaacaaaaatggcttgaagagaggaagaaaagaattggaaagcttttggatgcaaatggtttagatatgaaaactgcatacatgctagataccgaagagatggcagaaacaaaatataagaaatgggaaaaggatcctgccccttccggttgggatggtgagttcagatatctgatcattccttcatatgttctttttttcttttttcattgcaattatcatatttgaatcataaataaagagctaatactgtttccacttttaacagtttttaatcagaaaacactctacaatgcatacaaaaagagaacaaagaacatcgaaattgatttgacagaatacaataggatgaaagaatcagatcccgagttctatcgtgaagcttcgagtctccaatatggaaaggtactgtttgcaatgatatcatattttcagggaggatttgttaaaatcatcggatattatgaacaagcaatgatttctattttttctttatttttcaggcaccaaagatctcggaggataagatagaaaagatggtaaaggaactgaaggaccgagacgagaagcgagggtcatttagcaggaggaggaggttccatgacgagaaggatattgactcgatcaatgaccgaaatgaacatttcaacaaaaagattgagcgtgcctttggtaaatacactctggagatcaagaacaacctcgagcggggtacagccttgcctgactagcagcgaggacgagaattggtattgcaagacgttttctagtcatcgtcgagttttaactaactcatgtatgctaaaatgtaaaatgataaaatgttggcattcggtttgattttggaatggctgtaatattatcttctcatttcaccataattggtacttgatgatgttacccaccaattttggtctatttaccgttttacaatttctttagtaaaagtcatggtttcatatctcaagaggacaggactgaaaaatgcatctggaaaaaccatatgttcctacagatccatctaggttttattgtgctaataaaaagcacgtggacaccggaggagagtggtccggttgtccttgttcggctctggtgatgtgctaccgtggtagagaggtctctcgcaatcatagatgggtcattacataatttttttttttttgatttaagcgtttatatattacaattatgttacatctagactcgaacccagtacacctccaacacacacccacctatgtccacttgagctagcctcaagttgagtcactacataattatccatacatgacattggcctgtgaatgtttgttgtactttatacaataattcttagagcaactctaatgcaaacattttaaaaagtagctaacaattttcacatcatcttaaaatattatatataaatatatttttctttatttatattatttttgaccactttactcttaaaattattccactaagcaattttagaagttaagagaatggaccaacactttattatttaatatattattaaattacttttaatattttaaatattatattaatacacttttttgatagaaaaattataaaaa

SEQ ID NO: 163276 - DNA, 3414 bp, Cannabis sativa
ggtctaaagctttgaaaattttcctaaacaccaaaactgttttaatttggcgtttagccaaaattagttctaacattaatgcttatttttaattttagttcgtttggcgcctagaatttaattaaataagacaagatgaatcatgtaatccaatatttgcatatgttggaggtctaaataactaatttaattagtcttatctatatattttaaatttaataggcattaaaacagaagaattcataataatttatttatagattttttatgaaaaatttatttattaaaattagtgaaaatgtataattttaaattaaattactattacataaattcttaatatttaaaataatattatttaaataatagatgttagaattatatattttctttaaattattattagtatattcactttagacagaaaatatgccataataattagctaaagtttccaatgctaagctagatcacgagttcaattgaaaaagaactaagttgagatttttattttttttttttataaaaaaagaaaattaggagcatctttattggtgtgttcaattaatgatacattataaaaatatagtactctagaagaaatttgttttataaaaatatgttaaacccggtaaatattaaaagtgttgacaaatttgacaaacaattatagcagtatattggattcatattacatttgccttgtcttagttgattcttttggaagaaaattttagttgatgaatctatgttttttcttaatttatgcttaaagaaagatgaatttttctgtttgaattagtaaaacttttttacttctaagctgatacatatgtaatgcagtgattgctaatatccaacaaaggtagaagtaaagatgaaatttgggaaagagtataagaaacaaaaggtggctgagtggactgaagcctatatggattacaatggcctcaaacatatattgagaaatatgagagcatacaagcagaacaagcaccctgcaatgaacagaactctcagcgggttttaccgccaatctagcagccgctacaacgaggaagatcttgagaatcaagcaatagaaattaagacgttgcagagagatggttccttgcagttgtttgagacagtttttattggacagcctgaagaaggaactgagtttgaggtaacattcttcagaaaacttgatgaagagttttataaggcaaataacttttacaaggacaaagtgaaaggaatgatggatgaagcaaatcaattgaataaacaaatggaatctctaattgctttgaggattagagttgataaacgtagtgtcaaggggtttaattcaaacagacatagtcaacaagaacaaagtcaaagcagtggcagtagagagaaagtcaaagttggagaagttcttgagcatgtgaagattaacaatgaccctcaatcaccaatttctactacaattaaaggtgcgttgaaagactctaaagttgaagacttgagttatagtaaagggagtttgagaagagctgaacaacaattgagagttgcatttattgagttttaccataagctttatcttctgaaacaatacaggtaatgaaaagaaattgttacactcatattcttgtccttgaatatataccatttccatgttcttatacttttttctcaatggatgatggatcagttatatgaatcttttagcattttccaagatcatgaaaaagtatgaaaaggtacacatgcttgtacttctacagattataataatagctattcattatttctacagtaatcattatgttgaaacatgtatagtgcagttaactttatttgcataatatgcagatctcatcaagaaaagcatctaaattgtacatggaagttgtggataactctgtccttggaaattcagatgaggtctgtaacatctttactttataagtcagtgtctaaaatctaaaatttaagattttttgtagtacaatataatatatcatgtatgctagtttgaccacaatttcatcacagctcattgatctcttggagagggtagagacaaccttcatcaagaatttttcaaaatccaatcgcagtgaaggtatgaaatcgttgaggccaaaacaaagaagagaaaaccacacagtgacatttttctcaggtaggaaccaatgtgatgaagttaattcatttgcttcacatggaaacaaacctaatacaaactaatcattgctttcaggttttttttcgggttgcacggttgcgctacttgttgccattgctttgaaaattgaacttcataatctgccaactaaagaagagggagtgcagtacttacagagcatttttccactttacaggtaaccaaccaaccatagatcataatcctaacttctcttctgtgactttgctcttccctaataaaataaaaatgtaatcaatgcagtgtatttctatatgccgttctgcaccttctcatgtatgctacaaacatttacttttggagaagatataagatcaactatccatttatatttggtttcaagagaggaacagagttggaatacagagatgtttacttactaagtacaggacttgctgtactagcttcatctgctttcttggcaaacttgcacctggacatggacccaaatactcaaaaacttaaggaagtaactcaactagttcctctagctttagtcactgtaagattctactacccaagttaattgcttttgaggtactttgattgtgtacattgtgaattgatatttctttatcttgtgcagcttgttcttctcctcattttttgtcctttaaacatcttataccgagcaagtcgtttcttcttcattcgatgcctttttcgctgcatactcgctcctctatacccggtatctatgaatgagttctgttagtatcaaagaacataagtaaataacatcagccagcttaaatgggctcaatcaacatttttgactgtgtttggatgcaggtgacattttcagatttctttttggcagatcagctaactagccaggtttcaaagatatcttaaatttcattggatgcaatctctgtaagattacaataaacttggtgtggttttgactaaaggctccttggcatattgttgtacctcagatgcaggctttaaggagctgtgttttgtatatttgctattatggtttgggagagtactcaaggaggcaagaaaagtgccatacccatgggctttacaatacactctactttgttattgctgttattccatattggcttcgtttcatgcaggtatttcataacttttgattgtcgttcatgattttagtaaggctaattaggaatttttttcccaaactttgacatgtactaaattatgtccctgaatttttaaggtcgttaaaaattcttcct

SEQ ID NO: 163277 - DNA, 741 bp, Cannabis sativa
aatttattgtagtacaatttttgtggtttgtacgtgtgtatatattaatgcaatattatataactcgtgttttatttattttttgactttgttattatactcatatttaagtttttgtggagcaagaactaataaggtgttgagaaaatacactttgactttatctacataatgattattgttgtaaacgttgttacagaaaataaaagaggaacaatattactaaataattggattgcattgtaaattaagtcgttcttaaaatttttaagacatgcgtggcactgtctaaaaatgtgcaagcagttgaaaaatgtcaatcatctcgcccagtagtacactgtatcaaaacctcattacgaactgtcatatacaccatctaataatattactgcccaaaataattcaaatgggaaaattgtttgtaaaaaagggatgtcttttttcattggttctgatgcgttaatatataaaacaaaaaaaatagagtcgttttttatgaattgtgagagagttgggtcgtagctaaaaaaatatgaaaaaaaagtctttgtttatcaattaatgaaacatgtttaaaaacagttttaattaattaaataaaaaataataatttttaataaataatttttctctaaaaactaaggtacacaccatactaacaagccaactaggcttagtcgatcggacgaactgtaacgtccccgcttcaagcctctattgggcccttacacccacgga

SEQ ID NO: 163278 - DNA, 4520 bp, Cannabis sativa
aacatctatgttgcgaaaaaattaggctgaccatggcatgtgcaggctggccggccactttttttgtagctggcccatccacttcctcagtaggtatgctagccatagcctcatcgaagtggtccgatgatgactcctcaaaatggacaatggtcttgtttgtttgcatgcttctcttatacaattctctaccctgggctagtgttctttcatgaaaagaagctctcatgtaggagaggttcacattggggttgtgcagcttaacctcgtacaagacctctaaaacaagccaagatactcgtccctaatggcttgctggccatcaagggcaagtttcaatgctttgttagcaagctttagttcttcattcttcttcccgagttccacccccatcctgggggccttagcagcaaaagtggtgttttcttcaatttttgtgccaagcaagtgctccaaactggtgatcaagccctactttttttctacaagagcacgagccttggtaagggaatccttccttgctagaagctctgactcttaggccttatgttcctcctgaagagcggccaaggaccccttggtctttccatgagaaaggctgaacttcaatagggtctgaaaataaaacaaaatcgagttagtgccagaaacaggaccttgatggacatcccctttgtggtgcttggccggccagcttctcactacgttagcattggctagccaactttgcaaagatccattcttgaccagccatcctttgatagtacaataatttgagcaaaatcggatgtgtaacttaccaaagtcaagtcctggagaccactagatgacaacctctttggcccgtcatcgtcaagttcttagagatcaccaccaacaatgggtagaattctattgatatgcctatgagcagcctctgcaactctctgtctagtggtcgtgcatgccccacggctagatctctaggcacctttcccgaaggtcagtgtggtggtggggtcttcctcaatggaggatcaacaatcatcatcattccaactggtcaggccccggaggagggggaggtagtgaagactctacaacatcactagatcgagtggtctgggccaccttggccctgggatgacatgaagccccaccttagggcactccaacaaaatctctcagcctggaagccatatctgtaaaaaagaaagtaacaaagttagagtacaggttacaaatatttaatacaagaaaaaagacaaaaagttgatgctatcaactatcaactaccatcaccctcggaagaggagtcatctaaacagctagtattcgccttacccttgtctctagacgtaggaaaggggtaagcaaccctgccagaaccttagcctctaggcctactcagaaagtggcatcgccaatattgcctctacgaaacaagcattggtggagggctttttctcttctctccaagttctttgcaattctggagggggggatatcgtcatccttgtcaagagtacgtccccctccaaggcaagcctcctcaaccactggggctctatctggacctcccgacagtccttcaacccttgcaatgccaaactttaagggagatagatcatatctctagaagttacctgtacatgcaagcctcaatatattcctcctatcagcgagagggatagaataggattagctctatcccacatctggagggtggggatggagcgtttataggttggtactctctgaaagtggcattgacggacttggtggatgtcctaagtgataaaataggtcttgacatatcctcccaccttcgataagggcgtgctaaatgtttcaccaaacaaccgatagccaatttggctaaagtagaagtatcttgtctagttatgttttgggatagacttcaagtcaaagatgtaccctatctcataaggggaaggctgaggctagcctaacacagcatatggaatgaacatcgctgaagggtactttataccttttggagtgatttgagtcgggcacacactgaagtatgcggtgatgtctctgaattatgggtgcagggccaaaactggtccatgctctatgtggcactttgaccatgccatctagttgagggccaaccaatgtgctcgttggtccctcaatggcttgtcacacttatgatctcataccagtccaatctccctaatcctgtcaagtgtctcgccactgataatggatggaggagagacccatcggtcccgctgctccccctggtcaagaacatgaggctcaataacctccctaagaacgtggtccactctaaccattgaaggttgactaagcctattcaagggtcaccagcctcatcatacaagccgagagggctgttgaggaaaatagaacatgtcctatactaaatcctcctgacaagtacaacctcatcgacctcgggctcattatccaagctctccgcatcctggtcagcgataggtgcctctacccagccaacctctggctctctacaatccgaaggctgtgcaacctcctcaactacacaagccctacctctagtagccaccctggcaatgtgagggttaaaaggtggtgccctacaacatgtctgtttgatccttgccataatggacaactacaggtctcaataccactcgagaagctgctagaggaatggactagatactagttcatagagcgaagaccaactgaatctctgtcaatgccattgtcacttcctccaactattactcgagatcatttgcacaaaagagactaggggaggtgaggaacctgacaaagcaacgaggtgcacacaaagttctggcgaatcgtagccaagggtacttgccaaaaaatctcatcgtacaaggttgagtatcagcaaagtatcatcttaggtacaataactttgacaaacattgagtcttaaattgagcattcaacaataatagactcaccattaagtatcgtaagggaaccacatatgagactaaggttgtacatgcctacaaggccttaacgagatgcttgctaaggtcaaaagaggatagaaaattggctatcggcttggaacctaggcctaggctggccagtgttcccaagctatgagagggtcggctagggtcccatgcctaggcatgaatgggccaaccctctatggtgaacccttatggccagccagctcccatggaaagaccctatggccagccaagtcttaaccaagacccctatggctggccagggttgatgttgaattaatgtgtgtgtttttgaaaaactcaaacgtattcttcgtgctctttgtgactgaaatagtaaagtatcacaataaaggtcaaaatcgaatcttttttgttagaaaatcacacattatgcattctaaaactatcatgtagatcaaaatacgaaaaaagactacaatctaacgtgaaaatcaaagaatgttaaaagcaaagaaaagcttcaaagtaaccatggaaaatccaaataagcaagtgaataatgggatttgaaagcttacccactagtataaactattgaggaagatggtggaaagcttgcatcgttgaaataacgtgaaaatcctaagagttggaagacaagggagtgttggcctcaagggaagtgagagctttcttgacttgctttttcaagagttagaacgaaatgtgggaaatgaggactgagttactcccataagcttatatagcttttgtgggaccctcactcacttgccatgcatcatatatcagaaaacatgcaaaaatgtaatgttatcaattttttgcctaggaatgcataagacaaccaagagaaaatatttcaaaggctaaatatactacaaaatcttcccggttaaggctacatcagtccaaactaagctcaaaagtccctatgcatacaaatgtccgcacagggacttgctgggcaaatgttatcccaatttttgcccacttgacgtagaatgtccatgtggccaagatcaatcccacgtgggagtatagcttgtcaacaagaagtccatgttatgaactcaacacttcagcaaatggaaggtcggagtacttaggaggggcaataaaatgatgaaccagccaccttagaaaggttggctgaccacccttggccagccttttggccagtgtaggtcaaccagcctccaaacattttaaggccagccagcctccatctgacaagtgcatggctaaccagccagcaactggtaggtgcatggctaaccaacctgcatgtaacgccgaaaactaattaggcatgctacccaggatacttatgaaaccctagtcccctaaataggattactagagaaattagcgcaaaatttaaactttaatcataaacggagtaaaaataaaacttgtaataatttaactttacgatctaaaagttacggaaattgggatccctaaaaaacatttacaaaatattattacaagtcctttttctttcagctggcctaagcggtaaaacagagtctcaagaacacaacactggtagaccctaac

SEQ ID NO: 163279 - DNA, 984 bp, Cannabis sativa
aggcggcccatatatgcctagtaacaaccaagattctctcagaggatcagacgtgatttctccaacaatcacatacttattggaggataggattttgcattggaccccttcatccagcacatacataggcctcctgaaagtccctgaggagagacataatgcatttcctcaaacttgagtttgttacaggttctagcaatttttttgaaggtagtctaatcttagacaagattagcatctcacatttttgttgacgaacaagggccgccaattgaaaaactatcgtggtgctccctagaccacggtagttctaaggtaggattttcatggcgaccgtggagacttttttggtcaagtctccatagccccaaaagaaaaatcgttcgtgttccttccatccttgctttcttgagatttcgacaattcatcatcaatctctttgatgatacaacttccttctaacttttgatgcttttcaatcacgacaaagtggttatttagatccacttttagatcaataattctaccttcccaatgactttgggtaaagaaagagcttctagtaccatttttggatggcttgctccctttgaaggacttaggtgtggccaagatgcccggttgatttttttggtggcctgcctcttttcttgcatttacaattctcattaattgcgattgctttctttccccttggtcttcctttctgtttggataagcttgggttgccattggagccagtagaaaacttgcctgagttgagagtgaagtttgacccttccactcgtgtaggagtagtcaaggtttggggagggggtgccatccaagtgtcatcgtgcattttgaacttgtgcaaaaatattggacaactgaggtttacactagtgtaggccagtggagattgatggaggagtaaatagaatcccatcagatgccttgcgtttcctaggtccatttaattgttcatggactctaaagtcctca

SEQ ID NO: 163280 - DNA, 3363 bp, Cannabis sativa
tgacagcaaattgattgggaatgcattttcccatcttgtcgcaggaccaaataaaatattaagaaaattaccaaaaaaaaaaaataataaaatattaagaaaactcacttttacattacattctccactttcatacccgtacctgtactgtacgggatgaaaaatccacataaaacttacgtgattttctaccattaaaaaaagaaaaaaaaaaaactaactaattctgtaattaaataacttattaaataaaaagagacctcgactcgagtatattttgaaaaaaatctcaagtagacttccaaaaagtggttttggtacactaactattcttttttttcccatttacgagagcctttctagtttcttttttaggataatttataaatattcaaaaaaatttaaataatttatagtatcaaatgaaagaataaatagttatttattatagtataaaaaaaataaaatatgtagttgaactttttttgacaccgtaaattattttgattttttaaaaaatttagcctaaaaataattactaaaaaaactaaaacccatgtcaaaacagtcgttctacaaagtgtagtatagaattattccctatctgaaatactaaatgttttttaaataaaaaaaaatgaataataattacacaataaattacatcctaaaatatacacaaaacacctagagaaatttataaaacttttaaaaaaaatcataatattactattatataccatgtacattaaataaattttgtaaatatacttagtttagagatatagttctccatttcctatttaaatcgaaaattcctctctctattaattaggaacgaggacccgcgcccacatataaagtggatttagtttaatgctattatgatttcacacgttaaaagtcatttttcaaataaataaataaaacaaaatcacacatgaaagtagttggacccacatcaaaaataataatttttgttttgaaattcagttattagaagagaataaatttagaaaattgacatataaaaatgaaaaagaaaaaggtgagctatgaacattggtagattaattacgttttttttttcttcttaatttcatataatgaaattaaattcttgtccattcctcaccacttaacatatacccaacagctataggtctcaatttccctatagcacagatttcttatgtttataaacctgctaatactactgtccatttaatggctaagttcgctctttccgtcaatactaaatgtacatgtttagaaaaatgcctctacctctaatatcctttgtattttttgttttaatataaaggcatctttatcttaaagaaaaaaaaaactctcaactcaagcggtaatagatttatgtgtgatggcattattgacattttccatgtatagttttatttttttaatagacattgtccatgtataattaactactttatttattagaaaaaattaaattacttttcacaaatgtattaataatttcatttttattttttctcctttcgtaattttattttttttggtaaaactactggtgtcttcataaacttaaggaggtatcatgtatcacggacacacgccctatgttttagacactaggtggcgtttggtttgggtaacgaagaataaaaataataataaaataaaataaaatttataatttaaaaataaaaataagaataaaaatgaaataaaataaaatttaaaatttataaaaaaaattaataaaaatactattaaattttttcttaaattagtgtttctttctaatttaaaatggaatagtcaatttaccaaaatagtgaaaaaattattttttgaaatgatatttcaataatttaatatgtaacaaaataaataatcattctcttccattttattacctccaacaaaaccccacctaaatttatacattctccgttttaccctctgaaataaaataataattatatataaatatatttggctttatatcacatgatacatgttgtgtcagcattctgtatgcaatgtgtgtttcattcttatagtaaatatacgatcatcatgatctcacggaaaaaatactgtgggggtgtgcagcatctgtcacccttctcaaaaatatcattttccgaacattatacatgtgtgtgtataaacaatggcgatgattacgatatattttagaaaatcacaataagagcataacaaaaataaaggaaaataattttaaatgtttacctgaggcaaaggaagaatgacaaagaggtcaaacagaaagcctctcttggctttcaagtaccttaaagccacagacctagacgaggcggcatcactcatcccgctagcggcggagccagcggcaccggtcccatccacggcgctaaccacggaaaacgaccgtttcgccatcttcagctgtagccacatgttccacacgtgtaaggcgtccgtcatgcacctgaggaccgttaccgttacggcgaaccacccatcgacgaagagacacatacacgtgtcgcttactgatagggcgtagaagaagagcgggtccacaaaaagcccagtggcgcacaccaacaagaacaccctgttccattcctggacccacttcgccctcgggtccaacacacgcgccgccccttcacccaaccaccaccgccctcctcctccgcctccgcgcctcttggattctttgtcgtacttattttcatcgctgtcctcaccatctattagttcctcatcttcttctagtattttttctctctctcctacatcgtctccttcgtcgctagtctcttcatctgtgaagtactgcctggtattgtaagtattgaaagatatttctctctggtattgatggtgaagatcggtagtattagtagtagtagcactagccgcactagccatggaggctagagagagaagaaagagatatagagtgtttggttggcaagaaaatgagggttttgagagaagtgttacatgtataattttgagcttataattattagatgatgtttggtttattgggtgtatttttgtggaacttgggaaggttggaaggacaacaaagaaaataataatgagcggatttggataatcgttagccagttttgttgcacaaagtgacaattctctcatttattattttaaacggaaattaccacaatgccctccagtcaaataacaaaattacttaccttcaataaattattggttgattctacaattcaccccgttaaaaagaatgtactgatgcaccctctacctgtttcggcatccagaaaaaatttttagtttaatttttttatatatttatgtacgttatacctatttaagacatcttacaaaatt

SEQ ID NO: 163281 - DNA, 760 bp, Cannabis sativa
ttagaaatgcattgttaacatctaactactgtattgaccaattttttgctacggcaagggagagaacaactctcatttttattggttttacaataggactgaatgtttcaggaaagccaaaaccaggttgttggtgaaaaaccttagccaccaatctagctttgtgtttattcattgtcccatcaggataaagcttttctttgtattcacatttgtagcctatgggagttcttctatctggtagaggaacataagtccaagtagcatttcttttgagaacaatcatctcttcagtcatggcattgttccattgttcttgttgcaaggccatcttgacactagttggctcttgagagaccagaaaggcccttggttatgtatggctaacttagcactagttttcatgttgtgcttgttagttgcaactacaggtagctcaaataacatagtttggggggcagaatgaagacttgttttagtttggtcaagattttatcaggactagaaggcactggtgacacaaaaatatgattctgctcaagttgaggagtagggataggttgtgcagcatctaggggtggcaaaatgggttttaacacgttacacgaatacgacacgaatttaatgagtaaaggtaggaaaaattagatgcgggtcgaaatcaggtcgacacaacttgacatgaaataaaaataggtcaaacacgacacaactcgcttaacacgaatttgacacgatttttttaaataaaataaaataa

SEQ ID NO: 163282 - DNA, 1505 bp, Cannabis sativa
  modified_base (1466)..(1478): a, c, t, g, unknown or other
tattggccgaagcttgtggaatgactgaactgaaacacaaggtatttgcattactgaggaataactgatggtaattactggtcctttaaatttagttatattatgtgtgttcttattcagtatttcttcgtgactttatgttcaattttttttttcgtaaagataattgttatttgtgttcataggaatatgaaatggaaagtaaacaattttcattctatttctgttgcattttaaagtattagaatggcattcgaatggaatgttctttccactattttggtggaatgactattctatttttaaaaaaaaagaatgatcattccaatgtatcaattttttttatgcattttaaatttcattccattccatttcttattcctatattttttgctacgaaataaaattgttcttcctaatctttaattggtaagcctgattcatggactattaccaagatttttgatacatttcgtctcactttgaaggtgaatattatttattttaaatgttttttttacactgtcttggatgccccttcttttacataataatggttacttgaatgaaatttttactttcaacctctttttcttgctttcttagatgattattattgtatgatatctcatgtttcactcaagtgatatagctttgcgtatatttttcttctaagtacatctacagtgtttcaatcactttgtaatataatattgttaatttgacaattaattagacaaaataaaaaatatcagcatgtgtgacataagcaaagtttagtaatgtagggacttctttttaaacatcgattatgtgatataaatgttgcagatgatctatgtagatttaaattatatgggtcataattacgactgaagtgcaaagttttgagttggatttgagttgtaattgttgttatcttttggatattgtaaaggtgtttcactttcttgcgttgttaggaccattttttttacatgtatagtggttaaaaaaacttattggtgaggctattacaatgtgtttggctgctgagaaagctctcttacttaaaaatcaacatgtggtgttttattgtgacaattctcgggtagttcaagactttggaaagagggacattaatcttatccagctaaagttacaggttgtattcacaaagttcaaatagtttggagtgagaattatttaaggtcccaaattgagcaacttctctgctcataacattgcgaactggtcgagattgaacaagtgcacatgaatgatatacttaaaggagttggacgacgatgaaattcttgacgatttcaaggagtggaagtctgatgtggagcaagtggttgttgagctcaagagcttcttgctatgatgtttgtattttactttagtttttggacttatcttatttatgtgctgtcttattaagtagttttaggactcgttaggaacgccgtattaggtcgtattgnnnnnnnnnnnnntatattgaattggattatatatcatat

SEQ ID NO: 163283 - DNA, 2694 bp, Cannabis sativa
  modified_base (2525)..(2534): a, c, t, g, unknown or other
tcttaaccctgagaccaaccattctttgaaatttctctttctcacctcaacctcgttgaatctaattctctctctcccacaactctttgttgataccatcacaattggagggatttgctgggttcgatggttcatccctgggttcatcgtggtctggtaggtttgtcacatgagaagaagaaagaatggaggaaaggaagatctaatggttttaatctcagagcacttaacacaacattttgaacgaaatggataaataacttatagaattgaggtttggagggttttaccactaaaaaattagtttatatggttaagtgtcactaatcatagatgccaagtagtttttctaccaatattccctactaaaaatttaccacgtgtacacttgtgtgcattatgacatattcaccgtaacacttaacagagccttttaaatggaatgaataaatagctaacagaaatgaagtttgaaaggttttacaactagaatatcagtttatatggttaagtatcactaattataaaatttaagtaattttgtcgttaatatctcttttaatcttttaaaaatgatgtttgaattcttaagattgggacttactctttcgtggacatccttgtattactagtgttgttcaagatcttaagttaatgggaattaaaattgtgctctgattgagtcttttctcaatgagtatttatcttaatacttgtaaaagttcaaatatagtttcactatcaataacaaaaaaataaaaatatttatctctcatattaaaaaaatttaagtaaatataattgaaccaaagattaagtatgcatcaaattcaagacattccttcaaagaaaatgaattaataagaataatcttgtgactatcttacttttattataattatattgaatattttatttaaagtaatattttttagtggacatttgatttatatttaagttaataaatatgaatatatctaaatgtcaccattagattttgttcttaataggttttttattttatttttgatgattgttatttggaccaagcattatccaaataattggtcacatgccacctatttaaatattattaatttttatttaaaatatacgtttcttgtttacttagttatcatatatatatttatttaaatgaaagctaaagattgtgagtttataagtttcatagtagacttttcttttgggagtttttagttttcgtaaaaaatgtgtaatgaaaaatttaatattaatttgaactctattttaaactaaaattgtataaaaacaaactttttagagaattgacaaggatcaaaattaaaattatatcttttaaaaaaattaaaatttatattttaaaaaaaatatattattatattatgtaagactcacatattaggtaagttagtgttttatttcaatattatcatcatgaactaattaatgttcaaataaaataacaaaccatttcacatttataatttgtacaatggagaaactaaatattgggagataaataaattataagaagattaattacagagacaaattaaaaataattatgtataacttttttcttagacctataatccctgctaaccttcataagtggccgatttgtgcttgcttgtttgcttacttaaaattaagttaagacattttataaaattttaaaaaactcagaataatttataatataaaatgttatatttaaataattttattttacacgcatataaaataaaagaggtacgcgtgtaacaaataatttaaaccttgttttcgattagtacattaatttttttttttttttaatttataggatgtcttaaataattataacatacaggaatacaaaaaaatggactaaaaaaaatttcttagatgccaaaaaggataaggatgtatcggtgcaactttttatagcaccccatagaatttttctaacactgtgtttggtaaggtagaaaatagtggaatgagatggatggaaggaaaaagatgaaggaatatgtgaaatcaattgtttggcaaaaaagaacgaggaaaggaaaggtagagggagatttttttctccaaacttaaaattttcaatccttcttaaaatgggggtttaagaaaaaaacaataaatatatatttaatatcatatttatccttaaataaataataaataattatattagaaatgataatattgtaattttagtaattaatttacattctatcatttcaattccacttttaatattaaacaatatagaggaggagacctactttcttctccatccttcatattcactacaaaaaattctcatttttagtcacaacaaaacttgtgactaaaaatgaaaaagttgtgactaattataaataataattcatatgttgcgactaaaaagttcgtgactaaaaatattagttacagaaatcacaatttgttatgattaaatgagttttttgtcacaatacttgttgtaactaaaattaaattagtaacaatttgtatctaaatactannnnnnnnnnacaagtaactttttgttgtgattaaaagccacatttagtcacaaaaaaattatattgtgactacaaaattgtaggggtgttcataaaaaccgaaaaaccgaaaccgaccatcaaaccgaccagaccgtaaccgaattttcggttccacgtcatcaccgaa

SEQ ID NO: 163284 - DNA, 1425 bp, Cannabis sativa
gagagagagagagagagattttggaaatgggaaagagagaataagagttaggatatgaggaagatgatgatgatgagttggtggggatggtgattgagaatggacgattgagattaatttagaattaattttagagaatcaattaaagttttttttttgagtaatattttctattgtatttagatgatacaattaaactttttttgtttgtaatttctttatgataaagctgagctagctacatacataataatattggaaaaattaaatttaaaatacatatatatgtctacttcaacaatgaagagcgtgggaatcacgcaattataagcacacaaggtcatgagataatggaatagaagtcgttagtgattacaatttaattccacacaaacacacacacaaacaccaaaggtgttgctttaagctaagaaagcaatgtttaattaacttacacaaaagtggctcaaaaggtggggccctcagtcttagtcatctcttagcctataagggatcaagtgagtagcacgcgccgccaaaacaaggagtagcccccacatacaatcttaattaattaattaatataaatgttttgttgttagggctttcattatcaaaaggaatagagggtgggagaagtgggttttgggacccacaaatagggccaaccaccacatgagcgcacatggttcggacacccacttgtctgatggaacctctctctcactctttttttttttcttttctaatctttgcttatttacttttcaaattatgctttgtgtttgtgttaggtttaatctttttctttaatccacctattattgttggacgtctagctagctagtgctagtgctactactagtactcctccgacatatatataggactatatattgctgtaatttgtagcaccaaaacacctttcttctttttttattttttgattaataattattaatgttaattgcagttgaaatttttgtattattataacaatggaaccgaccatattattctcaagctgagagagacttgccttaaaaaaggggtaatagattcttgagttaattatttttattagtctttattagattttagggctaccctcaagtttttctctcttaactttcgaaattatatttagtccctaaaaaaaaaatggaaataagtatttcgagattttcttttctgatagaaataagggttcgagcgagattggcacttgaacttgttttactttctgtattgagtaattatatgctacaaataaatcaatagtacttataagataattaaccaattaagagaataaatcatataaaaactgagttctaaatatttgaaaattttaaaatcatgagtactatatatttgggtgattctacaatgcacctacttaaagggatgtactgatgcaccctt

SEQ ID NO: 163285 - DNA, 1265 bp, Cannabis sativa
  modified_base (1231)..(1234): a, c, t, g, unknown or other
tcggcagaggaggaggcggggggttggggtgccgttggattgtgattgagggttgtggttgtaggcgttgagggttgaagaagaagaggaggaggaaacatggacccatttcttcttccacttcctaactgggccgttgaagacggtggctgctgggccgtaacgggaggatgctcggcccaatcgtgacccaactccctccattagaataccctccgataattttctcttctactcttcctttccggtcgttaatggagatgagtgacttttggttatagtagtacgaggttaagtaggttgagacctcagacaaaaaaaaaaaaagcagatagtttctgctgctactactacgtaaaacgacgccgttatttatttatttatttatttttttatgtaaagtaaccaataaagaaagagcaataagaaaaggttacaattacaaatgctgatttggaaaagaaccattccaaacgatttctctatctgagtctaatgatttcctagcataattatacacacgaacaatattgttccttgaaatgtgataaacagaaatattaggaaataaagataaagagttttgaaccaattgtacaagatccgagagggatgatctatctctccatttgtggggcgggagtgggagttgatcattatgcagagtatcaaaagctcttagcaagaagtcctggatgtcatagtgattgtttgttgagtaggagtggagactagtatgttttcatatggacttagctctggtccaccctagaatggcataagtaacagtttctttctagtcattgcaaagaaagcaaaaggggtgaggtaacttttttttttttttttttgaaaagattggtattacaggggaagcacatattggtaagcttccaaataaaatgcttaattttggaaggtgttttcatagtcttaacaaactttcaccaggttttataagctgcaaggttaaaggaagagggagagggtgaagagaccagagatttagctagatgatagactaacttaacagtaaagttccccgagtgacaatctcaaatgagagtgtcctccatagaagggcaagtagggatcgaccttgaggatatcttctacaattttagtatcgaagtgatctttaaggcgaccagtgttctaagatccattatccagaatgaagtgtgagaccaaagggttatgaggtggggtgcctgttgggttttatgccctnnnnaaaactctatttcaatgtaatccagattatt

SEQ ID NO: 163286 - DNA, 2196 bp, Cannabis sativa
tttatctgccaattcattaaatttcaattctttgtcgttaattggttttgtttaagaaggtaggaagatgtttgtttcaagacattatatttgtatatgtgcctccacccacttttagagcctcgttgtgataaccactatctaagttttcactaatattattactattcaatcagcatttgaaggaatataggtgttgtgggattcaatgttctttatggcactcttttgatcaattacatgttctttatccaatggccacatatcattagaactatcatccatccaacatccaacatcgcattggttctgtgactttgttcaatgatcctttgtttgatatttttgcagaatttcggtttcgatggtaaactagttgtcaactatgcttgttctatggcctggggttaagttaacacataccagtgatgaagttcattttatttcatttcacaggtatttaactattaatctcagcaataaagtaacatcttttttcatgtatctgtttcatgcctgactttttatgtatgatgattttactttcagatatggtgctggctggcatgatgggcaaggaagactttgattacatttaggaatgaatataccaaattgaacaaagcaagcactaattctcttatgtaaaaaaatttactgaaattattcaacttacaaagaaaggttggttatggattgtgttgataatttttctccatttgaattttgaatacaacaatggataatataatgataccataaataaatagagcaaacttattttgttttattgcaggcacaaacaaactgtaaacaatgtattaacacttgttttttttttcttattgttgttatagaaattctaggcttttaaaaaagaaaaagaaaaagaaagaaagaaacacgagtattgatagttgtgttttacagttgatcttttaacaaccaacaaaagaaaaacaaacagtatgtacaaagccttagattaattgatcacacaaagaaagagactaaagaaaaaaagggtgatggaaaatgctgcagcagcagcataatgatattctattctatgatgatgatgatctctttatacacttactcgtactactatttagtactatattatatactgtatctgggattgattgccattggtgaccaagcttaactcagcagcagcaggaccacttcaaatcttgatttctctaccattatgcttgcttggtccttccctgagctctctcctccaattttcttatcctctgcggccaatttacacatataataagcataattcttggcagtgtaaagtaaacttcaaactttcgggtaacggctgagaaattatcgaaaagattgtcatccttctcgtcgtacttaaaataggccagtgcgcgacatccatatcttcttcttcatcatcatagcaaaaattacaagaatgatagtctctttctcaataaatttatctttaaaactactgatcaaactttataggaatgataatcacatcattcaaaatagtttgtatttgaaaagtatttttgtgtgtgtgtgtgtgtttttcaatgtcaaaattttgaaatgaaggtttcttcttaagaaagggccacactcaagtcatatggttttataaactataattgaaataatgtgaggtagagcaaccaaaatatccaagtaaataatgggaaaaaaatcacaccaacggttattcatataattcgtaatatatattggttccaaacttcaactaattcagatcaaatcatttgagattagggccgatcaaaatattttagggaccttgtgcaaaattttaaaattggactcttttaaaaaaaatcgtgtacgtaaaaactacaattctattactagcgtttttttttaagattctttcataaattttcaattataatttttttttatatatacataatatgaaaaaaaaaaaataagccttttctttaaaaaaaataaaataaaataaattgggccttaaaaaaatggaggccttgtgcaatgacccaagttgcccaatgcttgggccgaccctgtttgagatcggaccaattgaaacaaatttgtaaacacctttatataaccaacacatactatttagacgaaattacattcccttttaatattgttctcttttatttttaccttcttttttaaaatctatcatttttacct

SEQ ID NO: 163287 - DNA, 1391 bp, Cannabis sativa
cataaaacccaacaaaaagttgaccagcacgaagaagaagttgtagctcctaaagtggtgtacaattcctctctttgggagatggaacggttcaccaataaattctgaaattatgacaattctaagaagtaggagatgaatcatggtctcaaattgctctaggtttgtgttagaacatgctcttcgtctttagggagtcaccttgtaaatgtgcaatgtcttcgtctctggagcttggcccatttggaaatgggagcacaacttttgctcaggagctattttgccaaattttgtgcgttggtaggcattgcccttttcaattcattctccaagtgtacagactgcttgcgggctggtttgtgctatgcaaagccaagaagatggaggtccctactgtagaagatgtttttttttatatttatttttatcaaataaagcctcgacctatgcggaagaacaaaaataaaataggttctcatggcttgagaagaaattcaagtccttgatctgtccaaccagctcaatgaagtacacgcacgacttcaaggactactagtttttcaccacaggttccccattgaagagggttacgaccctttctttagatttttgtattgtaagtaagcggacttactctttcttatttaattactttccccgcctttctttttagtctctaataattaggatctgtttgctttttttaaaaaaaaaaaacgagataaaattatgtgttcggcagccactcctttcttggaggccaaacaaggtttatatcagagctttcctccttaagacttacaggtggaaaagcttgttactacagccagccttaggcaagttggtttgcttgctcctcattagagcattgatgcctttcatgtcaaagactcccctcacggtgactcccagacctcaaagaggttatttcggagatagacattgatgaagcacgaaaagccatcaagaaagaccaaatatggttggaagactgggcccgacttcatccagagtccatgaccaaagaaacgaaggttgaggtctgttttaaggcggctattcagtatgggggcactataggagtgagtacgtctagaagaagtaattctcccttcagttcaatttatgctccaagtcttgtaaacatgaattgagttgactatggggctttgacccgtacttcttggagttaaatcaacatagatagcttgtattgatacatagataggatagatgagatagtcaggagcctaaatcatttccttccgcctacgcagagtgtttgtgaacactcggtttgactcagtcaaaccgagtatatatatataataaataaattaaatataatataatatatatgtgtatataaaaaaaaaaaaagaatttatttt

SEQ ID NO: 163288 - DNA, 711 bp, Cannabis sativa
tgattgtaattagctccatcatgtactgtgatgctaagttatttgactacacgatccaagcttaaagtcgagtcttctccttctagcctagtttgctaattaattgtaacaaattaattatttgcatatatataaaaaaatatgtattatatactattaggtctttaactagctatatgtatatagtgtaatctttgcggcatgtgcaagcggatacgacagagaatttgttgaatatacatatttaatttaaacaaattatgttcaaatgttgattaaaatatttttaatttagagagataattaattcagttggattaaagacagctcatgcatatgatttgatcggaaaagaaggaatcagaatatataatttatacatacatatacacatggacatgataaagccagagaactaaatctcaaactaaaaacaatttttcttttaattttttattgtttgcgaacgaagatttgaagagaaaataaacatcaataagagaaaaatagggcaaattaagaatatgtgtttcattgtacaatttccatcagacactcaaactatcatcatcatcaatagcagacacaggttagagttatattatcatcatcaaaacgcatgtcgtcagtcacactcaactatactcattaaactttctatagctatagagtacttgcatgtagtcctatatataattttatatatatata

SEQ ID NO: 163289 - DNA, 3593 bp, Cannabis sativa
ttattttatatattgtacatgaaaatataaagttttgcgttactaaattaatcattaatatttcaaaaaaaaaaaaaaatcaaatttttttcgaaaattattcatatattaccattttaataataaaatactaaattttaaaagattcacatttattttttttatctctatataatttttcaattaagtatattagtgaatcaattatatctcttctttattttttatttatatatttacataactaatataaagtgtgtaataataataatcgaagtgtgtctatcataatcactactaataaatttgattaaaaaatcaaaagacttcagatttttttaaataagtattatgtatatattttttgctattagttcttaattaatttttttttctacggacttcttaattaattagaatgcttagtacttttgcttttcttttaaaaaatatttattttattaaatttaacattagctttttttttatttatttatggatatttaaatatattaattaatataatttttcataaataaatatctagacaaatatacttaatacaatgttttacttatattatttaaatacattaaatttattattttaaccactcaattttagtttaagaaagaaaaaaaaatatgaaacggtctcattataaagtttaatattaaaattaataattaaaaatagttgcacatattattaaaataaaaattacataaaaaatctatttatgtaaacctaaacggattgttagaaaaaaatgttactattttgtttattttataattaaaaactattatttataaaatatttatctaaaccaaatgtatgtatttattaattttataaatatttattaaaaaaaatctatatatctatcacataatatttattttgtgatgatagaggtaacttatttattttctcattattaattaataacttgaaaggatagtgacgattacaattaagataggtaatgacaacaatttttaatgtagtggcgattactacaagtgagatacgacgataacaacgattttgaaattgatgaatttcaatttttatacatatcttttctgaaactatatgtattttgaaaactaactgtataataattgtaatgcaatagtgtattatttatagaaagccaagaaccatagtatttgaaatcaacaataagttcatgtagatagtaaagttaaagagataaaacaaagtgtataagtaaagaatcaaaatagagagttacagggggttagtgtaatagataaaaactggttcaggattgtatgacatattggttgggttttagagtgattgtttagaaaatcatgtttttgtactgtatttgaaatcaatggaaaacttacaatttaccaaaaaaaaaaagatttataataatactataccacacaaatctctataattccctctcatcacaataataaaagtcctagtctaaaatggacaggaatagactatttatagtatccggtattagttgagcaactaactgattcgattaattagttggtgatgtgtcaaagtccattatatagttttttttttttaaaaaaaaaaataaaagctgaaactttcttgcacaattccatcaataatgttactcggaagagaatcaaacgaataactacgttcagcatttaaccatgaaactcgggctagaccatgagcgacacgattagcaaaacgtttaacaaaacgtaaataaacattgattaaatttgaaaacaccatcttgcattcctggatacaacagccaaatagagaggtaaaagtcaccgagcttcgaaaagtttgcacaacaatgagactatttgtttcaatggtgacttttgtaatcttggatgcctttatccaacttagggcttccttcactccaagagcttcagcaagagcaggttcacagtaaccactccaagaccccgttcgagcatgtaaaacccggcctctagcatctgtaagcacccaactataaccaaatctattctttttcagcaaacgttgctgcatccacattgatcttgtaattattttcctctggagcacaccattgctcacccccttcgccactctggatcgcataagaagagggagtgaaagttttttcttgagcaagaagccattgttcaagatcacctttagcgaaagcgataacatttttcaccgatttggtttttccattccaaactttctatcctgtcaaatcgcccaacaaagcacagcacccaactgcttctcttccctatcccatctgttgaactgattttgaagccaatcgccaaacaacatcttaccgggactgtcaccatatagcctggtagtgcgccaacaggcagttgcaaacggacacgccactagacaatgaaggactgtctcaatctcccggttacatcttgggcacgaaggagaaatttggacatgtccttggagcaatagtgcgcacgtaggcaggcaattggaaaccgatctccataacatgtccttaacctttggaggacatttcaaagcccataaagatttccacacccctgagctaataattggatcaggcaaattcttcaattcttgaatgagattatatgctgatttgaccgtgtagacacctgaagcctccttactctaataccaattatccaccgtggtcattgtttattatcagttagttactattcaattatctataacttctgtaaaagtggcaatttttttagactttcacattttaaattaccaaaaagtcctcatttttcattcttcatttattttattatattgaagttgttcatatacaaaacatgtggtcattgtttttttttcttttaactaaattatttattatgttgaatgatttggtttaattcattaataaaattaaattttattcacaaaatatatatttatacaaaacatgttttgattttttttgtctcatgtatatatatgtatagggataatgatgtcaaaaaaaaatacttaactcttagttttattttccttttaaggaaatttagccttaaagtttattaccgatataatttactaaatttatttattataatttttcataatttcttattaaacaataattttaatatttttaattttctactttttgtagtgtacattcttctattcttattttattttacttttggtcttttttttaagaaaagagaatacatttgtattaaagattctttaggaccactattaaattgtgtcttttaatttttattttcttaaaggattctcttcaaactattctcagtactaaaataaataaattaggttatattttatcgcatatcgttaacaaaatgattttcaatggtaaatataaaaggagaattaccctatatacttttttttaactttttttttctttttaaatttacaatttaggttgctccagtagtttttatgtagattactatgtggattttgattgtgatttaagttgctctgttggttgttatgagggttgatatgtggatttctgtaaaaatacaaaagaaaattattttaaagtaaaaataaaaaaaagtaatttgtgatataaa

SEQ ID NO: 163290 - DNA, 1082 bp, Cannabis sativa
aagctttattctcaagaaaatgggacgattagtagtggagatataatagagtaacattaaataagtttgtgacattatgtggtgacaaaaatatgatagttagcgatggtgataaccataagagtggcccaaataatggtagagagagactggggaaagtgatgcattgagtcgcaaaaggttaagacaaacttccgaacacaatgtctgtgaaaggaattcaaaggtatcacctatgatttttatgactttaatcttcggtttttgctagttatagctagcttctctttttcaactccagttagttgtttctcttactttaacatgatttcgagaagtaatagaataagtattatattctctttcctgatcaaatttttgaatttcaattgaaaacaataacgtgtgtcacatcatactctgtactgccaagattcccaagatggaaaagaagagctaggtggaaggaagcaacaaagtgagtgggattactgtgcacacagcaaacttaatccatgttgattgaaataacaaatatcaaggtctgtggatgcaagatatcccctggaaaaaacagaacaagctaagcagaggatgcgcctttgagaatgatttaattgattatgttggggcattgaaggtatatgtttactggtgtggaaatggagtgttggagagttgtatagctattttaatctgctgtatcattatttcatctatatgtgagaagacgcaacttattttgatacgtttctttgacatattttggtattattttattcacagtgaggaactttacgggagagggttcaagaatttattgcttgtatagaaactccgcttcttcattctcaaatgtaacttgagactatggctcatctatgagatcaggaaatagctcaacactggtggtgatgttgcttttgagtcagtccacatcaattgaatgaaatctttattccttatctgatgattacagtggcgtgagtactctgttaatttgccagctctcggaagttttactatcaactcatcattttttaagaagtttgattacagcaatgcacacgtatggttgctgt

SEQ ID NO: 163291 - DNA, 3887 bp, Cannabis sativa
  modified_base (3716)..(3728): a, c, t, g, unknown or other
tataaaatatatcataacttttatataatgtcaactaagtaataatttgtatcaaatttaaatctaatttttcatataattttgtatgaaaaattagctgtgtacaaatggaccgatctaactcgtatttattaaatctcgttattataatggaagccagacacgacctgtataacattatgttaggcttgacccctcgaattatcatagaaaatgataaatttatagaaagcttatcatatgatttcaaaatcgttctcatcattgtatctcacttatagtcaacattacattcaagggtattattattgtcatacctcacctatataacatgatactaggtttgatcccaatatgtttgttgtatatatatgataaatcaaataatgggctaactactcacttttataaataagtgagtctgcacaaaatttttttataaaagatatatgtcaaataaaattatatctaattctcacacaaaataaaaatatatattaaaaaagataattgataaatctaaaaaatatacgattcaaaactgctaataataatattaataataataacgtgtgatagtatagatatagtatatttttttaaaaaaaaatattaaaataatataaagttattaattttgtaaatttatagtctaataaaatactaaaaacgagagaattaatgaaataggacaaaatagcttattaaaataattgtataaaatatcaacttgtagatttatgctctaataaaatattaaaaatgagagaattaagaaaagaagagaaaatagtgttgacgcgatttttcgtcaactgatctaagaagatcgtaaaataaaagaggacacggtgaattaatttgactaataaaaccgcaataaataaaatagacaccaaaaatttatagtagttcaactcatgtcgcgatagtaatgacgctacgtctacttttagttttattgattatatctgacacactagagttatgttctcaagagtgtgtggataaaaatatagcaaaagatttctaaataaaatttagatcagatttgtgaatataagactaaatgttatacccaattttcacaaaaaaaaaaaagaataaaaaaaataataaaatgcctttgaagacactaaagttaacctttcaactttgaccaagacttataaatgtcgaataaatcaagacatccttcttgagggccccatgacactcttctagaggactcaaaaacatcaactaaccatttggtgtagggactcacacaccaagtgtatccaaactagacttcatcggcccgcgcgagcgttttcaccgtggaaaaaataaaggctttgctcaatattccttcacaaaagaaaccaaaagaggttcagtaattgacttgaaaaatggtgacactaaataagttcatctcaaaattaacagacaagtaccttctaatttttaatgtgttgcgaggtaacaagcagtttgaacggacagaggaatgtgagaaagcatttcaggggattatagaatactttctgaccctacatgtgctttcaaaactaataactagcaagatcttgctaataaaagtctactgggcagaatcaagataccctccttttgaaagactcacactaagcctaattcatgcctcaagaaagctaagacgttatttccaagtacatccaatccatctattgaccaatcatccactaaggaagatattgtcaatgcctgacacatcaggtcgattgataaaatagttaacaaaattaggatagtttaacattacttatcacccacgagcagccatcaaaggacaagtactataagattttttttttaattgaaggaataaatactaacaaagatacagagagaatctcaaaccaaaaaatttagaaattatttgttgatggctcatcaaatgacagtggctcgggagcaagcataatccttgtctcactagaaaactttaagttctattatgccttaaggtttcaattcccaactttaaacaacgaggctgaatacaaagcctttaataggcttaataatgacaaaagtagtaaatgctaagacaatacattgccttagtgattcccaattgatagtgaatcaagtacttggagaatatcaagcaaagggaatcagaatggccaaatatttggaaaaagtttgaaaaaacttggaaaaattcgattacttcaaaattaaacaaattctgagagaataaaattctaacgttgattcattggccaatctaacgtcgcaatctgaattcaacaacctcaacttagttcccattgaaaagttataggaactaagtatttataagatggaagaggcagacttaaaaatgattgatgcgagtctgacttggatgacaccaatcatgaattatctactaaaagacgaactcccatcagacaaaaatgaagcgatagaactcatgtacaagatacctaaatgcacaattattgaaaaaaaggttatattgaagaggatactatatgcctttattacttagatgtatattacgagcagaagatgagagtatcataaaagaaatccacgaaggcttttgcagggaccaaaaaggttggcagagttcggcaaattaaataatctgtcaaggatgttaattactggccaacatcaataaagatgcacattattttgtaagggaatgcgacaaatgtcagagattcttgcacaatccaataattccaccgacagagctttgcatgacgacctcgccttatccattcaccatttggggaatagatttaattaggtcatcacccacagagcagggaggagcgaagtatgcaattgtagcagtcaatttcttcactatggatcgaggctgagccattagtcatggtcacctcgaaaaaagtcttagactttgaggtgaaaaatataatgtttcgcttcggtattcgcgttaagatagtgtttataatgggacacaatttgacagtgacttttttactaaattttgcgagagaagaaaaatcattaagagtttttcatcaatctcgcagcctcaagctaatggacaatttggagtaatcaacaagatccttaaagatacaataaagaagaaattaaacgcactaaaataaaggtaggtagatgagttaccacggggactttgggctccatcgaaccactaaaaaaatggcaacatgtcatactcctttctcacaagcttttggctcagaaccaatgtttccattcaaagttaacatttcatcacataggcgagagttttataatcaagataagaaccaagaattacttgaagaattcatggttagatgaaatgagagatgaatctcaagtgagaaatgttgcataccaacaaaggatcacaagacacttcaataaaagagtaaggtcaaggctcttcaacattggtgatttagttttaagacgagtatttacaaatacaagagatcctagtcatgtatctattttggtatctaaaataattttttagttaatttttttttcatggtcatgtatgttatatatagttatttaaaacatcctgtaaaattttaaaaaattaaaaaaaaaattacacgttgaaaacagggttaaatagacgtattgcacgcatgactattttattgtatacacgtgtaaaataaactgtttgaacactgctttctattataaattactcttaacactataaaaaatcttacttnnnnnnnnnnnnnaatttgtgactaaaagtgaaaattatgactaattataaatcatgattactatgttgttaccaataggtccgtggataaaagtattagtcacaaaaatattacaatttgttatgactaaatatatttttaatcacaatacttattatgactaaaactaaa

SEQ ID NO: 163292 - DNA, 910 bp, Cannabis sativa
taacctattattaagacagacccttttcaattagatggaggatcatcgtaatgaattccaattgaaatacaaaacctaaatttaaaatcaatcctagctctcagagtctaatccgatcatcatctttcgaacgacatacacgttaatcacagtccaacactgatgcttgaattgaataagtaattgaaaaaattgatagcaataataattaacaaatgcatatttatatagtaaatcaatctatttacctccaacaatcaaaaaacaatgaaactcacagaaaaacccccaccgcatcataaatcaatatacttatgtaactctgccgagctatcaaagccagcagaaaataatggaaaagcaaaatcggtatcgtgaagaaaaagaaacacagcaatttaaaaacaaaaaaaataaaaacaaaaggaagaaattcaaagggagagaaaacgaacctgttgtgtggaatcagtgagattctacttgtttggaattgaatttttggttagaaaaatcaaacaaatagcgttgttcgcacataaatggtatgtattcagatgcgtaacgctgacatccatttattttatttctttgtttttttagaaaaaaaaaatatacaactaatagccttttgtcaaaaaaaataaaaataaaaatatatagttaattttatttgaggattattctcattggtggagcactgctactggttcacggtttccgtcggtaagcgtaaaactagaccagcccggcccattttactttacttcttctagaaggctccattaccatgggccccttaccaattaactgcatttttgggtaatatttagggaaacttacaaaaatactaaaatttggattaacttttacaaaaatactgtcacacagaaatcttttcaaatatatt

SEQ ID NO: 163293 - DNA, 1560 bp, Cannabis sativa
taaataatgtgtgtttagtgatttgctcaattgaaatatatatataaatgtataaatacatatatattattttggggaagtaagagatcacctagtgggttgctccctaaatttaaaaataattgaaaaacacataataatgtgtatgagaggtcaacatcaactttaatcatcgttaaaaaaaaaaaaccgtcacagttttcttagaaaggaagagatcatgtgatgggttgttgcttaaatttaaaaaaaaaatgaaaaacacaaataataatgtgtatgagatgtcaacatcaagaatgacaaaaaaatagaaaaaataaattactagtgacaaaatagcataaaatggtaatatacataattctatactgtacatagtatacaatatataaaaaatacagtagaaaaatacagtgtgcggtgtaaaaactctataattatatgtgagtaatatattagaaaagacgaaagtaaaggaaaaagatgatcactcaatacatgtatatataatgtttcaaaaaaaaaaaaacaatacatgtatatatataaggactacgcaatataatccatattagacaaaaataaactataaaaattatgtatgtaaacatattatgagaattgtagtaaatctaaaagaatataaaaaaaattacatgcagtatccaatatggtgtcgaaagaaagataagatcaacgtaggaaataaaaattagtaccgagaaatatcaaattaaaaccgtatgttcttcgaacgtcttctctacaatagtcaaaatctgctttaagattgttatatacaaaatatataaaataaagagatatataaagacaataatatattaatttattaatcaaagaataaaaggataaatagaaattaataattgaaaggaaaattaaggcccgtaaaacatactttacttaaaacagatttgcttcctctatctaatttggtattagaggatacatgagcaactacttcctaagatacaacgattaacaagtagacaaatacactatttttactactccagcaaacttgagttaatatcttcactctatcaccttaagaattacaagaaagacaaaaaagagaagatagtttttgagtgtaatacttcttttggtgtgtttaaaatgaaaagtgaaacttccttttataggcatcatatgggggtagaataccaagtgtgaaaaaaaattaatgccaaaaatcccacaaaattagtgatattgatcaatcacaatatttactataatgtctaatatcaattggaatattcaccatggtgattacatccttcttcaaatttgtatgtattagcagttatcaatagatcacatctaaggtatcaattttttatccacacattagcctaaattgactatttattatatattaaatataacttttctaacaaatataatatttgagaagcaatagtcttataaaaagaataatctgttataaatattattaattatgtggatgtctaaatcttttatttattaccattaatgtaatcaacattctttttttcttagtttcccttt

SEQ ID NO: 163294 - DNA, 850 bp, Cannabis sativa
ttcatcttggggcaaaagttgagtgttggtccaaatccagagaagaaagcattcaaaaaccaacctcttataatagctttaacaatggtatttttcttttattttgattgtacttaatatattgtaaacattgtattaatgcaataaaataatagatccatatgagatgtaaaattcctcttattttataacaagttttgccaattttatttttttgttcattaagtaaacaaatggtataactcaaggaaatgctatataacaatggtcaataatacatatatttatcctcttctaaatccacaacaggcgaatgattttatctattcattatttttaaatccacaataggtgaaatatgaacataaaacttgatttaaaaaattgaataattgatataattttcaacaattcaatataaagttacatgatgggattactaccaacttaatatttcaattccaaactttatattttggacagccataaaatttctaatcaaattattcatacactgatactcacatttacaattagatctacttctttcttcttcatatattctaccaccgttcattatattacaagaaaaataaaaatttgattattatgtaagcaaaatggagcaaaaggaagaaataggagaaaggggctgtttcagagaatgaagaataagaagaataaagatataatgaaggaaaaatggtgttgggtaagcaaaatagaacaaaataaaaaaaaaaaataagggaaaattgcttaagataattgtagtggccaaaaattgctctaagcccaacaaaaaggcccaacgatcgaaatacttacaaagcccacttataagtcagaa

SEQ ID NO: 163295 - DNA, 3503 bp, Cannabis sativa
  modified_base (1112)..(1115): a, c, t, g, unknown or other
  modified_base (2557)..(2557): a, c, t, g, unknown or other
  modified_base (3245)..(3247): a, c, t, g, unknown or other
tttttttttttttttctattctttcatgccacatcatatagtgagacctgctaattttttttttttttggcaacacacagggcaacacccactgaagttggccttaggtaggctcttaaactctctgcacaagagctatctctagagaattgttgtccttaaattggtgtgtcttccttgttcccaccaattattttaggacacatcatctatacttattttatatgtactttagagtttgttaatgaattatatgttaattgagtataaataatatgtactaaaattattggtagaataggaagagaacaccaatttaaggacagtagattttctttggacacaattggtttaccctaaatggagaataagatctttgccttggccaaagaattcgagtcaagactgcacagccacatatatgtccaggttagaaaaatgaaaaatacggccggacagcaatattcttaaggttgaagtttatgcttatgtttttatttttatgagtttacactatttttgtactttgtgttttatactaatacttgtttaaatttgtgttttagaaaagggatatttacatatttgaaaaataaaactagttaacataaatatgataagaaaatttaataagaacaaatatggtatttaaaataaaaacttaatatatatgggatatactactttaaattctcttaaaaaatattaaaatttctttcatattttttttttttaaaaaaaaaataaaacaaatgaaattacagtgatcgttggagttgtcactggtgccgaaaaactcgttggagtttgctaccgacgccggaaaagtcgacggagttgctaccaacaccggaaaagtcgtcgaaattggtattgtcactggaaaaatcaccaaggaactggtttccatcaagaaaccaatttcttggtgattttttcggtgatttttccaacactggcagctactccgatgacttttccaacaccaacaacaaatttcgaaaaagtcgtcagaattggcatttctccgaagtttgctgttggtgccgaaaaagtcaccgaagtagttgttggtgtcagaaaaataaccaagaaactggtttcttcatcannnnaccaatttcttggtgatttttttggtaatttttcaggcgacaataccaatttcggtggcttttccagcgccggtagcaacaccagcaactttttcgacgtcaaaagctacttcagtgatttttctggtgccggcaacaaactctaagaacttttctgacaccagtgacaaataaaactgtttaaacaaataaaaacattaaatatggactttgaaaacctaatttacatatatatagaatatcaaatactataaaaatactttaaataaataaaaaaaaaggccatgtaaattgatcaaacttaaaagtgccatatttaagtgaacaacttttaaaatctcatagtaagtgtaatttctttttaaaaaattaacttttagacccaacgtgtttttttttttttttttgtaaaatattaaaaatagacaacttgaaaaaatgtgtttgaatataattatatctaagaagtttgttgttcgaataataagttgaggagttctaaatccacaaaatattttatgacaaattttttgagaagaaggaatttagggctcgtttggtacgctatatatgggtcgtattgtattaaataacaaataatactatgtttggataaaataatgtattgtattaattattatgaccaaatttttgtatacaatgtatgttgtattatttaatacataacaaatagtccgtattaccttgtattataatttttacaaaagattcagggtcaacaccaatctccgagccgggacccgaacccggacccagaccccagacctggaccccagacccggacccggacctgaacttgggatcgaactcgggacccggacccggacaaaatatttaatatttttaatgttgggattcttacaaaaacacttatcttttcttttttattatttttatatttttactattgttatcttattttttgcactgtgacatgacaatatgtattagtgacacgtggctggagaaatattccgaacagatttcgagtaatacatcacacacacaaagcctgcttgaccgagcagggcaagggtagatgacccgagcaaaaagtgatctgaaccgtgtatcaagacttaatcattccaaggttgatatcgtgaagctcaagcacaaaaacaatccctataatcatgggattatatcagagggatgtggcaagctgtcccaatctcccatttcatgtattctaaatatttaatgtatgttcttaccaattatagatattgtaagcaaaaggaaaatcttccctcatgcatttagccctataaatagtgatctagcatcactgtaaaaggggtcgaaagaatcactttagagagagatctaagagagagtactcagagatttcattgtgagagctttgagagaggaaacactgtgttatttgttctcaagtcaatacaatctaaggggantaggctattaccgaactaaagggaccgaacctctttaaaaaatcctgtgttctttattatttactgatttttgctctatcttgattacattcttaatcgcttattaattgactcaccgtcgttggctaaaagcgaagtcaacattttggtgctttcattgagagacaaaatccaagtttactctttgtcttaagatttagcagacacacaaaatggtggtgcaaactcccagaggcgtggttgaccagagtgactcaccattgacagatcctgccttacaaactcctagaaatacttaggtcccaccaggaaccaatccagggcagccaaacatgcaaccacctattgtgggccaaggtgtgacatcccctctggttgggatcacactaggtgtgcaagagactgggaatgcttgtaacgccctaaataattaggcacgctacccaagatgcttaaggaaacctaatcccctaaacaaaattactgatagaatatgcgtggaaattaaactttaataacaaactgaatgaaaataaacttgtaataatttaaactttataaactaaaagttacaaaatttgggattccaaaaatatttacaaaatactattacaagttcttttctagtagccgacctaagcggcaaaacagagtctcaaaaattacatcactggtagaccccaacccnnntggtctagtgtggcccgaacatatacattcttcgtctagctccaacactcatggctgatcagattcagctttaccctttcctgcactagagcacccgtgagccaagcccaacaagacagtataaaataacaataatatgcttatcatactacatgaacagtaatgcccttcatatatgcctgtgtgacacagacctgcatgttgcgctcacatgcctatttatgcctacgtgatgtagacctacgtgttgcgctca

SEQ ID NO: 163296 - DNA, 741 bp, Cannabis sativa
ctttttcttttggatgatatgaactctatttttcttgaaaaattatttgtgtgtatttggagaatatggtatagaagaaacatctatgtcaatcagaagccttgttcacctaataaacttgttgttgcttagagtttggagtaacttgttgtttacctaatggtaagattgagattatggagggtagttcaaaccatcatgctatgactcaggtgcgattttgagagactcacaaccttagataaatcctactgtttgtgacccaactattgctgaagcgttggtaattttttctagaatttgattgtgtgtttgctttgattgtgctcgttgttgagattgaatctaactacttaaatgttgttaatgctattaaaaatcaaactgatgatcattcttatctagggtatattgtgagagatattgtagattattagaataagtttagctttctttcgttttcttgttgccctaagtttactaaagcaaaatttgctttatttttgtatgatcattatgtgtgatatccaagctaccataattattttgttgcaattttgcagtcagatattattaattaatatttggcattctttttacttttgagatttttcgcaccggatttactcaaggggtgatgcaattttgtgttatgaaattactaacatctaagagattcgttcactgaaagaggaacatgttgtaatatagaaatgcttaaaaaaaaaaaaaaaaagcctt

SEQ ID NO: 163297 - DNA, 1890 bp, Cannabis sativa
aataataataataataaataaaatgaccaagtaataatcatttacctataagagcataataatacaataataatgacaataattaaaaataataaaattaataatagggataaactaaaagaagaaaaaggctatgctcattaattttgatacttgtaaattattaagttgtaatccattgtacattcccaaatcaattatcaaattttccaaattttttttaagtgtgctaattacaacttttacacttataattatatgccaaatcgttttcttaaatttttttattgtagaatttattatagttataatattatttacgtaaattattttgaataatttataaaattaaaaatagagttaatgttaaaaaaaattaaaatatatttttaacactgtaaattatttcaaattttttaataatttacaaaaataatattataacactataacaaacatatatttaaaaaaaattcaaccaacatatattttgaagcacacaaatagaagttataataagatgttcaccacacttatcttttttaaaatatatttatatttttatgatcattattaacatttcacaataattataacacaaaataaataataataataaaaaaaagagaatattatcacattgtattgatatatatatatcaaaattcagattcacttttacaacacctcaaccaatcaaaatgtgacacgaattataataaaaataaaaataaaaatctaaacatttccacaaatttccattaacctctactataaacctcttaggctttgtgggtttttttttttaatttctttttttttcttttttctcaaaaataatcaaattaaaaaaaattggcataattgaaaggatttgaaaaaaaaaatgaatgaattttgaaaaaaaagatcaaaatgtaaatttccagatcttgattcgaagatcaaccttacatttggcgccggaaactgacgcaatcaccggcgaagatttcttacctttcggcggcgccaccacacctttgattccttcacacgtaaccctaattccaaccttcttactactcttcaagctctccatcttcactttcacattcgtatccatctgaatcttcaaaccaagaccgttcctcttcttcagatcagatctaatcgcagccgttgaatccgtatccagatcctgcgaagctgcaacgatcgtacggaaactcgtctcgttcttcttgtcgctgatgaaggcagggatggttccgttaccgatttggatgtctccgcctctggtggcagaggcggtgacggtgaaagcgtcgtagaagaaggtgaggtggttgttagggttttctgatgagatcgttatgttgaaaagagtagtgaggtgagatgaagaagtgtctggagaagttgtgagattgagcttagtaatgcggagtgaatcgacggtgaattgaggtctgttcgggtggtatagtacgtagacggcagcggcagctatggcggcgagtaagccgagtaagaggagtaagagaatcgtccagaaacaacagcagcagcagatgttgcggttgctacgacggcggtggttgtgacggtttcggtactgtggttgtggtcggtacggttgttgtcggagctgagcaggtttcgttgctgtcggattgttaattgctgcttgtggttgtggtggtggtgctgttgtggtggcggcggcggcggtggcggtgggtttggaagaagggtggactctgtctgccatttttgttagatgggtttagagggagaaaggaaagtttagagagagaaagtgagatttgtgaatggtgtgaggagtgagtttttaagagaaaagaaaagaaaagaaaagaaaagaaaagaaaatagagagagagagag

SEQ ID NO: 163298 - DNA, 1088 bp, Cannabis sativa
atatatagtatatatataccttggatgagagttgttcttgacagttttttggccatatttcctccacctatagccatcatctagaacatcatcatcactccttgtatgaaatgcaaccctttgatgatgaggactactatctttctttttcctaccaatatcattaatattcattgtttttcctttatttttatcatcatcatcatcatcatcattacccttattgatcatcaaacattgttcatcataatttggtgatgatgatgatattaatggcttctgatgatgatgattataattgttagagccacacaaccaatcttgatcttggccgagtgatgaggatgaaagtattaatggatttggatttgggttagtagtgtttggaaatccaaataacaatttatttttatccataattagggtatatgatgatgatgatgattaatgatttggaaagtaataattagtaattgatttatatatatatatatgtaataacttgaaatttattaaggtaaagtgtttataaggtgtagctatatagcttaagcacatgataaaattaatagctaactacacttcatctacttcttgttcaactgcatgagttgtacgtacttaccatactttttgtcatcaaatatattaataatgaaaaaattaataattagacaatttataattaattagggtttcgtgtattgttggagagtaatccaagatttggggttttgagaaaatattgttgtggtagtttagactaattaatgtttattatcaactaggagctaactctctagatcatgatctaatcatcatagtcttaattttataccctaattaattaagtcaacagggtttaacgttaaccgtacatctaaacacatttttgtacattaattatgtcgtatagttttataattttattatatttatacagataaatattagggcaatactattttgaccctttatttttcttgaattaaatttttatgaaaataaaatttaataataatccaatttagatgagttatgacaaaattgattatattttctacactcaaaatcatatttatatcatt

SEQ ID NO: 163299 - DNA, 579 bp, Cannabis sativa
attgaggattgccttcattaggcgtgggtccctactcatgaatcctgtggccacgatcatatctccaatctttccaacaagcttcaacatagcgccctcactctctcacaatggcagaaattaactgggcctcccctccctcaaaaaatttagaaagttcaatctcagcttcaggctgcctaaagtcattcccaaccttccaatttcgagcttcttctctgtcgctaactttaaggggatcttgataggcttctctataaagaagaagagtattggtagcagcgctctcgaatcagctggaccaaactcggtgaccaaaatactcgttactttcatctgtttgcttcctcgagtcgcgccaagaaaaaaattcactcacttacacacactaatggctcaattgtcaccgatattgaaagtattttgacaactattggacaatacttcactcaactgttcaccagtcaaaatcatactgaatagcaaatggattatgtgttggaatttattttaccaggatgttagatctactcacaagtatgttgtttaacaccctacatatgaactttctaaaatgat

SEQ ID NO: 163300 - DNA, 2094 bp, Cannabis sativa
  modified_base (1931)..(1938): a, c, t, g, unknown or other
atcaacttttactggtaattttttgaaggcaaataagaagacaattgtgactttgaagcctccacgttcggtccctgttacgaatggtgcccctctgtggctccttccaactgaaggaagggtcaaatgaacactgatgcagggctaaaattggtggagaggcgcatggggtatggtgcagtaatcagagaccatgaagtccatagtttggcatctgctgcggctccaacaagttttctttatccccacctgttgttgaagttgtggatgtgttgcacgacattcagttgtgttggcggctaggttacttggaggtggatgtcgaaacagattgtcaacgggtggtcttgcttcttaacaaaaaagaatgtcgactagaggagtttggtatggttttaaatgacatccttaagctctgtaatggtgtttctttgtttaagtttaatttttgtaatcgtgagactaatgttatcactcataaacttgctaaagttgctctttctttagatgaagcgaaagtttggtggtcgaatttaccaaattttgtgtaagtcattttgacttgttggctagtgcctgagaagtaattttcctatataaaaaaaaaataaaaaaaataaagattaaagggaatatttaggggataagttgagaaatatcacttttttgtatccattaattaaaacacccttatattatattttattaaactgtatccacttttgtgagtggattacccaatatactctcaccctccacttaagtctagtacataatttacattaacttaagggatataatagggatattatctataaaagtaggtataatcttaaaaaatacgaaaataaaggtaaaaattaaaataaataaagtaaagtggatatacaatgtagtttactcaatatttaaaactcacattttttgaagtatttaaaattaccccaatagtgggtaaatgttgatgctacagtttttcaagctcaagatcgtgatgtagttaggtgggttgttaaaggccatgaggggagggtggtggagggtcgctcttattgtgtttgagtacatgattgctctggcatagttgaagctatttgtatctaggaggcgaagtttgatcaaaatgcggtcatggccttcgatggtgctcaaatcagattgcctacttattgtacaagcaatttataacatttttctatgcttcgtccttttggtattgttattgatgacatcgatgaatggtgcctctttcgtttttgtttattgttatgctaacaatgtagcccatagtattgcttgagcttcttgtttttttcttaatcgtgatttcaatgagagtgatatttctattgaattttttatatattattgttgcacgcaattatatttcttaatcaagttagatatattttttttaaaaaaaaataagcttattgttttttaaattaaagtgtatttataattttgtgagaatgtaaataaaacttgaaaaattactctatatatatttttttttttttttttatataatatataaatttacagtttgagttgttctggtggtttcttcggtagtttttatgtagattttggttgcgatttaggttgatgcgttagttgttatgagaatttttatgtgaaatttcgtaagaaatgcaaaaaataaataaaaaaaaaactattttaaagtgtaaaaataaaaacgccccataaaactttcccatatttttagcctatttggctgtgtttttagttttcagtttttagaattgtgttttcaaaagtaaaaatagaaagtaaaaatagaaataaaaatagaaaacagatagaaaacagttttttgtcattaaaaatttaatggtctttgacacaatttttttaaaactatttttatatatcttattactaaaaaaaaaaaatcaatattttannnnnnnnccatgacatgaacccatctgggtctgagttcaggtataggggtctaggatccgagtatgtgagtaaaaatataaaatataatatgttagataaaaaaaaaattgaaaaattgaaaacaacattttgatcttttctgtattagaatatttttattta

SEQ ID NO: 163301 - DNA, 1502 bp, Cannabis sativa
gttcagttgctaccaaaaggagttgttagagttgatattctttgaagaaggagattttcctctcaagtaccttggtgttcctttaaggcctactaaatcgagagttgcagattgtgggattattcttagaaagatcaaggaaggttacatacttggattagtcgttatctttcttttgcagcgagagcccaacttattcactttatgcttttgggggttataaagctattgtatgaatattttcttactttcccaaagtattgcaaaaaaatgaataaattattttgtaaattttcgtcgggggctaaagagaatcaaagtaaactctattttacttcttgagagtaggtttgtttaccaaaacaattcggtagtattggctttagagagggtactaaatagaacagagctattttagctaagttcatttggacctttctatgaagcaagataatttttgggtcaaaacgggtgcatatatttatttaagggatcaggatttttggtcttattctttgaaagctatgttagttggtattggagaaagttggtcaatcttaggcaattattttttgctaggtgatatttccaaagcagatagtaatgacaagttcaaggcaagttagctttatcagagctttcttcatcacgagtaggtgacttagaccaaagttgtttggtgtagacttaatatgcctaagcataaattcattatgtggcaagcggtgaatgatcatttactaactaaaaacaagttgttgacttgcaatatccattaaattaattttatactttatttgtgagcagattcttgagagtcactctcacttattctttgagtgcaactttttttaaagagttgtgcaagttgttcgaggttggcttgagtgttcgagattggcttgggtgtcctgcttggcctctctagtttcaagtttggcttagcttggattggttcaaagcataacaattctttctgatgttatttatgttgtgagggctgaaactatttataatttatggataaataaaaatggttgtatatatgattgaaaatcttatattgtgtactctattgtagagttaattaaaagaaatgttaaaattagaattcccaaaataaccaatgaataaacaagatttagctattttactatattagtattttataatgggctttatgttatttagcctttatagttgttggtgattaataagatatccattcaacttcatcaacactaaacaatggttacaaaacttaccataattttttttaaggaaatagaatatcatattttgaattataagaaagaaactttttttttttaaatatatacatatatattaggtgaatgttacgtgctgagccacgtaagtgttagttttatttaaggtatattttttttaagattttggtaactaaagtggtatgattatttgaacgatttgttttataaaagtaaacttgtgtcagtgtatttagtaagtaaaacatagtt

SEQ ID NO: 163302 - DNA, 1627 bp, Cannabis sativa
  modified_base (1596)..(1598): a, c, t, g, unknown or other
ttgttgaacactcgatctaaaaaaaaaataaaatgctatagcaaaactatgaccaaccgtgttagcagatcgtttaatcaaaaataagaaaacattgtttaaaaatagaagaaatttacgacaatcttctataataatcccaaaaaaagaaagcatagacaataaacttactctaaattttttagataattatagaatactttaaaattttctagacatgtgaaaaatacaataaaacatagacatttctagaaaacttcagtttagatgtttctagttatacatgcttaagaaatatgtagaaatgtatggataaaattcttgaactagaaagatctagagcaaataattctagcctcaaatacttgaaagctagcaactataaatacccattaagggttctaaattgtaaccaaaacccaaaatccaaagctacaaactttcaattagagtttactagtactttacatacaattctcttttctaagccaaactagttaactttatatactaaatcaacaactactcatcaacatcactactttactacattaccacaacaaacaatcaaacacataatccacatatctacctattttaaacaaaaccaatacaaatttattctcaaactattacaacttttttataactccaatttgtttaagaattgagatgtctttttcaatattttaagaatattatgataattaatggagatttagtaccatcttgagtttactgatcaaatgtattttgtttgattattaatatattactattagtagttagaaataataatattattttcacaaaaaataaaaataaaaattattggttatagtcaaaataaataaataggaatacgggtgtgttgtgttattctcaatctcaatcacagtatctcatgagttgagtgcacaccgcgattacaaaattatattcattcaaatagaatctaatagccaactctaatccaagagtgttgaggctgacttgaaagactctagcgtgaactcttcaacgagtttttctggattggatgttcaattaaataaggctaattaacaatttttgctggaagaggaggaaggcttccaggtccactttcaagagtccaatgtcaactttgtcgtcgtcttggacacactgttcttgactactactataggtttgataaaagcttcacatgtagtgttggatctagctctacacaacagaattaaccttaggcaaatttaacttaaaactcaacaactcaagactcaaactggtaccctgactctggagcaacaaaccactgcactctagatgtttagaacttgatgactcgagctaattacagtggtccaaacaatctttatgttggagatggcaagcttgtccctgctcaggcaagtgtcttaattttagaaaataaagaatatagtcaaactaataactctatgttccaaatgtggcataataggttaggccattctagtgagaaagttgtagaaactgctactacttaacatccagtacaaggttatgggctattgtggacaatgtcccacatggaataaatggtagagaattgagccatatataagaacatgnnntactccactcattgccaattggttttgag

SEQ ID NO: 163303 - DNA, 1492 bp, Cannabis sativa
cacttagttccttgtattgccaacacttctttggttaatgcctcatccactgtgtactccactaacccaactccaagaaatgtttttgtctagatagacaacatttctttattcccttgtgttcctgtcatgagttctattacttgtcccattgtttatagacctgccatgatttaaactgtgataacctctacctataaaggtaaaggtcctatgtatccagaaaagactaggggactgccccttgcgcccatcaggccaagactcgagcttctacaatgtacatatttggaactaaaaggtctttcacaaggcagaactgtcaagtgggaacttttgtcaggagcatgctgaagagagctcgatcttcaaattctgattttgttgtggttccatctttattagattctgatgaacagatgactcagcaacttcgtcctgaaaactgagtgtgataagttggaatgcttgtggattcgagagttcccaagcattccaaaatctctccctcctggataaacaacatcgacctcaaattacgtttttgatgaagattaaactagttgtaatagtagtattttaattaaaactaagttgtccttttataatgattttgaggtacctaggaagggctttggagggggcatattatttttttggaatgatgttgttaatgttaatattttatcctactccttgtatcaaattgactgctatgttactattgactctaatataaattatcacttatcttgtttctatggttacccttatgtttgtagtaaaaataattcttggacattgttggacaaattatttgatgtagcacccctttccccgtggctcatttcaggggattttaatgattacttgggtttcaatgataaaaatagtgctaatttcccctccccatgctattcataactttcaaaattttattgctaaatatgatttatgtcccctgccttttgttggtaatcgctttacctagaagcatggtagcacccttgaacgcctcgattggggtatagttaataagtcattggatgttatttttcctgatgctaaccttgtccatcttccattatatggctttgaccatagagccattaagcttgaatatcaccatagccctcatctttgcaagcataataaaaggttcctttttggaaaccattggctcatggagcaaaacttttttcaactcatcaaagacagttgggtagctaatactaacactaatgattatatttcttcccttaagtcattccttagtcatcaagatacttgtgttaataatatgaaaaattagagaaagcataaacataatcttaaaaataaaattaagaatttgcaggatgatattgataatatttataataacccttccactactacaaaccaagcttttagaggcactttttttcagcaaatattaaagaaccgacgtcatagggttggaattttttggaagggattttgacaccaccta

SEQ ID NO: 163304 - DNA, 1788 bp, Cannabis sativa
taggagtcaaatatgttatgagtaaatatcatcacataatataagattagtagattattattatacatggattctagagtttttgattttgattttatatttttgtgcttaaaattttgtggtgaatctacatataatatggttggaaactattaatgaaagatgtaaatatatatggcagattttgtagtgtacttgggagatgtgataacagcaaacaacataggaatacaaaatgcaagtttgtattgggagcaagcaatttcaccagcaagagccaaaggaattccatgggctactgtgtttggtaaccatgatgatgctcattttgaatggcctattgagtggttttcaccccctggtgttccccaacttctatgccctcttaccaattctaccactttatcatcatgtccaggtgaggtcacatatttatagacatatcgtctttgtcaagtagggtctgttttgagatttgtttgtgttggatctttacttaaaaggaaaaaacaaaattaggtctctcgactaggagagttctaggtgcaggacctagctcaccttaatcataaacttctgttactaaacaaggtaaaaaatcagttgatacagatttcaaatcgaaactacaaccaggatacaatatagaagtttttataaacaaattaactggtcgtttaacaaataacaaagagatatttctcaactcaagaaggaaaaattttaaaatcttaattacatgaccaatattacactatgaaattagtgtagggacttattagtaatttgtaagtggtgtgaaatcgtgtaaatatgttattgtgtagccaatatgagatatgaattaagaaaattgaattttagttcaattggtagattaacggtgtctagaaaagtgtatttagagatttatcctatcttgaagatgacctattaatctatcattgatgttttcattgagaacatcaatattaagtaatgggttctcttcgagacaagacaattatctaaaatgcactaagacagtgctaatcccccaattgaattgaaattctattttcttattctatatctcataatagctatacaattacatatttatagattttcacgccatttacaaattactaataaactcttagtgtaacaatcacacaaagaaattatctttaaactacttataaagttataagatagatctttttagtatatcaacataacgcaactttatttttagtacgagttaagatatcaattttgttttctttctttctttcctctacttaaagttgttcatccaatattgaataatttattatgttgaaagtagaatttttaatatgattaaaaatttcatatgataatcttatttttagtacaataaattatttcgaaaaaaaaacaggtaaagaagagtgtagctttaaggggacatctaggttggagttgatgaaatatgagattgagaagaatgagttgttgtcacattcaaaaattggtccaaaagagctttggccaagtgtatccaactatgtcctcaaactctcatcatcagaagatccaaatacaactcttgcatttttctatgtcttggattctgggggtggtacctatccacaaattatttcaactgctcaaatagaatggttcaactccaccacccaaaatcttaatcctgattcaaggtacatataattaaaatatatgaaaacatcacctacttttcactatatgatgttatgttttttatttttaaaaattattttgtattctgctccaattttaatc

SEQ ID NO: 163305 - DNA, 1256 bp, Cannabis sativa
  modified_base (1203)..(1206): a, c, t, g, unknown or other
ctctctctctctctctctcatccacgaatttggttttcattttctctcgtgtctctctttttgtgtaatcagcatcgcatgttaccaccatcacgttgtgtcagtcttcctcctcagcgccgcactcgccctccactcctcctccttcgtcagtctcttcaaccttcccgtgggtaatattatatattatataaaaatcaacttattttatttttattttcaagtattggcaagatctaaggattgtcgagatctataactatcgtcgatggtgatggtggttattgagatttattaattttttgttatttctgggtttgttatctaagatttgggctcggggtggttcatgaccagatttggaatttttttcttcaattgcgtgaatgcaaaaattgatgaaaaaagtgtaaaaaaaatcaaattttacatatttgcatctattttcccattttttcgtcggtagatatacatcagttcttgcaactgatgtagtgtcggttgaaaactgatgctagttttttgttgtagtgagtaactaatttaattagatttagtagccaattgcttttattcttaaacttttgaaatgcaaaacttagctaaaatctctagccaataaggtgatgctcgatggcccgagcaaaaaccctacaaattattgagaattattttttatttttaaaaaaactaattaatatttagggataattgtgtaaaattttctatgaattttattttgagtaatttgtggcataaatacctaagtttaactcccggttgcagataaatacttaagtttaatttttgacaataatcatgcctaacttatatttctgaaacttccataggtacatggtcgttaagtgtcaagtcaatggccacatgacaattcctgattgatctaggtcattaaatttttattttttatttaaaatttttaaatatataccaataaaaaaaataacacgtgaataatgacttgacacttaacaatcaggtacttataaaaattctacaaatataacttaggtattttaccgtcaaaaaataaacttaagtatttttttgcaaccgaaaattaaacttatatatgtatgccgcaaattatttattttacttattacagttaactacctatgtagaaaaattagtggcaaaaatactttgatttagtgatttgactaattagtaatttttccnnnngaactttgacatataccaaataatgtcccctaaatttttttggccgttaa

SEQ ID NO: 163306 - DNA, 1035 bp, Cannabis sativa
ttcttagcagccattgcagcactaaaaaactcatccaatgcttgagaagaagaccctttaagaccattaatctcatttctcatagcattctcaatcatctctttaatctcaaaacttttccttctcatctcattccctttctccgaatcgaaattcatcaccaactcaatcttctctgctaaatcttcacacctaacctcacacttcttccctctagccacttcaacacaaaccccaatctccttctcaagcaacacagcattgaaaaactgctcagccgccataggccaaccgagcattggcacgccattgctaagagcctccaacaccgagttccaaccacaatgagtcaaaaacaccgaaaccgctttgtgtgaaagaatctccacttgtggtgcccatgtttgtaccaacaatcctctactcgaaaccctttcttcaaaccctttaggcaaccattcttgagctctgaattcagagtttatgtcaaaaccaataggaggtctaactacccaaatgaaatctttaccacttttctctaaagccatagctaattgcatcatctgtgaagctgagattgtgttcatagatccaaatgacacaaatagaactgaatttaaagcctttgaattgagccaatctctacaaagctttgatgtaaactcattctgttttgctctactttccgatggcaaaagaaccggtccgattggccaaaccggtttactgagttttctcttaaaataaagcaatcccaattgatcaaactctccaatggtgttaaacaaaaccccatttgaatcaacccaagataagagatttcccaattggaatttcgaccaaggatcattcccatcagcttcaaaaatattcaaaggcaattgggaaacatgaaagatcgaagcttcctcaaaatccggcaacaaaaactcatcggaatcaactttccggtgaggaagattcaaccaaagggagtaataacaagccaaaccaaacccactacagccgctaaagaaagcgtggaaaatacccatt

SEQ ID NO: 163307 - DNA, 1219 bp, Cannabis sativa
tagataacacctgtgagcgccagtaaaataaattgttacggtcaagacgaatgagaggaacaatatcattggaaatgatttgcacgaccgggagttgattcgtatgtgtggcagcggaggaagaggagcctttaggcgtaagaccagcatttgaggaagacgccatgggagactgcttcaagaacaagattcaacagagaaaggaaaaagaactagtagcagtgataccaagttgagaatgatgaaaaagagttgtgttgaattacacagtctctcagatcttatatatatttatgatgagtaaaatacaagaacagaattctgttaagagaagcagagaaagagttgtaacaaactctgtatacataactgtgtaactaattaataacagaaataactaaactactaactaccttctccaacagattccacttaccagtagaggaagagaatatgtcaataacctcaaaatcatcatcaccaccacctatgataataacaactttgtaaaaactagattcagtaggatcgaaagctagagccgcacacaaaatattatcttttgcgtaatgatgatgaggtggtttaggtatgtgggcgcgctgtctagtgtaggggttggaaacgtagtaagtatcgtatttgaagtgaaataggagaagcaaatcattgcaacagtcgatgaaggcagagttatttgagtcgaagcggttatccccgtggtcccaagtcatgggaatgaaaattgttttgttgtattcattataattggaaagcatgtgagtcttcaaaaactgcctttccgaaacagtgcaagtagtaggtgataggcgtgagactatgtagtttacgaaagggggagctcgcatgatgcggaaatagatcctgccaacaggggtttgcgaccatattattcgaatatgaatatcagagataacgttgtgcctcaatgtggacacacacttgtatcgtatcagttctttcttgttcttgtcctctattaatcttctcagaatctccaacatattgtcgtaaccccatttctccatctccaaatctattacagatcaatggatcgttgatgtttttcagtttttcttttttctttatctcagcacacagttacctctgcatatcaaaccatacctagacaatctccttatatatatctattctatataaaatgtggctatataaccgaattcttggtttatgagaa

SEQ ID NO: 163308 - DNA, 1701 bp, Cannabis sativa
  modified_base (1651)..(1669): a, c, t, g, unknown or other
ttctatcttaaaaattcctacaattacttttactatcaatgtgtgtacactctactcatgaaatattatgaagatgaaagagagggcgagattcaaactgagtaacacaagtagggggagagattgagagatggagagactagggtttcaacaattaatacacttttctagtttagaaacttatgtcgattgtaacttaattatgtattatatgttatctatacatatatataacctttaattagttctataaaacataaataaataaccaaaattctagtaaataacttaataaataaatttagtaaatcttgattaaaataattatttaattaataaatatcttattttataaaatatttaattaattctatggtatttatacatcaccacacacctatgattgttgtctagagcatgtggcatatattttaatggcctaaaattattttctcaatttattttaaataaaatttattatttattttataatacataataattagttaattcttattaatcttttatttaattctagattaaataaatattattttttattaaaataatatatttctctctcataatattatttaacaaataatattatatttaactaaggtataattttatgtgaataaaactaaatagttaaattaatttgaaattaatttataattaaactattatacacataaaaatttattcaaaattactattttactctcaagaatattttcctaaagaacttcattctttcttaaaataactgatcctctgattaaacattcccatgtacagtgtgatatagaggtgatctagggatcaggacctatatttcaaagcttaataaattctacattattattgaactcatcaataaaacaatcttgtttattaatttaattattactctgctgtaaatataaaattacactctttgacaatatataattatacatatattatttctagtagtccattgatatagtcaacacaaatcaaaaggcggaatgaactttcgaaatttaagatattttaatgtggcacttttgggcaaggttggggcctcttaatcaatcctgaatctttaatgtcacgtgtcttcaaagccagatattatcctattgacactttcacttcgaccactttaggttccaacccaagctatgtgtggaggagtatcttggaagctcaaaaattagtggctaatggggttcgttggaatgttggcaatggcaactctatctcggtcttaggagaggcatggctcccagatgaaacaaatcctagaatcatgtctaataacccaagtctcatgaatgccaaagtaacaaacttgatgaaacagggcagattagaatgggatgaagagaacctgaatgatttatttgagccaagagaccgtgctttgatcctacagattacacttgatccttcaataactcgtgactgtttggtgtggtctcgagagctttctggtgtgtatactgtcaaaagtgcatatagattaatgtaggaactcaaaggtgacatggacttcatagagactgttgagaataaattttggaaacatttttggagtctcaaacttccccccaaaatgaagaacctggtgtggagagcgggaagtgttggaaattattttacnnnnnnnnnnnnnnnnnnnacaagtatgttgattaacacctttaatatgaa

SEQ ID NO: 163309 - DNA, 2824 bp, Cannabis sativa
gtgtttggaagtaagaatttgataaggaaagaaaaaagtgaggagaaaaatgtggaaggaaatttttttaaaggctatttggctttataacttaaaaccgttttcaatgttttaaaatagaaaataactttcaaaaaataataagaggcatttggccaaatatttaaaaactgttttttgaaaactgagtgttattttctattttcaaaaaaaaaaaaaaaaattgcctaacaaatttttttcttacaattttgctcacatacctagacctggatctcaaatccaaaccctggacccgaactcgaactgaacatggatctagaccgaacccggactaggacccgaatatggctcagaccaagatctggacttgaacctggacctggaccacggacccggatggacctcgagatcccatttgtcgtacacaaccctagccctaaaccttggactctgccccggccctagacctcgaacacgacaccagactcaaacagaccccaaaacccagactcggccccgagtctggggtttgggctagcgttcgggtcagggtctgttgtccagttccaggtctagggtctgggttcgagttcgggtccggatctaggttcgggatccaaatctgggtccaggtccgggtctgagtttgggtccgaatccgggttagggctggggtccggatctatgtctgaggtccggtcaaaggtgggataggttcatctcgtggtatggtgtagaatattgaaaccttttcttagtaacaaaaatctaaaaatagttttaataaacctgagccaaacaacattaaaattttaaaataacaaaaaaatattttctattctaacttttaaaaatacaattctgaaaactgaaaaactaaaaacacaaccaaataacctcttattttctcatgtttggtaaggaaataaatattgtaggaaaaaaacttttcttatttttattctctcttatatggtttgttgatgattttatatgggaaaaaaattattgataaaatttatattgacataatttttaatttaattttattttttaaaaaaataataacttttctaatccttcaattgactaatatatgatgtaaagcagataataagttaaactcatatttattcaaatttttatttaattttcatattattgtaaaaaaaataagggtttttttaatattatacttaaaattgattttatttataaaaaaacctttaaaaaaattatttgcacaaataccgttatgccacgtcagtatatataccgaaattcaaaataattaccaaaaatagaaaaaactgaaaaaatctcgtttccaaaaattttcgctttttgggagttttgaaaaaagcaaccatttagttacttttgatgtaaaaaagatattaattggtttcttttctataaaaaaatttattatataattttacacacatataaataataaaataattatatttttctgtctcctttttacaaaaaggacgactaatattaaagaaatttttttgttttttttttatatttttaggctatattatgttattttattgtttaagatactttgatgttactttttccttttctttagtgtaagttatatgatgtttcagatactattcaatttatttacaattattttataaacttattaaaatagttttataaaaatagatttatttttatttaattttgtaatgtttaaatataaaaaataaaaaaaaaattagtaacttatgaagttgtttgatatattaaattttatttgaattttaaatattatttatttattaacaaaatgtataagaaacttaaaatatttaataaaaaagacgaagaaaaaagaaaatgtttgacaagtttatcatcattataaaaatacactgtatatattatgagtcatataaagacaaaaaaaaaagtaatcaataaaaaagaaaaaaaaaatgtaaatgttgaagcctagaagagagccactaaatatattgatatatgtatcagcctattttaaaaaaaaaaattaacaattttcaaaacaaactatcggtatgcgggtgtaaaattattacataatagttgatattttaataactaataataattttttaaataatttgatatttatgtgttgggatgtaattaatttttttagtgtaacgtttaatagactaaagagattagctagaaactaataggtatcatcttctatagcaaaagtaaaaaaacataaactttccttatagtcatttaaaaatagtagaatgcaatcattttaaagcataaactatcattagtctagcatagataaaaaataataaacaaagaagagaaactctcttaaaaaaataaaatggaaaaataaaagagtctgatggaaataacataaaagaataaattaaaagagaaaaaaatttccccttacagggaaaaaagtaatataccgcacttccaataataaattgtctcaccacatttctgtaaataagttgagatttgtgtctgtaggcgtaaatagttcaaaaaataaattaaagtagaaaaggtttggtctaaacaaagttatgtcccttctcgaaaggagttttggaggttcaatacattttttttaaaaaaaaatttagttttaattaaaaaaatttcccaatttttcccattcaaacaaaatgacacaataagctgaaaaaaaaaaataattagttactacttttgatcgtagccaaaaaactgaaaaatatatgttttgaatgttagagattttataacaatggaagaaaattaagatatattacaactctattataaaataata

SEQ ID NO: 163310 - DNA, 2183 bp, Cannabis sativa
gacacgagaaccattcaatctatatttaatttatcttttctctaatatgaccgtctacaactctgaagaaccattttctttggacttattttatacatatatctcagaggccatttacttttatattgactcaaaaaaaaaaagttaaaagagtcaagatacttcccttgctcattttatgtgagtaattctttttcacaaagaactgtaaagaagtataatgttcttacataatatataataaattatacaaaggaacatgaggacaatcactatcaaacaagaattggaaaattaaactcaagaaatcatcacaaaaatatatatttaacaaatgaaaactattcataaaccaatatattatttcctatatttaatacaatcgatcaccatattttctcttcattactatacaaaaaaaaaacaatttaaatcacaaaacaaaaaagtataacaaaattaatcacattaaactagaaaaaaaaaatacaaatcttgaaaatgaaattacgaaaaaataaaacacaccttttgttttgggaaataaatctcataaaattcttgttcaaagcttaaaaggtccatttccagatcttaattctaacatcaaccttgcacttagccttggcagttgatgccgtcgccgcctttttccccgtcggtagagtaaccctaattccgtcgcaagaaaccctaaccccaattttcggcgacttcaacgctgcgactctgcccttcactttagtgtccatcgttaccctcactggcataccactcttgctcttcatgttcgtcctcaaatagctcgccgccgaggtatcgatcgctctgcggttgctcacaatcgaagtcttcagcgttgtcgtattcttcttaccgtggacgaaggacggaattacggcgtcgccgatatcgacgtctccggagtaaatcgagatggaaataggatcgtaggtgtagacgagatgcttgttagggttgcgagcagtcacactgaggtcgaatttggagttgagttgagaattagcagaggtgagattgaggtacgagagtttaagtgaggtgacggagaaggaagggcgttgaggacggtacataacgtagaagactactccggcgactccagcgataaagagaaggacgagtatagcaactgtggaccataggcagcaagagcagcaacggctacggcgacggtacgggtgaggttgggggcggtaagccgggcgggcattgctgtatagttgggccttggtcgccggaaacgcagggttagcgacgccgtttccggcggctggtttagccgagggataaactcggtctgtcatagtgagaaacagagagagagagagagagaaaggaataagaactggaaagttgttggtatggggagtagtagtagttgtggagagcttataaaaaaaaaaaaagaaaaaagaaaaagggaaactaaaatagagaataataggaaagtgggggtgtttgggaagtgagaaagtgatggaaaggaaaatgagagagaaaaaattggagaggaaagaagggcgtaactttgaaaggggggaagccaaagaagaaggtggggtggcatcgcaatataggaagagagcgacagcaacactataaccgaattattattatttaaaaaaattaaaaataaaaactaaaacaaataattattgtttcttataataatttatgagttatgaccacctctgcttctcgcgcgtgttttccacatttttacatttttttttctttttttaaagtgatgtcagcaactttttttacgcaagtgcatgttcaattgttctaaaccaaaaaaaaaaagggttgttccttgatagtgttcctacagccacttcttatattataattttagtcaagtagccctaaattggacaatatttgttttgtttcgtttttttggtttttaaattctttgttattaaattttttaaataaacaattttttttggttggatttaagtgacttaaattaaatttaataaattgaaaataactctacgtgctagtcaactatataggcggtaacgatgtcattgtaaaaattgaagattattgacacattatatgattttgtgctactgggaaatttgattttctatgcttagaaaatcaaaaaatttgacttttaaaccaaaaatttaaaacctaaaaaa

SEQ ID NO: 163311 - DNA, 726 bp, Cannabis sativa
tggggttggggccaaatctaggtctaggtccgaggtatgggttgggtccgggagccaagggccggggttggggtttgggttccgcgctgaggtccggggtccagggtagtctagggtccagggttcgagatcctaggtccagggtttgggtcaaggtgcggtgtttgggctttagggtcttggtgtccgggttcaagggcggggtcgcagctgaggttcgaagtcggtctcagggtctaggtgggattggattcattttttctttttttttctaaaaataatttttagaaattatttgccatgtcttatattttgaaaactataaaaattgtttaggttctcatttcattattttctccctaagtgatatattttcaacgatatctctaattctccaaaatatattgccattcaatttgaaatttgatgaaaattttggatgattatattgcacccgataaatatacaaagacattctatttattaaaacaaatatatcaaactaatctatttttttgtttcaagctattcatagttcaattttgccttctcagtttggattacttgttgatgattgtcgggtcttactctcgtctctaaataatgtttttttaaagtttgttaaacgatttgtaaatagggctgctcattgtcttgctagagagtcttgtttttcgtcagattgtatttttaatcagcataatgtttctgctgattttaagtcta

SEQ ID NO: 163312 - DNA, 2665 bp, Cannabis sativa
aaactcctatgttacccgggttttcctccaccacaaatgaagcttcccaataaatttgagtaggagtcggactaagacaagtgacctcttgtctcttttcaatttttttttctttttttttttaacttgtgccgcaaaatatttacatttcatatgcacactgaagatagcatttcagaaaccacatactgaaaaacagcctgcattatgtgtataagaaacagatcaatctctcttacaaagtgtaaaagtattcatgcaagtaaatttccagaaggttacgaatttgaccacacaatcctacattgaagcctttttgtttcttgaatgatgccattaaaagggttgttaaatatcttaataaatgtttagagaaggtagcttaataggcttgtatatcggcttattttgctttgttttgtatatactttagttattttagctaattgtatgataattgttaatcattatgttttgttcaggttttcttttggaaagttcttctaagtaagatgttttcccgaattgattagctgaatgtgtattgagaaatgattttttttggggaagacactttggaaatctttgcacttgtttgttcacttatatgtagcttgttgaatataaatatgacggaaagaagttctcaacaattttctttctagacaccttatatttgtgagtgataaaccaaataaacacatcatatctcatgataaaaactcaaatatgatcaacttagagtagagaaaatgtttctatggtcaattattcagttatgaagaagttggtgggtcatgatttgtttctgttctatggataagaagaggataggacatagactgattcttgtatgcctaaacattttttctttctgttataattgctattagtattactgattcagactacttcgctttgtcatgtgcagttattcattatcctatcttgcaccattgcagtcgggaccaatcttagccaattcatctgtatcggcagatttacagcagtatctttccaagttctcggtcatatgaagacaattctggtcctcatcttaggattcattttcttcggcaaggagggactcaatttacatgtagtcttgggtatgctcattgcaatcttgggaatgatttggtatggcaatgcctcatcaaagccaggaggaaaagagcgccgaagctattctctccccacagccaaatccccaaaacatgatgtcttattagaaccctctgacacagatgaaaaggtatagaattcacaaagaacaaagaagaaaaataaaatatatattgaagaagcagaagaagaagaaaagttgaataatttgggagctgcttcacattacttggcagatcacttaaatttatcacaatttttttttattattattatcaaattttgtcataaatcaattttacaaactcagattcatatttccggaagttttcataggtttttgttgaacaggttaaaatttcggcaaacacattgttctacatttattttttcatagtaatttatttccccctaggcaatttttacccactatgctcaattatttatcttgcatttgtataatatttttgctaatgcgcttgggattccctttttattttcactcttttttttttttatccctggtgaacattgttcatcatggaccagaatacatgctaaaatttctgtggttactgaatttcttttgacagaagctaaattcattgtctgtacatatgagacatactgtgaaatagagttaagtattattagtttcttggatgcattattatattttgttcgctctgcgcataatacatatcaccagaacttgaataaaaaaagctcattgaatgccttacttcagtgttaggtaggcacttaccttaccttaggagtaacctgaataattgaaaagccgtacaggaatttattaacagacttacttgtggtcccattatatcatatgttagatctgcttacttaatacaaaactctatatgaataaacagtgtcacaagccccatgtttgcaattttttgttagacaatagggtgctcttgcaaacagtgaagtttcagttaataatatagggcatttatggtattttgttttccctgaagtttttatggtacttgatatctgcgtttggttgtggctatctggcaccatggttagtatttttcagaattttaaagttttagaagctgctcattactcttctgtgttctttggtcaaagtttaatagggatgataatttgactgcactattaccactgagtgtttctagtagctatgattttcaacattgtaagataataataatatgatctctctcgcttctctaaatttttgtcagatacactggtgtctaccacttattagcattgttggtatcacaaaagctgtatttactttagtagttttcaatttgaatagtctataactttaggctgctataatcaaatgaaaattattatttattattattattattttaaaatttgtagtaaaatgatctttttaaattatttattatttatattatcttttgctatataaattaataatttttctttcatatattttttttttttaaaattagaagtatattacttaaagattatgatatatttatattagttttgttaatttttt

SEQ ID NO: 163313 - DNA, 2654 bp, Cannabis sativa
  modified_base (333)..(337): a, c, t, g, unknown or other
ttgttgattttatttaagttaggtccgggttggggtcggggcatgtggctggggccgagtccgggttggggtcggggcccgtggccggggccgagtccggattcggggctggggtctagagccagaactaggtctggggtttgaggtctgaggtttgaggtccgggtccgggtccgagttcgggttcgggttcgagatttgggtaggggttcgggtttgggtccgtggtccgagacgaggtctgggtccaggttggagtctgggtttgggttcagtttgggatctgggctcctcgtccaaggttggggtcacttttgtttttcaattttaaannnnnaaaataaaagtgtgttctataattttttttttatttttatttgttgatattatttaagtaaggtctgaggccgagactagggccggggtctatggacggggtccgagtctgtggctaaggcgaggacaggggctgggttctagagttgggattaggtctggggtttgaggttagggtccgaggtcgtgcttcgggtccaggtccaaggtctgagtttggatccgggatccgggttcgggttcgagttgggtccgagattcgggtcaaggtaggggttaggatcggggtccaagtttgggtttgtggtttgggtcggggttggggtgggatccgggtccggtcgtgttcaagctttgggtccgggttaggagtctaagtctgaggtctgggtccgggattcaagtcgaggttcgagtctagatcgggattcgggttcgcgtccaggtcaagatccaggtttgaggttcgggttgaggtttgggtcctaagtcgtggttcgagtctggattcaaaagtctaaattgtgttcaaagtcttaaaatattgatcaagaaaaaaaactgtttaaaaagattttataagtaatttttttttaaaaaaaaattgattttcaattaaaaaattaaaaattaaaaataattttataaaaagtaattttataaaatatttttatttttttaattttcaaaataaaatattaattaaaaaaatattatttattgttggggtggatggaagacaaaagagagcgcaagtgagagaggattagagcgagtggagccgatcgaattcaagtgggagcattgacgagagaggtcagggccgagtgtttttaggtttgggatatgtgcgactgaaaaatgaaagagaatgatagaagttaaaatgcaataatattataattttttcaatttagagattttttttattattattattattatcttgttgaattttgagcatgaaaaatcaaatttcacaatgaaattattgtaccaattagctagatagaatccctacactatatttttttgaaatgctgttagagtagacatacttgtttttttcttcaactaaacaagaacatatttatatataacatgtgaaatcattgggaaactattaccctacagtacatatatttgttttactcgaatttattttgtttgaatctgcagaggcaaaacgtcgtgtcgtccagtaaacatggattccacgtatgtgaaatatgacttggtgggcatcaagcagccttattcacaacaatttctgggcccaacaacttcacagcaatagagtacgaacgatttggacccaattgttgtactaaaacgttgttttcattattaccttttaatgaccactaaattaagactacacaaaataaaaaatttacgagggattactatcaccataactactactcataaaaacatcattttttttttcctttcaaaaataaatacaaaaaatgtgaattagctgaaaaaatatttaaaaagttgtatcttaaatgtggttcacataaggcctcgtggaagtcgaggttgagtagcctctgaattgggcgttgttccttcgtacgattgcattcagctgatcttttttttttggctcttggtatattaaaagagtgtaactttggtggactgagctcacctgaaaaagagaaaaaaaaaaaaaactttagaactcaattgaattttaatcacttgaaattaaggtggggtttggttcaaagtaataatagaatagaaaagaaaaagtttttaggattatttacaccacatattaaaatttttaacatttttattttttttattgtggggcagaatttttttcataaatactgtatactatgttaagttttcactgttattttactgttatttttataaaaatacagtatttttgtaaaagttaacctaaattctagtctttttgtaaattttactaatttttattctattcttttatttggttacattttaaagtataagaatgtcattcttatagaataatttttttatcattttagtagaatgaatgttctattttgacatgaaaagaaagacattctgatgcaagatgaaaaaaaaatgggctgagatgcaaaatgaccctaaatttgaaaactaagttagtaaatgtcacttttaaaaaaattaagaaaatgaccaaatataataaattagctaataaaaattataaaaatacatttgtcacatatttttttaaaaatatatatataataataaatttaagttgtataattttcttagtattgcatattattatattgtaacaaaaataaata

SEQ ID NO: 163314 - DNA, 1720 bp, Cannabis sativa
tatatatatatatatttcaaaaaaggtgactatctccttcctttctatgtgggtctttttctgtttttattcacaaagtataatctttttgttaattttcttatagtggagttttatttatttattgacacatagtggagttttatgttaattagtactaagttattttaaataacaattttagtatatactcatcagaggccatgcaaaatgagaaaattaatgtttgattgtcattatctcgaataactttcacatccaagactgtgtgatatttttttctataattataatattgtagatttcattagttatcattctaacaacttttaattattaaattattaattttaatgccattaataataatgaaaatgattagcacttaacaaaaggaaaatgtatgtatgtattagattaaacaaaacattcaattcacgttttcttatgataattatttgagtagtgattaattttaatcataattacacgcgtcatcttaatttttaattttctaaaaaaattattaaatttttgaggtagcgtttggttggaggtaataaaatggaatgaaatggaaacaattttcattctattcctttgtttggttgtattttaaagtattgaaatgtcatttcaatggaatactctttccaccattttggtgaataactattccattttaaaaaggaagaaaaaaccattccaatataacaagagaaaaaatttaatatttttttatgcattttaaattttattccattccatttttatacctattttcatttaatttcattcatattcttatattttcattcctcctaaccaaacgtcagctaacaattacaaatgtataatttaaataattatgtcacaaaagtggacaaacatccataaattatttaggtggtcttaaaaaaatatttaaatttattttttaatgccaaaagtcagataaaagtatactaacactctcttaataagggatgtaatataaaattccccattattagtgtgttataataaaaatattttaattttatcatattaataaatagatacaaaacttgtattgaaatttatttagtatgtttaatacatgtgaatttatttaataaaattaatcaaatatgagacatttttatagttaaaaacacttttaaccatattatatattaattgattttgattttcattgtgataattttgccttaggtttgcaaagtgatcatctacaatttgcattggttaaagccaaaataaacactatgaaacaaaagaagaagaaacaatgtgtcaattttagaggggtctatgaatagacttggaagagagtcaagccaaaatcctaaagattacaacttttaccacacaaagaatctaatataaacaatatgtttctcattataaataaaataaacattataaaagcaagtgaacaaacctcattttgcctcttataccatccaaaggaaaaaaaatggctataagacactagatgcccaacaacatgtaatatattattgttgcaattaaataggagattcaacataatttaaattaaattaattttaaatataaataagtagaattcgatatttatttatattaataggtctatagtatatgggctatttacaaaaatgtgggaaaataaaagtaagttttgatatatatggcataaaaacttaattacactaaatatgacattttttaaaaa

SEQ ID NO: 163315 - DNA, 1707 bp, Cannabis sativa
ctaaaacttaaaactaataatcatattcagttcatgtatttgaatcagtattatggcattagttaataatgttagaacttacaaaaccatcttcagagatatcgattagctgataatcggtacgattaacatgaggaacctgcaaacaatttcggttaaaaattagagaacaaagaaccaaaatgaatcaaacagagaaagtagtcataatatttgaaccacaacaatgaaaatggccttacatcacagttgtgggatgaaggaacaatatcttcaagttttttcccattgaatatgtcaatccccacaaagtgacactttgcatgtccatgcttgccagttttcgaggtggaaacttcaacaacctgttcaaaagcatcaggaataaacagagcttcaattcatgatcttgaatgttaaagtaaaaacccaattctacaatagataaggcatcaagatatataaaggtgaggaaagtccataaatttcccaaaaaaggctgaaatatagtaatgattacatttgaatgtctcaagattcatggaaaattctaactaataatcaagatacctatgttgacacctatagtttcttgttcccaaatatttggagtaaagggggaagattagctcaaaaatattactgcttaaacataaaggagttcacaggaattttcctttttctaatatatattatccatatttttatccaaagtccgaataggctcaaaacatcgatcaaaaaattctgacaattgaactaatctctcttgtattaagcttcaaaaggtaatagcaaaaatcaaatgaaaaacagtaaataggaaaagagaattaagtattcaattattcaacaaccccataattttggatatatattatatataaatatagttcaaagagaatccatgaaattattagtaaccataaacacaataagagtaaaattgaagaaaaacccaataaaggtaaggcataaagacataaccgaagatgaattttcacatgatgtaaagaaagaaaatcaatagagagagaaaccttgcatggcctgttcttgatgacgatgtagccattctttcgaatggtaccagcttgttgagggtaggtcttggacgctccggcgtcggccttagattcgaagtggtgttcctcgtccgacatctctctctctcttctctctctctttgtaccagtgaaaatgatttctgcgagtagttattctctgtattccaagattttatacaagtctcaaaaatattctcacttccatttattcaggaaaaaaaaaagactaaaaactatgttattccaaaaatcgacatggccacgtggcatgatattatatgacacgtggcaagcatagttagcaatgggcggatgaaggataaataaatactctactcgaaaaaaggcaaacaaaacatgaatagacaatacttgttctatattgtaggagtggcaaatgttcgtgtcatattttatgtgattcgctttatatttcgtgtcaagcgtgtcgagccgatttttgactcgtgcctaattatctcaaccttaacccgacccgtaaaaaattgtcgtgttcgtatcgacccatcgtgacccgttttgctattattaaagctaaaattgtagagaaaattaataaatttaagctccattaaaaaacttatgtatatttatgtatactagtaaaaagttaagtgcg

SEQ ID NO: 163316 - DNA, 1880 bp, Cannabis sativa
tgttcatggatttctaatcaggactgcctttttaaaatcaagcatattcatcgatacagctttaattgatatgtatagtaaatgtcaaagagtgaaagtagctagtagagtgtttgacagcatgccagaaaagaatttggtttgctggaatgcaatgatcttggggcactgcatacagggaaatcctgaagatggtattaagcttttccatagaatggtgggcaaaggaagattacaagatcgagaaggcaactgtattaagagtgaaaggattgccaaaggtcgaggaaatatactacctgatgcagttacttttattggtgttctttgtgcctgtgctcgtgctagacttttagaagaagggagaggttactttgaagaaatgactaacttttttaggataaagcccaattttgctcattattggtgtttggctaatatttttgtaggtgttggccttgttaagccagcagaggagataattaggaacattccgcatcatattgtggacgagtcacaggattcattgatttgggccaatttgctcagttcatgtcgattcgaaagagatttttggtttggggaacaaattgcaaaatctggtattgacagggaacctcataatctttcatactatagattgctgctgaatgtatatgccacagccggtagatgggaagaagttgcccgagtaaaggaaatggtaaaggaaaaaatagtgggtagcatgccagggtgcaatcttatagacttgaaagagatagttcacaatccaagaggagaggaactaaggcctttgaatacaagaagagagcagccatttagttagatgatactggttttacttttatgcaaattggcatccacactaaatattggagcttcttggtgaacagggctgccattgatagttcaccctaagctttcagagaaggcacatgttatgatgacaatgacgaataatgataaaagtgaagggagactgactctgtaagtgagtttgatgaaagtcaagttacactgctgtgcactgtgtattccaaattttggaataaagcattttcttggtgaaaggtttatgttatttattcaatcgtgtaaacatctcatagtcattttgcctttcttcaaaaatatttaataaaacgttgcttctctttttcttctttatgtatagtttgttaataacttcagtaagtaaaaaatgttaccttatcaaccaataattatattacactatatcactcaatactttaatacagagtagggacatttctcactactaatacaatcaacttaaaaacaagattagctcgatcttttaacaaaagataactaaacattattaacacaaagaagctttttgaaatttctagcaacactccaagagaggacaataaaggatttgtgctccaaatagaaattacaacgttaaggcaatttgactccattgtctcactgtttcttttttatccaactcaaagtctccttaatatctaaagtttcgaccaactctagatttacatctaattcttagcacgagccttcaccataccaagtctaaatctacgagcagcaacgtcaacattaaccaatattagcgcaaattgatagaccaacattaggcaaatcaatttaaatccattaattataatacacacgaaaaaattgtatacatgtttgtatttatttccttaccaaatatttctttcaacttacatttatttattttttttcaaagtaaagccatgaattttatttaggattattttacaaatacacaaaaataacaaaaaaataaataaatacagttttacggaattttaaacattttactatttttttttattttatacacagaaaatacggtctttttatgt

SEQ ID NO: 163317 - DNA, 1861 bp, Cannabis sativa
atttggcatgtaatagtatttaattggttaaataattgatgaaaacattccgccaagacaccaactttgtacttgcggttaagtgacggaggaggagaaaaactggcaaaaatgagatgcattaaaggaaaggacagcaatttacagtgctatagatttcgatacgatgaagcaaaataaaaggcgttaatacttatgctttagcaagtgcatgtataaaccctaactaattatgaagccgtagaacaacgaagagtaataaaactaagaacacgagaagataaaacaagttaaacagtgtgtaacacaacgctaaaacaatcaatagttagaacagatcgaacaaaaaacattttaaaaaataaataaataaaaaccctatccaaagctcatagtcagaggctttcattcacagtgaccaagcaaacaattgctcaaaaaacaaacacttttccatggaaaaacgcatcaacaaagctgaaaacacagcaaaacaaacttcatcgcacttcaaaattcattgagaaaaaaaaattggggcttacgtcgagaagaggaaggagttcatcaacggatgacggaggttccacaagcctattcccagattccagcagttgtacttcaagatctttatcagacgaagccattatagctctgtttcgtctctccaactacagatccttatcaatctcagacctcagacacaaaattcagaccattgacagccttgaaacccctagaaacccacgaatcgtgggaagaaagaagatttaagaaaaaatctacgatggagaaagttagggtttccttttagagagagaaagagagtaagacagataaaccgatagtgtttcgatttcgaactatttttttccagaaaattaataagtttaaagtccaaaaaaataaaaataataaccactaaaggctaataaaaaaataaacacttttttcttgctttaaaaataaataaaaaaccttttaatgggttttttacttaattttctccgaacactttggttaactctttttggtaatctgtaacttgtattttgtggggtgtatcaaaaagagaagcgaatccagtaaagatgagctcggatttcgcgggttcaatgaattaaatttcaatttaagctttcgagtccgccactgattttcactcctgggtcccacgtggagttggttgggaccgttagatttaatgctgcccactgctttttttattttatttttttccttttcatgttgggatattttggtaaaaatggaaattcactcataacttggctatattctttttttttatttttttcaaagtttgtgctacctttctttcgaactgaatttacaaaaggaaaaagattcatttgagacccatttcttccaggagttgaaatagctggttcaggccaagaacagaaatcaccaccaacaaaggcagctccaccatgatgatcaccattctcaaactgccacgtgttaccaatttctttaacactactaccaccattgtcaccaccagccccaccatctcctagaccaggaaaaggccgaattcctctcccagcccaaatcatcaagcccaccaccaagcccaagcccaagcccaagcccaagcccgaaaccacgaagagcaagaaagcccggactttgactgtttaaaagagaagtaaaacgggactcccaccacaaaacccaccaatgttgggcttaacatcaccaaaatgtaatcaatgagaaattatatggcttttttgtaattggtttagaaatatatggagaaataaagaaattttataaaaactggaaaaatgaataaaaaatttaaaatatggaaataactaattagtatatataa

SEQ ID NO: 163318 - DNA, 1676 bp, Cannabis sativa
gattcaatatgctcgggaaataccgatagacgattcataagctaaaatcttcccttgcgtcaccggataaggaactatagaatgcctcatggcacagaaacagagcgagaatgacatctcaagaggctgacattcttttgagagaatgatttcgtagaagcaataatcctagctcacatgtatgatgagttaacatgattgatttcaccgtgaaaaacatcagtcggaaccgatacaaaaagtacagaagagtaaatagtttacagttaatttttttcccctttctttcttcccctttttaggagcttttccttccctcagttggtggtgactaggttttcttaatcactgtaaatatttttcaacgtattcgccagagctcaacttttagtatttcaggtctatgattctttatattgcttaatcctaattcatggtgagggggtggggtgctgctaacaatgagggcctagcgtctataaggcatagtgtagaattgagcttttgagctatctaaagtaaagacctagggggcctcaagtttttagtctgctctttgacttgttaagcgtcattcaaccattcaaaaacttgacgagtatttttgctttgttagtttgctgttgattaactatgcctatattgattaacgtgttgatcctcttccccaacccccctttttgctgtctcactatctaactttttgattttcaagtgcttacacgtgaacatgatatgcaatatctaactttttcaagtgtttcacatctttagatggttgtcattttcggcttccattaatcaggaaagaggcactggtgatttccatgacttgtgaaaaagagtttagaaacaaagataacattgataacaaaaaaaaaaaaaaagaaaagaaaaagttatcataatgaattggtatataatattatagaagaattgattagaaaatatctcaaaaaaaaaaaaaaaaaacattcattgttcaattgttcaatgtaaaatgattattaatttttatatttttcttcccaaaaaaaaaaattactttatatctgatgtttaaaaatagagtaattttttttttccaatttggagatgaattagtaactgtaaaagtgaaaaaaaatgttgattactacctttggtgctattgcaaggctgatttttattgattaatatattttataacactttttttctcttcaaatttttctcacttaaaataaaattagaattggcctaacatgtatcgcatctttttagttttagcttttactataatatattatgaagagtgcacttaaacattacaacttacatgtacttttttttaagcatcttcaatggtacacattccaccaatgaaatcttcacattattatacctgcatcaaattggtgtgcagtgcatcaaatgatgttaaatttatactaaattagtgcacaactttttcttttcatttaaacaattcttctaatatatattgaagtgtaatcatagcttctttattgataacatgtaacagggtgatataatttttcatattcaatctcatatacagggtgatatttttcactctctacttgtttagatgaaaaacaaaaattgtctattttctttttcatattcatgtacgttatagctatttaggatatcttacaaaattttgagaaatt

SEQ ID NO: 163319 - DNA, 4626 bp, Cannabis sativa
  modified_base (4171)..(4173): a, c, t, g, unknown or other
aaaaaaaaaaaaaaaatcagccatctgcataaagttgtagacatttgaatgacataatatattcacaatggagaacatacaccggtggtgatcttagtcacaagttctgtgtagcttggattttcatggccatctccaaatgggataaatcgatatggaactgcataaggcaataaacccacagcagcaacaaaaacatctatgcagaaacccttgaacaaattctcagttccttgaacttttgacacaaattctttgaaactgaccctatttggcacaccaattctcagctgtttcccattgtttgggaatacccaaccacgaggctttacagttgtctcccccggccagataacagcatataacttctggtttgccattgaccgattaggtggtctatcgtagagtgcctcgggaggaatggttgataaaccagaatagttggaccagtaaccaattcgtcgaaatccagttccaatcacgttaataacatcaaaggcaggaagaacaagagatctttctgaattaaacctgatggggcctgttaagccaacaaggttgctatgcaatatgttgtccaagagaagatcaccgccatcaaaaatgctcaatgcatcaaggcgaagttgaccaccttctaaattttttatgttggaatcattagagaatgaaataaccccaccctgattgaaaaatgcatcaatagcatgagcaaccaaccatactgaatcataagcataaagtccataagaacttaatcccagagaaccaccagtcaacttggcccacctagaggcaaaggctctctttttatctgattcaggtgtgtgatggcgcaaaacaagcactccttgcattgactgcatgatgtctgagggaagtggagaacgagaatctaacacagatgaaagccaatctgtggctatccatacaaatccatttcccatcattctaagatattgcgccactctgaaaaccatgaaacccgaatctggatttacatgaagaactataactcgagattccatcaatgcaacatttacaagtcgatccaggatttcactccggctaacttccaagcctgggggaattggcaccttgtacgagattttgcagcgtctctgtgcaagttgatcacctaaagctgagataccattccgtccataatcatcatctatataaatggtaattatctccttccaaccatagtaatcaattacatcagccacagcggtcatttgatacaaatcactctgtattgtcctaacaaaatatgggaactgaagggaagtaagagtagggtctgtggctgcgaaggatagtaagggaacttgaagttccttagcaacatgggatactatatgtgcaactaccgatgactgcgggccaacaatggcaatgatgtctttctccatgagtttcaaagctgtaaaaaacacagttattaagcttattttattggactctcttcacaaatttccagccatgatagtcaagaagaacaaacacgagataaaacaacaaaaagctgcgcaagcaagcaaactagcacaagttaaaagaaagtaccttcaaccatgccaagaaacccactgcagttggagttttgcatggttacaagaagtttagtcccttgaagaatgctggaatttgagttcacatctttcactgcttcctcaatagcaatcttggcaactcggccaattgtggaatcaaaagtgaagatagccccaatattcacaacagcaggccttgtagaaaatttttgagcatgcccaaatggaaaacccccaaggcatataaacaaaagtggaaaccaaatcaaactcatcttcagctgccaacaaaactttctttctgatacaatatgacacagatccatatcctccaagacaaatttggttcagaaattgattcatgagtatacaatattgcctataaaatttatatgcagaccactactcctctaatgtgtccaatcagtttagagatgtcaatcccaaaccctctcattcttgacagaaagctggacagagaaaaagtttgttaacatattaagcaccaaaactatcttcttgctcagccaaaagaataatttattagcaaattaagcatcaaaactatcttcttgctcaaccaaaagagcatacatatttttctttttgttataaaccaaaagattgattggggaatgagaaaattattcctagagaagttaagccaaggttcttgctcttggtcttctctaataaagtaatattaaaaaacaagaaggagctctctcatctaataattggcaaagttgacttcaattttacccattctggcaatgacatagcatttactccacacgtgataaacattatagttacatttctttgatgggtttcacatcattaagagcaaaagctataagaatccagaaatacagctagcatcaaaacacaacacaaacacagcccagaaaaaaaaaacaaagaagggattagattctcttgctgttataaagctctaagccacaaagatagcaactttggtttgaaaacccagataagatgatgcatcagcatcaaatagaattaatattcaattcaacccaaatgaaatgaaactaaaaaaaaaagaccttaccccagaaactcaagtaattgagtggaggcatcccattcctcttccttccctccctatctgaaaaaaaacaaagaaagattggcagagaaacaataaatgggatgtgggtttaagagaaaaaagtccataaatggtaaaacccctggtccccttgctcaattgttacagatgaaaacactcggaaaacaccaaagaatctaaaaatcacgtgcttcaaactccaaacacaagtgggtactgggaattttagtaggtaatagcataataaatatgcttctttgttggagaaaaagatatatatgtgtgtctacatacgtaaagatcaaaactttaaatcacacttctgtactactaaatactaatatatgctatgggattaggaacattattatcttaattaagacaagagagaataatgtaagttactttacaattccatatagtgtaatagtgtcaaatcatgtcattcaaagcatagcatataggatgcggggtcacatggatggatgacttgtaatataggcaaaataacataataacatcttcacaaaatatccaattcaattaacaaaatactgatatatatacatacgaacttgattggattgaaaaataaaaaattgtagatggaatattgattgatatataaaaataaacaataaattcatacatatctcaaaactaaatattttaatgtaaaaaattaataaattaaaattttgaaacatataatataaatatatttcaaaatttaataatttaaatgtctattttatctttatataatgaaaatataatttaaaacaaaattaaatatttttttctacatataatttttttttaacttcgttatctattattttatttattttaattttttatcggagatatcaaacaataataatttattttattttattattaattatgtaaaaaaaatattttttaatgaatattaaataacttaatattaaaaaataactaatttaaagtaaccgatctaatttacacttttatagattggactagattaaatttaagctattgtgtgaatttgattgaatttaaaaattaatatccacatttaatgagatcaaatgcaccataaacaaaatagtagggatcaaatttggtaaatactcctctccaatataatacacagtcaaaggggttatgtttaagtactatatggatatacatacgccaagaaaagaataaagttagctttagaataatgcataacatgacattattacatttcttacaaccccaccaactcacattttcaacatactttttttatgccatttctttttgtctctaattttaaccaaaattccaacaccacttcagagaggaaccatatgccattgagtccgttctcatttatcagatgattattctatttgtactatattaatctctttttcatgcttatttacaataaaactgaaataaaaaatttagtgacaattacgtaaaatatcaatttttataatttttttttacatgtttatgtttaatttttttttttttatannnttttacggtattttataaaaatataagaaaacaataaaaaaatcaaatgaaaataacaagaacacaacatcaaaacaatataaaaaataatatacaaataacaaaaaataaacaaaaaaaaaataacaaaaatacaacataaaaaaccgtatttatgtaataaaatttaaaaacccgtaaaaatattaaaaattccattcacagtgtatttttgtaatttttatgttgtttttgtatttttttgaaattatctaaaaaatttaagtagaagtaaaagagttgaagactactcaaaaatgattagaaaaaagcattctattttattttccttttccttagtgtagcgtaatagtaagaaatttttggttcaaatgttaggatttaaaaaacattcaagatatatatatatatatatatatatatatatatcagatctaaacatattcttaaaag

SEQ ID NO: 163320 - DNA, 1398 bp, Cannabis sativa
aaaaaaaaaaaacttaaaaaataacgaaaaatctacctcataaccacaataaaataatcagaaacaaccagaaaaataaaattatgacgactatagtacaagcataaataaactataaaataacaaaaaaaaatattattattactgaaaatatatttttataataaaaaaattcaaagagtaaaaatgaaattgttttctgtattaatatatttttgtaatttctttttataatttttcggtttattacgtaattttttttattttatgaaggtggaagctaattattattttaaatttattttcaatgacatagttataactatagtagggatcaaaaacttgatgctcaaacctaataatcttcttttatatatgtaaacatatacactctctaattatatatatacatcttatcccaaatatgttcgtggtcttcttttgacttcataggttgactttatatcaaaatactaatcctgattccataattgaattctataatattaaataaataaataaaaagtccctgcatggccagctctattggtttttaattggtgtatggagtatgcatgctatagaaataatatttatatattaatattttgtttttaatgtgtacttatcatcgacgactgatcacatattaatctaatcctaatttgtttctctataatttttcattctataattttaccactaaattatgtattgaaaaaaaagcattgatattggacattagttgtacttagaccttttaaacatgtcgttttatgattagttaacgatactcattaaaaaaaattacattaaactacataagacctaatatttaattagaccaataacaatatttataaataaaaatatattaagtacattttaacatttatctttaaaaaaaaaaaaaaaacacataaataaaatcaacctaatcgtctcccatagttgacgtattttattttcttaatatattattaactccaattctccacatgagagctgacgtagatgaactggcagcatacaagtgtattgagtatacagaaaatggtacggctaatgcacggcgtaatacgtggagcgctaaatgcggagttgtgggccctcatcgactctagtcttagtttttctctgtctttatccgtatgtgcccttaatttctttttaaagttaatcctaacggccatattcataattataaatgataaattttatttataccctaataatttttaaacgcaccaattctaataatttttattttatataaagtttataatttttctcaactcttttttttaatttatactcttaaaaaatatacttatcaaattaaaataaataatattttaaatattatggcaaaagaattaaagtaaaaaattatatgaa

SEQ ID NO: 163321 - DNA, 1873 bp, Cannabis sativa
ccattgcttcacaagagattatatatctcctcattataaattttcaaaatagtgacgtgaacaaatatcccaaccccattatcaaaaaaagaaactcaatgatacaattattaaaatatgataggaaaaagataatataaaaagatttcaaaccctgaaatttaaaatatgtcaaaaagaaaaaatctaaaatctgaaacattgaaatccgagataaagtcacgacaccttcttctccaagcacggcaagtagtcgatcgtgggggcttgaagcatttcaactagagttttccaatttctaggctattcaactagaattttttttatacattcatcaatttataaggagaaaaagggagaggggaagattaataccgaaatacgtaacccaaaccaaaagaaaagagtggacaaaaatggaaaatattcaaaccttgtatctatgatagtacttgaaccttctacctgggttcttcaagttgcgaaccatgacttcttgtggtggtcgaaaatcgtatacccatcgtctcatttggttctcttctaacttcatcaacaattattaacaaaatataacactaagagacgagagagattgagatcgagtgggtggctttttatggtgtaggtgcgccgctagctgctgggtttgagagagagatagctagggcaagaaatgagaaagaaaggaagtgaacaagggttatatttagttggggttatacctgacagtttaaaatcgtcgggtataaccccgactaaaatattgcgctttaacttaaaatagtcgtgaatttccataaagactgttctaaaccgttgagaatactcaattttcctgacagttttaaattgtggctcaattttttagcgacggtcctcgaaaaaaatcatttgtaggaccgtcgcgaattgtcgtttttgtagtagtgtttagaggtcaacaataagtattttgtaaatacaaaatctagttgactcatccctatgatgacaacttagactagtgtttacaatgctgaaacaatgaagaagtttatgaaataagaataaccttgactctctcctatcgggacatcgttggattcttatttcaattgaaattaagaaattacttaacatgtatcattggacaagaaggtttataaatcatttgcttatgatgtcactctattttcttttataaaactgagtggcgtagatgaccatattccaaatattctatcccgtgatgatattaatgcttgatcatagaaacatctcctactatatatgcttattaaaggcaacttacacttggagttgaattagtaccttactcgtggtccatgctagaataattgctcattaaatattttgtctaaattatgtctttgactttaaattttagattcctaatagaaatttaatttcactctccagatacattgaacactacggtataactttcacaagttgttaatatccattttctatcaatagatccaaattgtatgtttaatgtatagattatgagttttatattctgtgaccggaattcacttaaaatattctaaccactcttcgttgtaacaagacttaggaatcatcaaaagaccacaactacaaatatacatctatggcattcgcatcttgttcatactagtgttgacaagattattctctgcaaagagaaaacatgtcaatatccacttcaaaatatgttcatctgtattcaaacatatggatgtacattcaggggtggatatgagttatcgtttaatttttagatgatcactacagctttgggttttctgccctaaataaaacacatttcaatataatcaaatttactaattaataacagatcagaaatcattctatgttgcatggt

SEQ ID NO: 163322 - DNA, 1043 bp, Cannabis sativa
aaaactactcacaaacacttctcatgaccaactactgattgtgagtattcaagagtatcctcgataaataccataatataattactgaaggagaccatttaccactctccttatgatactcatagaagctgtcaaaataccagtagtctaaaggtcaaaaactaaacattcatactggctaaacctaaaatggaatgccatcatcagaagatcttccttaaaagtctttaactgatgtcactccaagcgaattgcaactttggaaagaggttaagtttccttaaagttattcaactaagtcatcaatacttaactataggtgcctattttacttgctaactagactaatttcttaaaataagtatgtaattcttactccccagtatcaatccaataacaaaattgatctctcactgggtaaagtatccaaataactcatcagggagacatatccttgaactttttgaccatactaacattctcaagtctaaacattttatgtttgccaatataaattattaccgctggatatcctatgtacccatctcgtaattgggttcctaaccttaacccggttataatttgggtttgggaaccccaaattaatcccacaaataatccacggttcctcgcttgtcggctaaaagattactatctttcttatacaatcaaattagccataaacatgggaaaagtccatcccaagtataatgttaaagtctgttaaggatccttactaagatcaacatttaactttctatcctccactctaaaccagcatcataccattataacatcaattcattcgatatcctcaatactataattgcactgagtctcaacactatgattgtactgccaaaatatcgattcgctctttccagaattgtcagacacatatcattgatttttttttggtgtaaacttatgtacacaaactatcgtgctaactgatatatcataacatggcacaacatgaacataaacatatccattctaaccaatgtatctctaatttacctcttggagatatttaacttccc

SEQ ID NO: 163323 - DNA, 1945 bp, Cannabis sativa
ttttttttttttttatagaaaaagccatatatttttgcaaacttatccttttaaaactataaaaataaaaatgtcacaattagttttgattctatgttgttgtaatatatatatatatatatcatgatatataatagtgctatgcctatatttcgagcattaaacatgaacataatacatggatataagcctcaaaaattaaagaaaattataaactcaaggaatttaataggtttctcacctcgatatgtgttacaattaatgatgtattttgtatcacgttgtatgataatatagctattaaataaagatggtaaaattttaagtacaatgattagtgagacaagtgataacaacatcataaattcctctcggacttgactgagatagacaaaacatatgtagaatatgaagggatgagctactgaaaagggtagataacgaattttttaagagctttcagttcattggtgcacatactcatgagcatgttaaaagactaagggatataagcaaaagatgatacatctcagaatactcataaacaaagtgagatgattgaccttaaggatcacaaaagattcaatcctaagtgttatcttatcaagacttttcttagacagaaaatgtaagaaaaatatctcaattagcgtctcgcatatataatacgcctgatcattcccaatattattgaaaaatgtgaggcatatcttgggtatgttatctcgacaaagaaactcctttcaagatataaatacaaaaagcaattgccagcatttaatttatttatctcacatgttgtaaatataaaacgtgaggattgttcacgttttatcaatggttatctagataagataaaaaaggaatgactattattccaacgaattctataaataggagcagaatctgcgatgtaaaagacgagaaatttttgagagaaaaaactttgagaaattaagtgtagaaaaagccagagattattatttggtatcgaatatcttgtaatcgtaaataaatcaaaaactcgaatataatatggacttgtggactatataaaattaactacaaagtcacataaaaattcatgtgtattatttatctctattattaatagttatttttaattttattcaaaatgtctcattattgttaacaaaattatatacattgactatccacatatgcattgactactccaagctcgataaagaaatgaagaaagacccttttctccttctattcattgatcagatgttagacagattagcagatcaggagtattattgcgttttgaatgattattctaggtatcatcaaatagccaatgcaccacaggaccagaagaaaataatatttacatgtccatatggcacatttatttttcgaagaatcttgtttggactatgcaatgcaccaacaatttttaaaaagtgtatgatgggtatcttttcaaacttcgttgaaaagtgcatacatattgttgaaaagtgcatacaatttatttagggttgtcacatattttcatggatgacttctcggtgtttggttcgtcgtttgattattttttgaggaacttgagctagttttgattcgatgtgaagaatccaatttagtgctcaattgggagaagtattatttcatggttagagattgattgttttaggacacaggatttcaaaagaaggaattgaggtgaacaaggtgtactattgagaattctccccctccaattttagtaaaggggatttgtagctttttgggtcatgtcattttctaccgaagttttatcaaggatttttcaaaaaatttcaagtcattgtctaatttgcttcctaatagagtgtcttttgagtttagaaagcaatatatatatatatatatagggatgtgattttgtcccgtgatgtacttttacggaatgtattccgtagtacattagatgggt

SEQ ID NO: 163324 - DNA, 2437 bp, Cannabis sativa
aataattacttatattatcacttaaaaaaataaacaatcatgcacaaagcacaaatatgagaaaaatagtaacataagtttcctctcatataaaaacaaagagaaatcttcattgaggaaaataaaatgaaaaaaaggaaaagtgaaaatgagataaatttatatagagattaattagagagaagagttccttaaaaaaaattagagaggaaggaagagagagaccgagagagtggtgttatgatgcggaccgtggtccgtggtatactggtattgttattaactaaataaataaaaaaaatattttttttttttttggaggaaataaaaaaatatatattgataggtagcagtttaatatttttagtttcccctccactcctaacgtcaaatctctgcaaaaatttccagtaaacaacaaacaaaccctaataaacttgtcacctccaatcgaacccctaacaaaaccctaccctaactcacacgttggggtttctaggttttagctttattcatttcgtttctcgattgaatttctaatttttacttaggaattcagcacgtctctgtaattcattcatttgcatattggacacttttgtttgttttttccccttgggttggatttcaggatagggttgacatttgaattggtgttgtgggtttgttgtttctgacgaacaagagagaaactgtgtagagagagcttgagagagagagatagagagagccatggaaggcataccgcacccaatacctcgaactgtggaggaagtcttcagcgatttcaaaggcagacgctcaggcttgattaaagccctaactaatggtttcttttccatctttctttatatgttttctctctgctctatctatctttccttttctccctttctcttatattgggtatgtatcaattatactgtttcttgttataattttatctttttcaaattttatttttctatgcagatgtcgaaaagttttaccagcagtgcgatcccggtgggttagctcttttccttcaaatgttgtttggagagttgtatttgtttccaatttcgccaaaattttttatattttcctaatttagtttttgtatggtgctactggtgggtatagacaacaatgggtgaattaactttgtcaccctttttactaccgatagtaattgagattttttttttggaagtcattttagtcttcatacatggtggttttccacaaaactatttgcaagttggtttgtttgtagctgtgaaattgatagagtattttggcttagtaatttgttgagttaatagaatgataggagaaatagtttgcttgcttgtttcctgggtcctatactttgtagatgagccacacgaggttgtaggaaacctactctggttattatgtctagttttgctttggctctctctttttttttttttttctctctgtgtaattgacttgtttggtctgtttataatactacttttagtaggaaaattgtcgcttttaattttttatttgaaactaaaaatgaattttgttattcattctattttctaattctaactgcactattgaatgtgaatcacgtaagattgagctactgccatcatctttacaacacttattctatattctaattctaaccgcactcttgaatgttcatctgctttctttagtgttaactttggagtctttcgacacaacacaccatgcagtcttaaattttagaacaagtaacagaataacaatatagattactgaatattcaatatatttttctaacacccattctcagttttggtagctcggtacttcttttacgattttgagataattgtatataaagagaagtgttctgtcttttatttgtatctaaatgtttgatggtttgaactttgaggtctatttgaatgttatggtgaaagcaattaactgagattctgtttccttcaaagatatgttaaataatatttttaagttagattttattggatgttggtacttttacactttcatgttaaaatttatctgttgatgatttagacgggaaaaaattatgtcatcgttacttattacatttgttctcctatgcgtttgagttgaaaagacattcaaagtagcgttaaacttgactttcctagttttgatatttctaatgattgtgctctacagagaaggaaaatttgtgtttgtatggacttccaaatgagacatgggaagtcaacctacctgttgaagaggtgcctcctgagcttcctgaaccggccctaggtataaactttgcgagggatgggatgcaagagaaggactggttgtcattggttgcagttcacagcgactcatggttgcttgctgttgcgttttattttggtgcccgctttggttttgggaagagtgaaaggtatgatccatttttctcagcctatgcacttataga

SEQ ID NO: 163325 - DNA, 1050 bp, Cannabis sativa
gaactcaataaatatctccaattcttatttgaaaatgcattttttcatgttgtaaaatttttattggtatatttgataaaattgacaaataattatagaaatatttttaaaattaattatgtgttttttcaaaatcagattgttgcttttttggtcaaataaatatgtagtttttttacatagaatatttcattttatatttttaaggaaataattgatatttattttatttatcttgatgtgatttttctctcaagaaaacgtgcaatctaagagaacttgactatgagtttaaattacaacaattgcaataaattaaaagggaaagtttttacttgtataaattttataaattttatctcctgatgtgatctcgtagactagtcgcaatctaaaaaaattattgataccacgtataatttcgtgtgtcttttactttacgttcgtttttactatctgttaattatatgtttaaacatatctatgttctgttttaatagtttttgtgtatatttaaatatctcagtaagagtgcagtaattaattatttaatttgaataattaatcagtaatcataaaaatagaatttcaattggtatcatagcaattcactatactcttagtaagattttgtagttatttttcgtttaattaagtttgtgtgaaatatctttctttgcaaaaggtagttcaatatctcgtcctccacttcttaatggctgaaactatccctactggaaagtcaggatgaaagctttcacaaagcacaagatgagaaggcatggagagcaattttgtctggatggtcaccacctacatagaaaaatgatgacggaagtacaaaggtaaaatttcaacttttgtgggataaagaagaagaaaaattatttagttataacaataaagcttttcatgctattttcaatagtgttggaggaagttttattaagcttgtttctattgggttttgtgccttaaataaaactcatttaaatataattagatttactaattaataaaagattagaaatcgttttatgttgcatggtt

SEQ ID NO: 163326 - DNA, 2503 bp, Cannabis sativa
taatgcctccttgctaattaggcctagaggccaaggatctgccaggcctggtagtccactgcctgcctctagagacaaaggtaaggtagccgttagtgatagtagtttagttgattcctcctccaaggatgattatcccttagatggtagttgatagtatcgattgtttactttttcttgcatttaatactgataacttctattctaactttgttactttctattttctagatatggcttctaggatgagggatttagcaggaaggctttttggtagtacttcctcaggtcatcctcaggccaaggtggcccaaactgctagatcatttgatgctaatcaatccacattgcctcctcctcctccagggcctgttttcgttgaccacctagtgattatggaccctcccccgaggagcattccaccccctcgtaggccttcaagtaagggggtctagaggcttagcagggtagctagttcatccacaggtgaaaggatgctgaggttgctctgaatgaccttcgcaaattcattccaagcgttgacggggagctctaggagctggagtccgagtagttggagtgcttgacatccaacaccctgagagatttctcattcttaagttgtttattcgattttacttgaggtgctgatctgacaggggctgggcgacctatagaatcttttagccagccaaagagacaatattaagattctggttggccaggttggttccacttctaactggatttttcttttgattttaggccatgctaaagcttagcctcacccatgcaaggaccaaggaatctgctggtgttcctcaaaagaagttagaggccaaggaggctgagcttaaggtggagaaggatgcacacacccagatacaggctgacttttcgactcgcttgacagagaaccaagatctaaatgatggcctaaactgactgcttggtcttcaaaaccgagaggtgacaaggctcattgctgagacctataggatgcaaaaggagcttgagaaggagcatcgggagaagaaattggcccttgatgggcaacaatccatcaagaacgaatatataggcttatcctctgaggtcctatatgaggtttatctacacaatcccaacgtcaatcttgggtagatagggtgtcccttctacgagagttcacttctaaggggaatgaattctataagagtaggttggtggaagatcaagccagccaggggacagaccaagtggttggccctgctgaggaagcactgtctagccaacttgaagaggttgtggccagcccacctatggaggcagtggtcggctagcctattgaggctatggccagccaaccttttagagagcaggttttagacccttcctcttaggctccactcgtccaggctaatgtgtcatttgtggcccagacaatttgaacccacctatgcctatagatgattagacacttttttttagttgctcatgcttttatttcgcaatttcttattcttgtatggcttgttggccttttacttttgaacaatacttgtatgtggccttaaggccttttattttttatatatgaccgactaggcggtatttaatcctggatttttcttcttttggtatacatgtaagtatctaaatttacttttttatatctaatttgaagtaagccttttgcacttacttagcttttaatttttttgcttataaaaagctttaaattttgcttaaatttagcttgtgcttgttagatgcttgtatggtgtgagtgccccccaagtgatcaagcagacttatggtctcttagtcacttgcaattcaccaagtattataaaccattgcgtatgtgttttcttttggggggacttgttgttagcatatggaactaaaaataaaaaataactttaagaagttctcttgttagcaagttgtttgacctaatattgaagtgaaacactatttttattccttaattggtcttaaatatctattgttgctgcacaatgtacatttattgattctaaattcttgcaaaataaaagtctacttttagaactcatatgaatacccccactcgacatgccagacaggggacatcactgaagagtcttggatacttatctctttctaaactaactcttataaatgagttgacaaaactactactgaagagtagcgttcttacaacttggtcattgatagtaccttcttagatgttccacataccaataccttggtagaagaacaaactccatgttcttattatacctgccaagcttgtaggcaccttttcttgttatctcggtaacttggtagaggccttcctagtttggtctgaaaactcctactgaggaatctctggtatttaggaacactctttggagtactaagtccaatatgaagagtttcatttccttcacttgtttgttgaagtacctagcaaacttctactggtaggcatgaaccttgaggttggcttggtctcttctttcttctattttgt

SEQ ID NO: 163327 - DNA, 1102 bp, Cannabis sativa
agaatgagttgtagaggcccaaagagaaaaggcacgtggggcagttccgaagaccaagatcacttgcgaaaattaaggttaagttgaaatactatactaataatactattagcataaaaaaaggtgcgaagaataatcggaaagcctaaaacttagttagatggagaaaaagaagaaaacaaaatgtatataattaattaccttccctttacttatcacctcttctatcaactttctctgctctttactccacctgtaactttctaattcattaagctttctttttccgctattctctccgcaccaaaatatttcatacaaaaacatcatttttactctttactaattactacttctacagattactaacccaactcaacaaaattactacttctaccactactactactcactcctactttaagagctgatgtattttaaaaaactatataatgtaatagtgcttttttacatataataatatattttattcttagtttgttatgtgtattatatatattaaaaagtattattatttaaataatatagaaaaaaaatagataaaaaaaaaaatcaaattttagtgatatattttaaatgataaagtgaaaaattattgagagtgttcttagacatcaacctctaataggagtgcagctcgattagagatattttagtgggccaattcaataattgcactttagagaagctcaaaaatattaaaaaaaatattgtacaacacaaccctaattggtacaataatataggggtgtacccaacttataactaattaactcataattatatcacttattattttttagtccaaccatttattacctacacctactcttaacataactttttactaaaaaataaattataaccaactcaagtttaaattggatatttacgagcaagttttatgaaaattagtaaattaatttaaaagttgagaatatttaaagtggttaaacatatatatttgaggtgagggatttcaacttgaggtttcttttatgaggtgaagtgtgaaattatttagctatgaccatacaaaatttgaactttcctaacaaatattaaaaaaaaaaaaaaaaaa

SEQ ID NO: 163328 - DNA, 1622 bp, Cannabis sativa
tttataatcgacactggaaaggatccattgggcttttttaacccttaatgagcccattttgtgctactccacgctggaaagggccataggcccatagcaaaatggacttcatttacctattagcccattaaaatttggacaaaaagcccaacccacattatcctgatatttaacattgagaattgttcatccaaagacatctctctcagcccatcgcaaatattaattcatttcaaaaaagaaatattacacaaagggcttaaatgatcttctttttctttttatattttcacggaatatgtttaattttttacgaattttgttagttacatttgtatggagtctcataaaaataacatacaaccaacataatataaatataaagcaacataaaaataatatacaaacgtaattttgtaaggcgtaaaaaatagcaatccatatttttataattgaaaaaactataattcagtatttttgtaatattctttttcttttgggtatttatcatgcaacaaggaaaattttcatttttatagtcatgctacttgacactagaaaaagccacgtatttaacctatatgtaggggtggccatttatgatcgtatcgtgagtcgcgttgagacttagatattacaaacaaatatcaaacctaaacccgacctatttattaatcgagtcaaaaacaaactcaaatccaactcgtttataaacgagttgacctgacttgcttagcttgtttatataaataatccaatttaattttaattaacttatcaattaattaacatgtttacaacatgtcttatttaactaaaaaatataatttacatataataattttaagagtgtatttattaagggtgtcaacctaaaaataattacatgttgaataaataaggtattcataccaacccaaaaataacccaaactcatttaaaataaactcaaactcgtttatttcgtgcgagttttgaatcatgttatcgtatctgacccaaattgccactcctacccatatgagcccattctgtactactcaaagctggaaaaggccataggcccatagtaaagtaaaatgggcttcttttacctataagcccattaaaatttgaacaaaaagtcccgtccaatatcaccctaatatttaacatcgagaagaattgttaatgtatactctttcttacgtaggttattattgtgtcattttaaaattaagtgtattaactcgaaaatgactcatttaatagaagaaattacattgtatatccactttattttacttgttttaatttttacttctattttcatattttttttagatatacccacttttatggatgatgttcccataagaccccttcccttagtttatgtaaattatatgctacacttaagtagagagtgaaggtatattaagcaatctactcaaaaaagtgggtatataataataaaaaaaataatataagaggtatttttcaacttatctccatttaataaacaagttagttgtgccgaccaaaaataattcaaacctatttatttggtgcgaatttcgagccgtcttatcataaagggaaacttacaaaaatactggatttttggttaacttttacaaaaa

SEQ ID NO: 163329 - DNA, 1744 bp, Cannabis sativa
  modified_base (755)..(758): a, c, t, g, unknown or other
cggcttcggcgatgaggggacggctttcggcgtcgtgcttggtgattagacgaagctcgctgagggcatcagcacgtgtttgttcggagactgagctgagtttcccaactaaggttcgaatcgttctgcgcttgacctccatggatgacgatgagttttggttcagagcttttttattctctgaaataaaaaacctttctttcttcatcataccaatatacgaaagaaacacgctaggggtattttaggaattctaggaatgaactttcgtcactttctttgtttttgtttaagttgcaagaatgcgattacgactaaactgagaggaaatgacgtaaatacccttgaggtaggcttgggtggtttggtggggggaaaagcgagaaataaatatagttaggttgtttaggataatgtttgtgcaattgtgctcttcgatgaagataaccaagtggtcatactcattattcattaatggtttgttttttaatgtaagatggaaagtggagaattgagaaatgagaattgtcaagggttaaacaacaatgtggcattgaatattgataattgaaatgaattttttattatcagggaagattggtattggtgtaaagttttgaatttggtatagtggtaggaatttgagttggaagagtagacttaaaacacatacacgctctttaaagcaatgtgaaaggtggtccaatttgggagatgcttgattagaataagtccattattattattattattannnntattattattattactattatttgtgagccatacatgacactaaaaatgataatacattagtttacaatatgtcatgttgtacctcttgggtacgaataatatattatgacattgctaccacataacttgtttaattaggcaaaactacccaaatatatatgctaaacaaaaaggatttggagtattctactaatttgtttgatcaataaaaaatttctattttttgtttttgctacgaaaccaaacattgtattaataatgatttaagatattcgtgagcacatggggcgtcacatcccaccagctaagaaatcctttataattgttaaacaatccccattcagccaaggcatgggtagaagaattcttagtcctagggatccacaagacctcaaccttcatactagaaagcatggtcaaaaccttagagaacaaaaaggaaacattccataagggagtaaccaaagcagagagggcctgaacaataacctgattatcagagagaatatcaacctcctcaatacccaccctccgaagaacctcagcacccttaccaatcgcctccagttccccatcagtgaccgaaaactgaaaaattttagtagcaaaaagagcctttatgccaccgacctcatcccatgtcacaatcccaattgccccaacaccatctttagtagcgaaatcgacattgacccgaattctcccagatctacgctacttccattagactgcacggcgcagagcaccaacattagactcccctctcttgctttccaccatcttccactgaaagagaaagtcatcccagatcttcttcttcgtatcacataatctccatttggcattgttatgataatttgcattcttgaacgaccaaagagagtggtacagtgttgggttttgtgccctaaataaaactcattacaatctgatagttatcaatttaagagttttgaagtgattatgtttacatgtattttacatg

SEQ ID NO: 163330 - DNA, 1856 bp, Cannabis sativa
tggtaaaataaattccaacacgtggtccctcacgaaatgcatccaatagaggtggttctgcatcgtatggccggggtcagaacaacaattggggacaaaaggtacaatgccagctttgtcacaagcttggccacactgtcaaacattgattttatcgctttgacaagtcctttacagggccagaaggcttcgcaaacttcactcccacgaccaatatagctgagatacaagccctctatgctactccaaagtatgttagtgatgagcaatggtatccagatacgagggcaacacatcacctcacactagatctagcaaacttgagcaccagcaacccttactccgaaaatgaacaagtttatgttggtaatggcatggggttaaacatcgaaaatattggtaattcctctatactctccccttttacttctaaacaactgagtattaaaaacctattgcatgttccttttatcaccaaaaatctgttgagtgtttctcagtttcctcaagataatgttgttttctttgagttttactcattttcttgttgtgccaaggacattgcaacccagaagaccttcttggctgggaaccttgaacatggcctctacaaattctaaaccagtcagctcagttcttcatccaactcacaaccagttactgtcttatctctgtcgacttcccctcttatttctcaaggtaataatcatgacacagatgtaaataactctttgttttccttgtggcatagcaggcttggccaccctgctgctggaattgtcacaatggccttatccaaaggtaatatacctgtttcaaataaaaagtcctttgatgtttgcaaagcatgttgtcttggtaaatcacacaaactttcatttccaaactctaccacaacatacaatgcaccattatagaactattacattcagatttgtgtggtcatgcacctacaaactcctcaaatggatataggtactacataagttttgttgatgcctactctagatatacttggctatatctgttaagaaccagagatgaggctctttccactttcaccaaattcaaaactcaagttgaacttcaacttggaaccaaaatcaagactttacagtctgattggggaggggagtttaggtccttcactaacatgttagagacaaatgggattgttcataagcttgcatgtccactcacacatgaacaaaacgggtttgtagaacaaaaacacagacacattgttgaaactgggctcactttacttgttcaagcctcacttcccttgaaatattgggatgaggcctttaggtctgttacatatctcataaataggatgccaacacctattttacaatattccacaccaattgaaactctgtttcatactccacccaactactcaatgctcaaagtgttcgggtgcttgtgttaattaaacctcagaccctacaacagaaacgaactagagtataggtacattccttgtgtcattttgggatatagcctctcccataaaggctacaaatgcatgtccaaggataaaagactatacaattctcgagatgtgatctttgatgaaaagaattttctctatgctcacactgatgcaaataccaaaatatccactcagtttccgcagccacaaacatctggtgcaccaccactgtcatctcttctcacaccccatccaacaccaccaattccaccaccacctcccacacttacaactccaaacacagtgtccacaacacccacccaacattccacttccaactctgaatcctctattcacagtccactgttaccacccaacaactgttgggaatattttacaggatctagatttactaaca

SEQ ID NO: 163331 - DNA, 2036 bp, Cannabis sativa
ctctttgagagttaacttgtctctaaacttggcaaactgaacttgtggaagtggtttagtcaatatatatgctgtttggtgatcaactgaaagatgtcgaatatcgagtgtgtgatcaaggactttgtccctaacaaagtgaaggtccacttctatgtgcttggttctttggtgaaagacacgattggaggcaagagatgtggctcttaagttgtcacaccagagtatgggacaggagtgaagttgaatattgagttcactaaacagtgactgaatccacacaagctcggtggtggcaagagcaatagcacgatactctgattctgtacttgagcgtgccaccactatttgttttcgagagctccacatgatgagatttccaccaaggtagacacaataaccagaagttgagcgtcgatcttctatggaactcgcccagtcagcgtctgtgtaggcagtgagttgaagagtggcagctggtctgaagtgaaggccataatttatggtgcctaccagatatcgaaggagccttttgcaagcaagccagtgttcatgggtggggctcttgagatactgagagagcttattgacagcaaaggagatatctggccgtgtgagggtcagatactgaagtgctccaatgaaacttttgtagagagttgggttgtccattggagtgccttaggtagctgataacttggtgtttggacacatgggagtgggggttgaggctgctgcatccatgttggtgcgagttagtaagtctgaggcatattttgccagtgtaagataaatgccagactggtttcgagtgactttgaaacccagaaaataccttactgggccgagattttttaaagcaaattgttgatgcagttgggagatgagttgatgaataaagggagcatcttcacccgtgagtaagatatgatcaacatagattaagagaagagtaagtttgcctttctttcttagaaaaaatagggaattgtcagcctatgagttgtagaatccccattgcttaagggattgtttgagcttatcaaatcaagctcgaggggcctattttaagccataaatggctttgtgtaggttgcaaacatgagtaggatatttcagatctttaaaacctgctggttgtgccatataaacacactcttgtagattcccatttaagaaagcattattaatatctatgtgttgtattggccaattttgagtagctactagagagaaaattattcgtacggtacatggcttgattacggggctaaaagtctcaaagtaatcaaggccaagagtctgttggaatcctttggcaacaagcctagatttgtatctgttaatggtgttgtccgggttgtatttaatccgatgaactcacttgttatcaagaactgtcatcccatgttgaaatggaacaagactccaagtcttattcttaacaagaccagttatttcagtttgtatagcaccaaaccggagaggatcttgaagggcaactttgagtgtctttggttcaatactgatatttgaggactgtaagggctttgggcttatgtattccagctttgggctttgtaaccatggggtgcttattgacaggttgagaaataatggatggatgagtttgtgtgctgtcaactgagtgaataaatggtttgggttcatgatcatttgatgatggtgagatactgacagagattggtacagtggagttgtttgttgcgggtagtggagatgggggatgattagtagtatgaagtgggggtgaaactgggtttgtggcttgggaagcaatgataggggtggtggtaaaggaatttggaaggcatgtgattggtttggtggtgaggttgtgggaacagtaggttgttttggaaatagtgtgttgtatggaaaatggtgttcattaaacttgatcgttcgtgctatatagactctacccgagggatgcatacacttgtaacaccctaaataattaggcacgctacccaaaatacttatggaatcctaatcccctaattcgggattac

SEQ ID NO: 163332 - DNA, 803 bp, Cannabis sativa
atatatatatatatataccaaattgtgaaaaaatgaactctcacagaagagaggtttgatatatttatcaaatataaggctagcacatgcgtggtttttagtatatatataaagtgtttttatggtaatggtgtattttttactccatttaaaaacaacctatatatatatatatatatatttttttttttatttaagatactgtaaattatttgtaaattatttaaaattactcttattaccttgttcatcgtcatgttaaaaaaattaaggtttatatcaatgcatttgccaaaatccataaataggttgttttgaagttttgtttaatactcatgtaaagctagtaattttaaaatttatttttggcacaaaattatttaaaatttcacaaaaaacttattagatagacttgaaaaaataaatatatgattaaacacgacatgacatgatggcacgacatgacactacaccaaaaaaaaatgagcttaagcacgatcagacgtgacaagtccgaaagcacgacacgtaagtacgaataaaatagtctaaaaagttaaaaacacgacgtctttaaaattcatataattttataataataatacatatatatttattattaaatatttaaattctaattttttaattaatttcttatatgattatgtgtaaaatattattgaaaaattataaaaaaatacatataatttagagagaattgcaccaaaacacgttaattgtattttatttatagatatatgactacttatttaatttaggtatatacccaatattatttctct

SEQ ID NO: 163333 - DNA, 3125 bp, Cannabis sativa
taacacaaaccacaaatatgtacataagatatttatttataaattgtattaaaagtacctttttctattattattatttaaatttagtttttaattttttttaacattgttagagcattctcaatagtttctttactctatcttttaaaatatatcttaaaaactctattttatctattttaactatacattagctattctattttctctttttttttgttgataaatgaagtagaaattttattgctcaaatactatttgttatagggcaccagatacaagataacaatcaattacaagacatcaaagcttcaaaccaatttcaatccaccaaactagcttttttttttcttttaaaatgagaaaacttgaaacaaatttctctctttatcttttgaactatagtatatgcagtaaaaaaattttactcccaaagataagtatttctagtgtctcaaatggcatagaccatagcattcaaggcagccacaagaaaattcatcttgaatttagagatcttcctcctttttatgctcttcaagcaagtctccaaagtccttttacttattgccattccaatccatttgagaattttctcaataatcttctgactatatgtgcattgaaagaaaaggtattgatgagttcagccccctcttcacataaaagataattaatgttatctgtaatgactctaatttgaagcctattcaaataaactaaccatgcaataaattggtatttcagatagcaaaacctgttccaaatgattgtatttgctataggccaaagcttttcacatagagaagagatattcagtttcatacatgtgaaaacagcccaatgcatcttctctctaataaagtttttaacttccataattttcttccagtaccaactattattttgtggcgcatcatagctccaccaatcctgccctttaaggtacactgaatgaatccattttatccaaagacaatctttatcccaagaaatatcccacatatatttttccaaggcatcaaagttctattgatcattaatgtcatgactgcctttccataaaaagtctctacaaattttattaattttctcaaggatatatttcagtaaaatcattaaatgagcccaataaaagtggataacaatcaaaactgagttaataagaacacacgtaccggcataggatacattctgagagctccaaattaaaatctgagagaccattaatttgttccaaaatgttatcacactccactttggaaatcttttttagagaataggaatgccaagatatctaaaaggcagcaaactcttagaaaaaccaaagctattcagaactaactcttcatactatcttgacattccatagcaaaaaattgtagtcttgcttctatttactttcaaatcgacattttcagaaaaggtttgaaaagttctcgagagaagcatgattgattaaacatcaccactagaaaagagcagaagatcacctgcaaaatagatatgattaagctttaaatttgagcatctaggatgatgtttaaactctttcctcttagaaattttggccaacaaccaaaagaggtactccatttccaaaacaaacagcaatggagacatttgatttttctgtctaatgcctctttggagggaaaataaccatgcaatgaaccatttactatcaaagagaatttcagtgttgtaacacaagacatcaccaagttgataaaagtcataggaaacttaagagccatccacatttctctaataaaatctcaatccatagtgtcataagctttctgcaagtccattttattcatacaagaggggctattgcttcttctcccataacgcctaaccaaatcttgacaaataaggatgttatgaccaatgtatctcccatggacaaaattaaccgttttaagttaggtaggacttgtctcatcctattacaaagaactctagtataattttgtagaccacattgcaatacacaattggcctgaaattactaacactatttggacatttaatcttaggaatgagagttaaagtagtagcatttacctccttaagaagctttcttgaattcaaaactgcaaggacagctctagtgaagtcttctccgattaaatcctaattttctttaaaaaaaaaaaagccattgctaaagccatccaaagagctttattattcagtatggagaaaagagaattttcaacctcctccttcatataaggagtcaacaaaatttgagtatgagcttcggttatcaaaggcccttcctacacaatactagtaatcacatattttctttgctctaacttgcttcccaaaagattattataatacccaagaaatgcatcactcaccaactcagaatcattttgccaaataccctgatcatcatgaataacatccgttgtattttgaagccatctttttttttttttcatagatgaaatatatttgagtttgtatctccatttaagtactagacaactttggctttctgatggagaaaagaagtatagctttcagagactttaatatgctctaatttagccattttctcagcagtaatcaatagggcattcatagggtctttgtgcaagtctaccttacaatcttccaatttagttttggcagccttctcctgaccctccagatcactataacctagcttgttgaggtcttttaaaactaatttgattctcctaagcttttgacagaaaacaaacataggagtacccgaaatgttctctttccacatcttttggacacttttatgaaaatcttgatgcttgctccacatatcaaagtaacgaaacaattttcttgctcagtttctagaaggatacatcgcaagcaaagctgggctatgatcaaaatcaatcttatgaaaaaaggtgacttcagcactttcaaaagtgtcaatctaactattgttagaagcattctatctaatttagcatatattctagaattagggtcttgattattagtccaagtatataagcaaccagaattaaggggagttatatttgcaccccacaaaattataaatacaccccattattaaaaaaaatataaacttgaataatttttaaaaattactctta

SEQ ID NO: 163334 - DNA, 2327 bp, Cannabis sativa
tgccaagtttcttgttgtagcatcaacagctgcctatagaaaccgaaaattagaaacaaattcaacattgtaaacagaattttacccgaaattcctaaacatattgatgttgaactaaccttggctgctgcaacatggatttgataccaagctgctgtatagtgtaaagtagcactgatgttcaatatcaatccaccgctcgatgagctccttcccggtccatctttctttagatacttaagtgcctcatggcacattgtgaatgtaccaactgaatcaatgtcaagaactgcaaaggaaagacaatgcaatgtaagttacaattttattcctttaaggccttttttgattgtttaatgaccgtttagtgaagagttacgaaaatggttttctcagctctaaggtggattaagtttttcaaccaagaacaattgagtttcctagctatctttgggttgcatctcaaaactaattttacacaagttctaatacattctcctcatgtttgggcttggaaagtatgggtataatgaacgaattttaagaaactacgaggccgaacgtgatatttgaaagaatcccacaaggccaaatcaaaaaatttgttgatttttcaaaacaggtcaaagaccccaacactagaagctagcatacattggccgaaaggttccatacgaaagttaaaggcagagacagcagaagttttttatcgctctggtctgataccatgttagctcatagagcataaaaatagagaatgagaagctaagctaactaaccgactttaataggtactaacttggtctgaaactttttattgctcaatccttaagaaacagctgaagaaattaataatgagaactacaaacaaacatagaaatcagacagtgttgaacaacaaagcaacactcaacctgttcgaaatccattaggggacaaatcttctggtgaaacaaggaaatttcctgctgcagagttgacaagaatgtcaagtctcccaaaatgctcaaaagttgattcaacaactctttttgcatcttcttgcttacgaacatccccttgaaaaccaacagcctaagacaaaaataagaaaaaaatttgaaaaagaaaacaatgaaatttttatttttgttgtcgaaacaaaatctacacaattctatcaattaaaagctcgtttggtataccatattagatcatatattatattgtaaagtattaactaaattgtgttttacattatatttttatatacaaatcaatatcaaatactaatatagtatagtatagtataaaaatatgacataaatagaattttatataattaagtcaacaattagaccctttaaagttcacttgaaaattcatgcatatgctaaccaaaaaagcaaactaaactaatttacaacccaaatcagaaccaaagcacaagatcatgtttttttgagatgggcagatataaaatcaatcaaagtaaacaaatttaatatctttctcatcaaccaaacatgattattacaaaacaaacaaaaaccaaaaaaaaaaaagtattttcgataaaataagaagaataacagaaaaagggtatataccaaaatcccaagtgatttgagatttgagacagcagagtcaatgacttgttttcttcgtcccatgatggcaatggaagctccatgtttaccaaattgagttgatatctcaaacccaattccagatgctccacctgtaatcaaagccaccttacctttcattatatcatctctgaatggtgactccattgtagctttctccttcttctgattcgaaaatggattctctctctctctctctctctctgttgcttgtgttgttgtagttgtgtcattgtccgatctcccatgtcttctagctaagtggtttcgtcacagccactgaaaagaaatgggcttactttttcaaacgtaccatttcttattttgtttatacaaatataccatcttatgttcatagttacatctttaacaaattaacaaacataactgaactcttaggaaccttttaattagatttagagtagagtaggactatagtatagtggccaatttataccttaatttatgatgaacatgtagataaatactatcatataaattataaaatcataacttatttaggtacacaaaattataataatttagagaaaattacatatgaaattttaaaagatttttacttaaatatagtagatttaatttgtgaaaattacaccatatatgggattctatacaaaagtttcataaatatggcttttttaactttaccactcttatatggcatttgtccaaatttaa

SEQ ID NO: 163335 - DNA, 1182 bp, Cannabis sativa
atatctgaatattatattgttgattggacaaaagtgtagataaacctagaacaatccaagcttgtttagaaaattcttatgatcaagtagctagtgccactttaccaccctatatatattaaaaacaaagaaaaatattccacacagaaaccttacaacaccactgctgacgtgtagcttctacacccctccacgtcatcacaatctcacacgtggcaccaccaagccacccccacaaaactaaaatacaccacactcttccagctcttcagtcttcacctatatcttactcagaattttcattatacttgttgtttttgaagatgggatttcttgattatgtatcagatttctatgactggtgttgtggtagttattataatcacaggaaaaagctcaaaaaacgcaaagaactacaggtacgtacgtacgtagtaataatatatatcgtaatttttagtttattatgtactgccgttttttgtgtttttaaaaacggtgtttttgaattcttattagaaagttgagataaaagtgaaaatggattgcgaagggtgcgagagaagagtgaagaaatcggttcaaggcatgaaaggagtgacggaagttgaggtggaccccaaacagagcaagctgacagtgattggttacgtggaccctgataaagtgttgacacgtgtcagacatcgaacgggtaagaaggctgagttatggccgtacgttccttacgacgtcgttccgcatccgtacgcaccgggtgcttacgataagaaagctccgcctggttatgtacggaacgtgttggttgaaccggaaatggctcctctcgcacgtgccaactcttttgaggttaaatatacaactgcctttagcgatgaaaatcccaatgcttgtgttgtaatgtgaaaagaataatttgtaatataaatatttaagtttttagtattataaatatttgtaataattttaattttttaactatctagctaaagtggaaaatagaatgttcttactagagatggaaattggtcggttaatgtacggggaatgcaatccccgccctcatccccgttatctatttatactccattcccgccccatccccgtctaataaccaacggattcggggtaggggaatacccatcggttatggggaactcatcgggtatccattaaggtaaa

SEQ ID NO: 163336 - DNA, 1489 bp, Cannabis sativa
ccactgtaacttactttcatacatggacccaccacatcatgccacgttgctttccaaacactactcgctatcaaggaatgtgcaccacacgcacttaaaataattgactcttttgatatttgattgagtcacgcacgacgactctctgcgaagggagagtatgactaagaaaaaggtcaggtaagacgcacacgcacacgcgcaacaacttggcggcggtgtcgcagtctgcttcagataattcttcatctgaggcgttgggtttgagcgattgggcttggagtgaccgttggatttggaacattaattacgtactgtaatgtatggggactatgggcccacctaaaagaccacttgggagattgtagggtatgaaataatgagtgaggagtgtgatcagatccaagggctaagaatggatgtaagagtagagccctagtgaaatgtgagagtgagaaagatagtcatgtcgcagactcgcagcctcttcttccgaaaacaatgattaccacttactactacacgtgatttttttaaattagactaaattgtcctaaaatttctaaaaaaaaaataaataaataacggcaaaatccttagtacttccacttttattgtacttaacttttaaaatttaaattttagcactaaaaatcttaaattaggatttcgttgccaatttacaatttccatccgtttcaagtgttaagtgtcatgttggactgtccatgtttacatctacgtggacaagatgtacacatgcttttattggtccacgaaaaaaaaaataattataaattaaaaaatatatatttttcaaaaaaaaaatatttaaaacaaaataaataaataaaataaaataaattatttaaaatcgttgtaaattgtaaataaaaaaacaatcatttcaatttaaaaaaaattgtaaataaaatatatttttctctttcttttcgtcaaccttcttcttcatcttaaaggctccagcttgaatgctcccaatagtagctaggccaataacaacctgcaaatccagagcaaacctcttctcactatctctctctctcgatgggatatgcccagagcaaaccccaaactccggcgaccgattgttgaagcgaaccacaaaatcaaaatcttcgtcccccaaaatctctatattcgcccctctctctcgtttattggtggagatgcactcacggagaagtcgtcggtaatggtggagatgcactccagcatgcgtttagaccacgaaatcgagatctacgaccccaaaactcaaatctacgcccctctcccgtctcttttgttttccctctctctctctctattttttttgtgcgggttggacgtagacgaggacgacgatggggttcgtcgctcgaaggaaatagggacatatttgtgggtttgcggttcgacggggatggtctgggttcgtgggtttgttgtttgatgatggggacaatattcttggttcgacggggat

SEQ ID NO: 163337 - DNA, 1975 bp, Cannabis sativa
gagcttgagagatccttagaacccttggtcctttttccttctcttgcgcgtcttcctctgctaatctcccttctctttgtcgacgtcaatggtggatggaaactagcaccagcctgacccctctgccaccgtaagcacagttggacgtctctctttatctacgcgtagccttcattatctttcggtattcatcttctccttttcttaggtacaaatctataaatgatggggttatgaaaccataacccttttgatcggatggtaactctttctctctctaaattaccttttctcactgcagatctgaatgctattttgaacccaaaaaatttctctaggtgtttgttcttaggtttctgtgttggagtttgataaaggaggaagagatgggtttgtgttcttcattttttattttttttttcttactttcatattggaaagagttagggaagaggattgaagatggatttcatagagttttgcttagaaattttctaggttcaaaaaagaattcaaattgccgatgattttttattttgttttattgagataatggatgaagttaaatgaatattaaagtatgtttgataagtcatgtttaactttattgtaattatgctcttttttaataaattatgttgaattttttataaatttaaaagattttttaaataacttttttaattttaaaataattttaaaatatttaaattaatttttaaaaacaaaatataaattaaatgatgttgaccaatcaaagaatgacatgtggatggtgacatggcacttaacaatcaagtacctatagacgcaacaaaagtttaatagaaggtatttttaccgctaaaaaaattacttaggtattaatctgcaactagaagataaacataagtattattgcctcaaattactctttattaaaatacacacttagtaccctctgttttagataatgatcaattcgtagcttttatttacaaaagctaccactttaatactctcaatacatgtaaaatgttaatatttccaaattccaaagtacccaatttcaataattaatcttattactattatttaataatagaaaacaatagttacaaaaataattcatgtttatcatttcaagagatcggcaccgccctgaaacccaattctttatttgggatcaataaaataagaagaaaattttagaaaaagaccaatggatcataaatgatgttcttctattatcatcgctgtttgcaaatataaaaagaggttcttagatgattgatggcagacacatcgtactctatttggactactactagcaaaattaaaagaggaatgatattaccgaataaaaattttgggttgagttgtggactaggtcgttctctttaagacgttcgcactactgcccatgaatgtgcaagcagtcggaatttgccagtcgtccctagaataaaacagtccagtcgtattgtatcggaaccccactacactgtagagcaccgtcgaatacacaaaaaaatatttcatatcgcagataattttttttgtgaaaactgtattttttttatatgaaaaaaatgtatttcccatcagttcaatcgcattatataaatgaatggattgaaataacataacgggaagaagaatattttctgaatcgcattatatagatgaatggattgaaataacataacgagaagaagaacattttttgaatcgtgggatgtagttggttgaacgtatcccattaactcatacgactaagtaatcaatttcaattaaacacgtttcttaattaaactaaaaaattaaaaaaaaaaagactattaaataatttttctacaaaaaataataaagtttcacacctcaccaaccagctcggctcagatcagatggacggacggcgtaagtgtgtgagtcatcaccaattcgcacaaaacttggtaccccttggggcccaaacccaaatgccaaagttgca

SEQ ID NO: 163338 - DNA, 1545 bp, Cannabis sativa
gaactcggtcatcctagagggttgcttaacctttgggataaggcatataagagtctcatgaatggagctgcaatccgaattgttgttgaggatgacaaggcaggcagcagttaaatctgggcctatcaagtcccatttttttttggaaaaaaagacccaggagcccgtccttccgcggggcatttaaaggatgaatttggaataaggtagactttatttcttcacttgaaaaaggttctagtaatgcaaggttctctgctgtactgattcggcaaggaacacatcctctaagttcttcttttatctcggttcccccattggattgcgagaataggtgttgaaaatagctgatggcaatatcagccaagtctttttcagaggtgcgccatcgtccttggctgtcatacaatcccaaaatggtgttctttttcctcctagctaacgctttaaagtggaaaaattttgtgtttcgatctccatgtctcaaccaaagtgcacggcttctttatttccaatacatctcccttttttcttccaccaattgaggtccttttccaatttttgacgagctaaccaatctgttaaattaggcgaattggatagccaatcaatcttttcttttaattccttggatctagcaaagttaacttttttttgtgtcaagttccacttaaagagtctcctgtcacacttattgatgagatggttcagattttcaagaagccttccctgtactttaaccccccaagcttcttttataatcttagtacaatcatcattatccgcccacgcctgctcgaagtggaatctcgacccccaagttctttgaaactgacccctcctattgttgtaatgagcttccaacagtaacggtctatggtcagaattccaccactttagaagagtaactttgttagattgaaacatatccaaccatgccgaattgcataacaccctgtccagcttttcaaagattagattagaagcacgaccattgcaccaagtaaaagagtttccacccgaagaaatttccttaagtttgcaatccgaaatggcagatcgaaagtttttcataagataatccggctttggacctccaccctttttttctttctggctaatgacttcgttaaaatcgccgccacaaatccaagcattggtgaacatattttttagtctactcagtaacttccaagattccatccttcctctgggatccgggcttccatagaaacccgtgaatcgccacacgaaccccaagtcattttccaccaatgcatcaatgtgagagatcgtataaacttgatctcaactttgaaatcttccgaccaaagaagcgctaaacctccacttaccccttgcatccaccgtaaaacatccagcaaagcctaattgcacccgaaccaactccataccgcaactattcaaacgagtttccgacagaaaaatcatcccgggatgataatctttgacgtgggacttcagggaattcaatgtccaaggattcccaaggccttggacattccaaaacatggcaatcatggc

SEQ ID NO: 163339 - DNA, 1254 bp, Cannabis sativa
  modified_base (1193)..(1215): a, c, t, g, unknown or other
aaaataaaaatgatatagtgacacgttttgtgtgattctaaaatgtacttttcttgacactgcattagtgacacgcatcgaagtgtcaccaaaagtctttagagttacttagagcacgtcactaaaaggagtttttgtagtagtgatcaagcacaataatgacccagcaaattcactctaattcaagccttaatttcaaaattgattaaagttcaagaaagatgagaaagagagagagggtcggctaggggtatcaaaaccagaaaaattggtttttcttaattttccaaaaatgatttttgttgaataatagaataattggcaaaatggccaaaatatccctatatatttacaagggaaaaattgtcaatcaacacacacacatatatacatatatatacaataatacaaattttcttatcatcaaattaatgccataaacaaatctcaaaaatatattttgggccccaaactcggttcggcctaaaatacccggttgtgactatacctcgctgacttgttagaaaacacctacaaatagataaatgtactatataataatatagtccacaagcacaatatatcacaaaattacaatttcacccttctctggtttaaattacgaaaatgcccccgacacaccaacggggtcttaaaatgtaatttatctatatagtttcacatattaaattataaaataatataatttctcatcaataaataattaatctagttaggattgctaatccggttattaaaccttagggtattacaattaaacacaacatgaggaacaaaagagagatgttccaggggtagcacccccgattgaagtaccatcactgtaacaaatatatccaacactctctcgaaggttttcaaatctcacataaaactcaaagatggttacaaactcacgaaaatagctagatatttccattattgttggaatttaacctcctccaaaaaccaaagaggcagttgagatattttcgcaacaaggacgtgtctcctgaagagagacataccatccattctcctatataaggggtcatacatgacttgggaaggagattcaaaaattatcactcaaagaacagaaactctgtcatttttacttctttcattcaagagcttgttcttgatgttcaactaagaacaataatacatgggcttgtttggaacgccgtatnnnnnnnnnnnnnnnnnnnnnnnattatattgaattgtattttatgcaatatttttatgtaa

SEQ ID NO: 163340 - DNA, 1415 bp, Cannabis sativa
actaaccaagaacccattcctcactacatctctcatccttactactcttcccaattcattatttttcactaccaaacccgccaccgtcttaaccgccaccacatctcccgtcggaccggctacacacattctcaacgccttagccaactcatcttcttcgctctcataaaaagccaataccgaattcgttcgattctcctcataataaccaatcctgttcttcatagtagtcgaagaagattgacaattatacagcaaaaccacactgttctgatcaccattcgcatcggcgatcttgaaaccatgagagaaatcagttaagcttcttagagaaggtaagcatgagttttggtctttatcaagatctcaaaacgcagcgtttgatacgataatggagtggttttggtagaagatttgtaaaacgacgtagttttgggaggagagattgatgatggagcgaccacgtgagtcgcacgtgagattaaagccagggtaaccgcagtaaggttgttgttggttttgaatgaagaaagggaaggttattgtttggtttccacaagttttggggactatgcaagattcgtagtaagggtctgatgatgcagcttcaactactgagtaatatgaagaaatgaagaggttaaagaatattagaagaagtgataggaaatgtaaaatgatgatgatgattttcatattgaagttgaacatggtgaaagttgttgagagggtacatttattttggttttggctcaacttgtttgaaatttagtgggtgataaaaaaaaattatttttagaaccttatttaggaaaaaaaatatcttattttttcaaatcaataaaaaaatttgtattttgaaaagaaatttttttttgggtcctgagataggtgaaccttaatcacaagcttagcccgcctatatgctcagggttggacctgaacagagtacatgattggtgtgtatcacgaactatactgttctcaacatcataccaatttagcgagttgtgattggttaacaatttcttatattatttattaaataaaattgtagagatctaatattaatttgtatcaataatgatatgtatattttgtggtgtttgatatcttatggtactccttaacatttctctttatgttgtatttgttattttttgaaattatttgtgaagttaagtcaattttgttagagcaattgttgggtagaggttgtaagaacatctttaagggggcaccattctattattagttacatttatttttgctaactaaaaagttagaatagagagctatttttattgttgttgctccaattatatttttttactatagttaatatttaactattttaataatattttataattcaaaattgtcaaatataaattaattttatagaataataaaaa

SEQ ID NO: 163341 - DNA, 2170 bp, Cannabis sativa
tttttcaaaactaagcctttacattttcacaatgaactcaagccattttgatcattatactatgataactataatagcacccctttaatatcatagaacacagagtcccaatttattatctgattaaaagatatacacaaccaaggacaatggtacaaacatatgatcatgtactaaaaccgggaaaaaaaaaaaagaagaatgaaaaaagcttcagttgagcatgattctatgaatattctcctaaaacatctttattatatatacatatatatatatatatgtattttggttcttgaaattccttttatatgaggggaaaacttagttacctgttgagaattgcagcagatttggcccagatgaagagaattacaatgaggaggaggaaaacactagagagtagagataacaaagtatagccagatttctcaaaaaccacccaagcagctaatgttactaatagtatccccacagtcacattcttttgtctccataaaatcacatcagcaactgattcaaacaaaaataaaaaaaaaattaaaagtcatttgatcaaatctagagttcattcaatgatacaaggaatcattataaactaacatatgttaggacttattaagtacattaaatgctgaacaagtataaattttagtgtatgataatgatgaactacattcaattcaaataaaaataaaatgaatgaaaagggctccaattgaaagactaacaaatacccattaatgaaaaaagcaagaaaaaagtcatacaatatgatcagataagactcaccaagaccacctccaaggatctcatgaacacttctttgcctgttaaacaaccgatccaatgagcccatgtaggaaaaaacttgtttttagttttcttaaaacagaactttgaatctgattcagatctttaagacccagaaaaaaaaaaaactgtttacagtttagagattgaaatgatcttcaaaccaagaaaaaagcagtggctcttgccctttttatccaactcttattctattctgaatcttaataactagaatataataatatacaggaaatgaaattttgaaaggtatgtttggtggtcacattttccagcctaaaagcagtaagccactcatagtttttcttgctttttatattcattttttttattctcccaaataatactaaattcttatattatatattaatatgattacacagtagatatctatacatagatcacatacatcatcttaatatatatatataagatacaagagttttgaacaagaaagattgacattttttctccattagtaaccgactttgttataattgagctggttgagaagaagttgggctgcttttttgttaccatcttttcaaactatggagggtaatatggtcagtaagcaattgaaatgatagtgtaagaacaagatgtttcaccatcgtatgagggtattttcgtcttttgagtacgtgagtgtggggttggctgctcggacaaaagcatcatgtggggctgtgtgtgtgtgtgtccaaggctaaggaaacgatattctgctgtaaaaaactgactcatatgacatgaaatggtaactaataaagtcataacaaataatatgaaaaaaaagccttcagcaaacaaaaaacaaataaaagagaaacaatataaatgcgccacttgtttttattttggttggaaaacagtctttgaaactctactatgactctatctatgagttgtggtatattatttgtcactaattcattcaaatgtttggaataattttaagtgagggtgccaaaaaatttataaagtcgggtcgttttttatttatagtacttaaaaaaattattagttaatcttttcttatattagggtgaatatggtacttataggtgctctagacctcagaaaattttcaaaaagcactcaggtattgttcgtgacttcccgtgggatactaaggagcgagacctcgaatctaaggtggcttatgaagaactctctgatgatatctccaatttcccgagccgcactgatggaatcatgaaaaaccctctggttgattcttttttaattgaagactctggctctagcttgtctgttcactctcaaaatcctgtggaggagaatgtcaaatctcctccacaggagccatgagaggcgt

SEQ ID NO: 163342 - DNA, 1653 bp, Cannabis sativa
tttttttttttttttctgaataaaacagatatattccatcaaaaaggacttgtttcatataattaatggaccagtggtgtgcatttatttttatattttttttggaagtaaaataaaatatggggtaattttttcttttttattgggtaactgctgagtacgagcattattatttaatataaaattatataagtttggacacgacatgatacaaaaaaataagtttaagggtaacacaatacgacaagtctgaatacacaatacgtaaacatataaatatactaaattaaaaactcgatacattaaaaattattacaatattaataacacatgtatttattaataaatatttaaattctagttaatttttatataattatgtgtaaagtattgttaaaaatttatattaaaacaattgaaattatagaaaacatatataatttagtgattaatatattaattgtaaagaaaaatagtagaaaagtggagcataaattaaagtttgtataaaaaaatggattgatctatttatgaaaaataggccgattcgataaaggccgtgccaaatttactttttaaataattaacacgacacaatataatccataaatttatggggtgacacgatgcatctcatattataggcttttgaaattatagtatgttagagcatttccaaatacagtattttttaagagtgtcaaaaacttgcacattatttaaaaatatattattttattttatctctttttcatatcatttttgatgcattttgtttaaaaataatctaatagtaagtatctctaaaaattattaaaataaaattatattattatttaacatatattacataaattaattttcttactttatgataaaataataataaaaaaaaataaggaagataatatataaaagatgttatggtatgatattttttttgtagtattcttttttacttcaataataaatattaactaaaaaaaaactaaaaatatatctatatcatcaaagtcgagatgctgttaggaactcttcagtataagtaattataagagaatgacaagtactatcaaatgttaaaaagaataatggtgttcaatatcactgctaggtgtatcaaaccacacaaattaaaataattgggtcccactcaaaagtactatatgaacaataatgtgtgtaataaaatttgttagtaattagaatgtaaaattaagattaaaaatattgaggcatataaaaaaaaacattgctataagttattatgtgcttaataccatgataagataaggtgttcctttataattggttagaaattttttaaaatatttattaaagtgaaataactgaaatccgatattaaattacaccaataataatattacactttacaaaaataatagacaccataaatattttaacatttctcataaaaatagtatacatatgtatttttttttttttgagaaagaatgcaacttccaataataggatatgaagattaaggatgagagattattttctcaacccgctccttatttaagcctaaagaatctgttgctaagttatgagctaaagtatttcctgttagacttttatttgggcttacattaaattttattggttttattaaaacttgggttgattgga

SEQ ID NO: 163343 - DNA, 2107 bp, Cannabis sativa
atgagaagtaatggttgatgcaaaggcaagacagccaaaacacctcaagtcatcataaaccggctgtttaccaaagaaaatttcataaggcattttgttttgaaggttcggtgtaggagttcgattgatcaaaaacacagcagtaagaatacattctgtctagtattgtatgggcactttagactgaaaaaataatgctctagcaacgtttagaaggtgttggtgttttctttcagcgactgcgttttgttcgggggtttcaatgcatgaaaaatcatgtaggataccatgtttagagaacaattctttgaaagaaagttcaggtgcgttgtcagatctgaaacgtttaaaaacacaattatattgggtttgtacataagaaataaattcaggtataataaagaggacatccgatttttgtttaagaaggtaaatccaagtaaaccttgaatggtcatcaaccaaagtaagaaaaaatttatggttggagtgggaagtaacatgatgagttccccatatatcacaatgtataagatcaaaacattgagtagcaaaacttttattattaggaaaatgtaactttctttgcttagcaagaggacaaatatagcaaggttcaatattatgtaaattctttgttttacaatgcaaagaatcactaagtaaatcaagacatttatttgataaatggcctaatcttttatgccaaatagcagcagaagtgaaggcattgataggcacggtagtggtgtccaaaaagtagagaccattagccgattcacctttgccaatcgtcttcttggtgtgtatttcctgtatagaaaattcatcagcaagaaatcttaaatcacagtcattgtcatgtgtcaaacaactaaccgaaatgatgttatattgaaaagaagggacataaagtacatcctgcaaaaccagatttttgcttagccgaacattgccacttttatgaaccattacatgattattgttagggagaatcaatctagtagcattgacagaatgaacactttgaaaaaatttcaaatcagaacaaaggtgtctagtggcacctgaatccactatccaagatttttctttaggcaagaaatcataattggttaacacgatacctgaactacctgttgagggattagaatcggcagcaggcagagatgtgttttgagatgctaggagattgagaagttgttgatattggtttggtgtcaattggggcaacaaagtattactgtcgttagcatccgaaccagtttctttagaagcttgaaattgatttgctgctgcgttttttgacttttctggtttgttgtacccaggcgggtaaccgtgtatcttgtagcacttctcaatggtgtgtccgtgcatgttgcaatgtgtgcaaaagggcctgccacgtttttgagattgattcttggaaggttcggatttcccaggatttctttccccttgaaaggcaaatgccatggaggagttgggatcggcagggacattttgtccccctctttgattctcatcctgtgaaactaaatggaaaactctattaatttcgggtaaaggatccatgacaagaatattacctctcacttgtgaatagaaatctgataatcccatgagaaaagacatgatgtattccatgttgtgatgttcttgcaacttcttgactcctccacatgtacagccattacatgtacaattaggtctgaagttagacaattgttcccacactgttttgagcttagtgaaatacatactcacagattgagtttcttgtttgaggttcatcaatatctttctaagattgtagatatgagccccattcctttgctgaaacctaaccttgagatcattccatattgcagctgcagactcatcatagagtatgctggaagagatctctttagaaaccgaattgatgatccaagaaatcacaatattgttgttgcgaatccaagcattgtagagggtctgatcagacattggaggtttgggtatggaaccattcaagaaccccaatttgttcttgactgaaatggccaattccattgctcgacaccaagcaatgtaattgtcctgtccagtgagcaattgggat

SEQ ID NO: 163344 - DNA, 1547 bp, Cannabis sativa
atttgcaccccatagggatcggttgcagagatggggagtccgaactttgtcaccaacgaagaggcaatgaaattatgggtagctccactatcaataagcactgtcacttcctgcccaaacacttggccatttaacttcatggttttaggagaagttaaccccactaccgagttcaatgatacttccaccatctgtgcttcagttagttcctccaactctgtttccatgcactcatcagaagcagtattcgcatcctcttcccccactccatcttgaactaagatgatttgcaactccggggacttacatcgatgacctcgagaccaaggaccatcacatctatagcacacccctctcgatttcttttcctgaatttctgtttctgtcaaacgtcggtacgccgtaggaggctccctggccgtggtagtagaagaaggccgattataatggccaaaattctgtgggttgcgattcccacttgctgccccagttaatgagttcggccctttggaagtaggcccaggtgtgaaattaccaccgaacccggtggacccaatagtgccccctcctctcattgggcctccaccaactttcggcccagcacaaaaggcccgtgccaacttcggattggcttccaccacttcggccatctccattgtcttctccagaccaatgggttcaaggagacgtaaagtaccctgaatttcctccttcaatcccttcatgaacgctgattcaagcagcggctccgccacggtcccgagcgacgttgccaatgcttcaaactgctgtcgatagtcttgcacggaggacgtttgctgcagcgccaagaaccgatcatacacactaccttcgtgagctgggaggaatcgccggagaagaagatccctcaatttgccccaactccgaatttctcggcgtcgattctcccatctgaaccatcgcagcgccggcccctccaagcataaaaccgctgcctccaattgctcctccgccgtgagtcgttgaagagcaaaatacctctctgcccgaaaagtccaatcatccggatccgatcccgtgaaaatgggcaattctatattccgaggtcggaattccgatcgccttcccccatggctgttgacatcctcccgattctgagaacccgttccgcttgacccgatcggagcatgggcagatcttccaatcgggcttcgtgggccatcggtgagctccgttgccatcctcgcctgaccacggaggagcaaatccaacttctcactaatgacagcaattccccgttcgtgggagtcaatcttctccttcatcgaatcccattcccctgaaaccggagtttgtgattcctcctcccccgattgcactgtttccacaattttcttggagctccgagtagtcgccattcacggagacaaccagctctgataccagatgatatgccctgttatacagttgaatcaatgttgcaaataaaccagaaataatcacagaagaaaatggccggttgagtgttatttaattcaaagtagttacaagttagagcccaatag

SEQ ID NO: 163345 - DNA, 2289 bp, Cannabis sativa
gcttcggcaacagctggatcaggtttccccggccgattcaaccctacagccaccaaaagctctgccttgcagtccctcaccacgaaaccgatcccaaactggctattgctgtcaaatattgcagcgtccacattaagcttgatcccattagcaacgggtttagtccaaagctcatcccctttattgaaaaatgacggattcaacgaagggtagttcttgcccaattgagcttttctccattgatcaagtgatctcaatgcaaattgaacaacatcatccacattccgatttttctgatcccataccaatccattcctagccttccaaatttcccaacacaaggtaccagcttgagcaactttatcctcattagctctatccattaagtcttgcaaccagtccctaaaggaatcccacacccgaccccctccattcacatctagcttcgcccaacacgcaacaacaaagtcacaattaattaagcaatgcgagatggtttcactggagactaaacaaaatggacagctataatccaaaggcacatttgtatcaaaaagtctcttccttgtagggagacaattggaagctgccctccaaataacatctttaatagtaggcggcagcatttgataagctgtcttaaccaaataaactccatgcttctgcttgagccaatacaacgaatcgttagcatcaccaatagctaaaagaattcctaaaatagcatccgcatccccttcattaaacacatcccgaaccacctcctcatcccactccctaattccaactttgaataagctataaaccttttggtcattgtaagcagataagtcagaagtaggcattggaaactcatctcttgggagccacggatccgacgcaacccagataaataaaccattaccaacacgcattcttaacccatcttttagaacaccttgtgcctccaccaaacttctctaaataaagctcagattggagcctagttcagcagtcaaaaagtctccctgagcataatatctcgctttaaacacgcaactcgccaaagaattaggattaataatcagacaccacccttgtttgccaagcatagcaatattaaaatctcaaagactcctaaaacccattccaccatcgaacttatgcttcactaagcgggaccaactcatccaactaatgcctttattttagttctaagaagatttccatcaaaatcttgccatcaaactctcaatctccttgcacaccccaaccggaagtaaaaagacgctcatagcgtaagtaggtaacgattgtacaaccgtttttatcaacacctcctttcccgcacgagacagaaacttagtatcccaacttttgattcgctttagcaccttctctttaagaaaccccaagacagcgttcttattcttaccaatcgtgtttggaagacccaagtaagaactattagcgtcagcttctaccatccccaaaaccacacagacatggtgtcggacctcctcccttgtattgctactgaagaaaactgaggacttctccttgttaaccacctgaccagatgccaattcaaaaaatcggagcatatccataacacgactagcctcctcaatcgaagcttgacaatataagtaactatcatccgcgaacaacatatgggaaactctaggagccccattagctactcgaaatccatgtagcaattggtttcgttcgtattttcttacaagagttgagaagccttctgcacacacaatgaatgaaaaaggagaaattggatccccttggcaaataccctttgaagggacaatcgaccccatctttctaccaccatggacaatatgataccgaaccgagatggcacaatgtaacaataaatccacccatttttcggcaaagcccatttttctcaacatatccttcaaaaacctccattccaccctatcgtaagctttactcatatcgagttttaaagccatatatccttgcttatcgcacgtcttccttttcaagtaatgcattacttcaaaagagaccattatgttatccaaaataagtcttcccgggataaaagcactttggaaatcagaaacgacttgatcaagtaccctctttagacggttagccaatacttttgaaagaaccttgtaaaccacattacataaagaaataggcctcaactcccccatattacaagggctagtcttcttcggaatcaacacaaggttagtatcattcaaaccaattggtagcacccccgtttccatgaaatcccgaacaagccgaatcaca

SEQ ID NO: 163346 - DNA, 3494 bp, Cannabis sativa
acatacacatactaattttcagattgagcagttgcagtcgcgtttgcaacaagagaaatcaatgcgcattgttcttgagagagccatgggtcgagcttcaagtactttatctcctggacataggcattttgcttctcaggtaatttttttgttttctatcaatcaaagagctattgctaaacactccaaatatttcttatttcatatgtactttttgtcatagcttatacttattagagtaatggcttggagattaagacctgtgcttgaatcttcacatatcagaatttttatggggttcaaaaataaaaatttgacttaatttgtcaaccacatttgtaaatagttattgttggtagtttactttatgaacaagcttgatcaggactttaggaaatggatttgaattttatgttctatttcccctttctaagcaacagacaaaggaattgattgctgaaattgagtcgcttgaagaagaagttgcaaaccgagagcagcaggttctctcgctatatagaagtgtatttgagcatagtgtgagcagaccaccttctgagcagaactcagttgtggtttctcctgcacatccaaagcacgaatccaggaaacatccaagtatcatttcgagtgcattctgttcctctaaaaacttccctttccgaccattgcaagctcttgtttctatagatgatcctgggaaaagacactccaaaattgattctgcaaagagtgttccaggcttacccaaggtaggccataaactgtttgttatctatagtaaaatgtaagttgatgcattgtgattacattccattttcaaagagtatagacttttaattgtcttacttttattctgtcattaggaatgaatttcttctagttccatctttgaggatttttgacctccgcattttacggaaacaataaatgaacagatttaaggaaatttatgggcattttagaacatcttttcctttgattgcttcatgtttcatgttaatgccataaggtcagtgattctcatttgaattttcaatcatgtacatgaaaaggttcggccaatggagaaaacttctatactaagaaccctcagagatcatctccaccagtgcccaagcaagttgtctgaggaaatggtcaggtgtatggctgttgtatactgttggcttcgcagtgcagcatctgtcaaaactgaaaaaaacagatcacctatgttgtcaaggtcctccaccaatgttgtacagcctcggcgtggggttgaggaggaccaagatttgtctggaaagtccacagttgaaatattatggatatcaactgataagggccaattttctcatgcttcttatgccatcaacaactacaggttggtattaaataagtaatcaaactatagtatttgagcaaaaaaaaaagaaggaaatgtgtactttttattagttattttgagaaaatgaataaagacctgaggttctcttttccatattatatcacttgacactgacagtacttcatgctctcaatttcagagtcttagttgaacagttggagagagtgaatgtcaggcaaatggaacccaatgcccagatttcattttggatcaatgtctacaatgctcttgttatgcatgtaaaatttttacagcttgttattgtgtcaatgccacaaaattgaaaatctttttataactatctgctttatcactttccaggcatatttagcatatggcattcccagcagctctttgagaaggctggccttgtttcacaaggtaccttacttcttatttagcctaaattagcagggtggattagttgttttactgtgaaaaatgtgatagtgttaccacataaattgggggtccccttttcttaacctttttctttttctcttcctttctaggggtcctgaattggagtctttaataaacaataaaagtatcttatttatgtagaggggttggaattagaaaaagttatggagaaaaatgtcaaattaaattggcttaatgtattttcagtagtttccattggaagctatccgtgttcttatacatttttcagttaatgtgttttctctgtgtaatatataattagttatgtgcatcttggtgtagtgcaggctgcttacaacattggaggtcgtgtcatcagtgcaaacaccatagagcaatcgatattttgctttcgaacgccccgggttggatgggtactcactttactctttttatgaaattgaaatcttcatttctagataaactggtagtctgctgtgtgttggtttggctttacctgtattttcaaaagcccttaaaaatatgagatactgtctaaattctttcatacataaatatgtatgtaatatgtacataagcaccaagaaaaactcattttcaagttttctttagatttggcataatctcacttcaccacaatatacatggaagatgaaaagagaacttttgtgcaactttactggcattttcagctatttctcttaatgcatgtttaacattattttcaatgtgtgaaatctcgttatcctgtaaaggagtttcctttcattgctcaaaaataatcattctctcacacacataaaaaggaaaatgaatcattacttggtttgaatgagtatgaagtaccatgtttcttactctcacctatgtttttatctgatttttaacttacagtggcttgaaaccatcctttcagctgccttaaggaaaaaatctggcgaagacagacgactcagttcaacgttgggtcttccgaattctcaactcctagtctgttttgccctctgtactggagctttttcagatcctgtggtaacttgttaattcttacccctcttacctttgcatacattagtatcgatctctttcatgagtgatttttattcatttcataatcatgagcctgctaaaacactccattgctctatgatgcaacttgaaaaacagatagagagatacatggactacaagtaatattggggaattaaaaagaaaaagggatacatttgtggcataattacataaaatttgtaagctgcataaacacaataattatttttagtggcataagtactaaatattagtaaaagtgtaatttttgttcagtttcatccgtacagattccgttagtgttttaaacaagttacgctcggattctaaattattgggtcacagaaacgttattttcaaattttcttttaaaaaattcaaaaactttaagacactgacggaatcgacaaaactggacaaaaattatagttttactgacattagataattaggccgattaaatttataaatatcacaaataaaaatatgcctctttgcaggattttagaaacgtgacatcaagaatagtgcttttagaaacgtaacataacgattcatgcagggccggctctaggcataggtgggctaggcctgcgcctagggcccactcatattagggatccaaatattttttttaataatttttaaa

SEQ ID NO: 163347 - DNA, 3681 bp, Cannabis sativa
cccaacattctatagactggccagcccctgacaaatgaacacctcgaataaatgagttacagatgaaaggcctcgagggtgttggatgtccagtacaagagtctcagtgtctaactcctgaagctcctcatcaacatttgacaaaatcttgccaaggtaactctgagctacctcgatctccttatgacccttggacgatcaagctacctaactaggcctctgggccccttgcctaatggcctatgaggggtggaatgctcctcgagggtgggtccataattaccggccggttggccagaacacatcctaggggaggaagaggaaagatagactaagtcacatcagatgatctggcagtctgggccatcctggcctgaggacggccagaagaagtaccactagaaggtccaccttccatgttcctcatcttggaggccatgtttgcaagaaggaaagtaacaaagttagaatagaagttatcattactaattgcaagtaaaagtaaaaaaaatactactaccatcttgaggacaatctagagtcctgtcatcctcggaactatctttagagacggtagccttgcatttgtctctggaagcaggcagtggtcgagtaggcctagcagaatcctgtcctctgaacctgaatagcacggaggcattctcagcagtgtttcctcatgccaaggtctggcaaagggcaagatccctcccggctatagtcttggcaatcctgactaagggagtgttatgattagactcacccttctcttgctcaggcacatgccttttctctcgactagctccttctaccatgggagtgtcgccaggacctttagaagggcctccaataccctcagtaccaggcgcaggagggtatagacaatacctccaaaaatttgcctcaatggccagccaaagtatgtcgcacctcttcgcgggctgagacaagatatgatttgccctatccctcagctggagggaagggattgattgacatacctaacatcccaagcaagaaagtaactacgggagtcctcccgatctttgacaccgccttgttgttggtgttgccaaaccactagtagcctaactcgctaaagtaaaagtatctggactcgccctgcagaagaatagaattcaactcaaaatggaattgcacctcgtaaagtgagggtgttggccatccaagctccatgtaaagaacaaagagcgttgaaaggtacttgatacctttcagagtgatctgggttgaacacaacttaaagaagttggctatgtccttgaagtagggatgcaagggcactgccgctccttgatcaatgtgattacctaactaggccatctagttgtacgccaaacgatgcactaactgatccctagtgggtctatcacatcgaactcctcccacaagtcctccttccttgatctcatcaagtttcttggctgacagagaagattgaggagatatccatcattgttgttggtccccataatcaaggacccacggctaaggggcttcttcttcaacatggtcaacctcgaccactaacggaagatcttgggaattcacaggcctcatggcctcatcataagagcccaaaggattacccaagaccatgatgcaagtcttgaactgcctcccgatagcacctggtctagtagcatgcatagcctgctcagcatcaaaatcattgtcatggctggccaaggtctcctcatcctggtcagccataggctgctcggccgcaggctcctcaacctggacgacccctgacttgtccactttaggttgttcagcttcttccacattacgaaccctccctcttgtcatcaactcaacaatgtgagggtcctgaggaggtgccctatgacacgtccatttggtccttgccatggcaggtttgaagtgcctagcaatagtaaccacagtctcagtggtaggaagatcactgactgatagagttgcccaacttgtgggcaacgtatcaggcataccgtcctagaaaatgtaagctcatgaactagggaggaactgcctccaaccctggttcagctcccagacgaatcgaccgtaaaattcaccacctattctctccgaatagtggtgatgctcaactttaggttctacggatccactactaatctcgaattcactcgaggggctacttgaagaacccttagaagaagaactagctgaagaagttagaggatggtctttgaagagatgactaagcaagtcttcatcgatccggttgtcacctccccaaaagtcacgtgggttcatctgtataaaaaaaatacaagggaaggtgagcaaccaaacaagataaaaagacttaaacaaagtacgagtcaactaaatctaagggtactagtcagatatcttaatgtacaaaatcgtaaatcagcaaagtacaagttccaggtgtgaaaaattgaatgggcattggatcttaagttgttcattgactaagatagacatgcccaaaggtatgccatattgagtccctacaggaatcaagtatgggaaaagggttaaataggcttaaaaggtcgtgagaaagtctttgctaaagtcaaagaaggccaaaactgaccaatttgatgggaccaaagccatgtgccagctagggtcccaagacaaaaacacgtcttggcaagggtcccatgagcaaagcatgaaccggccaggttcccaggctagaagcccaaaactagccaggttccaagacttacaccatgtgctgactagggtcataaacaatccttatatgtcggccagggtgttctacaaatcaaaaatcctacttttttaaaatttgaacaatgttctctgtcacccaaagagtcaagaatctgaacgtagcccaaaatgtaatctttttatcaagaagtcatgcattatacatcctaaagctgtcatgtggattataatgtgaaaaagactacaatctaacgtgagaatcaagaatttaaaaagcttgaaaaagcttgaactcatcaatggaagattcaagaaaacaacaagtaaatgagattcaaagatttacccactaatgacgtttgctgtggatgctcgtgggaaggtcagatcattgaaaaaaagtgaaaaccacgaagaatgggaagcttgaggcgttgggcttgcatgggaaaaatgaagagccttttccctttcttgaagggaattcaaagagagagagagagagagagaagcaaagaggaggagttgatcaaatgagtgttatataggttctggtatgtttttccctaaaaaacttagtgggtggttgctctttctaaaaaatatccatgcaaaatatcaagagtccataagtgggaatgtgtgcagctaaaaataagaataataataataaatccccataatgattggcaaaaaagtcatttttgatcatgaagtgggtatgtgaaaggccaaatagctgaccagccagtggtacccagtaaagattttaacagtcaaagccggagttgaaaagtccctattcgtataaacgttcgctcggggacttggggacaaatgttatctcaatttttgtccccatgatatggcatgtccacataggcaagattaatgccacggagaatgcaacctgtcaatagatgagctaagtcaccatgcacaacttatcaattgacaatggctccaaatgctcag

SEQ ID NO: 163348 - DNA, 1037 bp, Cannabis sativa
  modified_base (989)..(1003): a, c, t, g, unknown or other
ctctcatacttaaaatcaaccatgaagctgtcgtcagagtcctcaaacttcaggcgtttcctttgttgaagtggtttcgtagcatcaagaagaacccggatacggagaaagcgtgtacgagtagtcacatcgtacttgacgaatgtccccagaaaatttccaaggataatgcccattgcctcggaattcctccgtaggggtagcctatgaacttgaacccagaaagggatacacttaatatcatcagggttaatttgatcagcatcaggggggtctaccaacaccatatgtcgttgcaaataatgccaaggttgtccttcgagaaccctcaacttctcagccaccaagctgaaagagagcatgaagagactctccatgaaaccatcaatagagagaccgttcctaatttgacagaagttttccagaaaatctttcaactttgatagagataaggtacgattgaggaaaactctgcctacaagaatattggaagaaaactctgcctcagtattaagtgaatccccttcggtaatcaggagttcattttccatagaagaggcagcaccacaggttccaaaagattggttagaagtagtcatttcgaaggatagaggagattttgaatgaaagaaaattggttgagaataaatggagagggaatcccctcttatatacgtgggattaaagttggttattagatcatgtactgaacagttgaagatcatggggtgaaagaagggcattaccagtgatccctaaaaattaggtcaacaaaactgatgccatgaaccccagtaaatcattatccgaaaaaactgaatttcttctcaacaacattacaaattcatgggattgactaactccctgctcgtcatcgaatgactaacattctctcgaaggaccactattaaggggaatttctactgtaactatatcgtggaacatatagagcgttctatataattgaaagtgtattcaattccaaatcnnnnnnnnnnnnnnnaggaattaataagttagggtatttacttggtaaa

SEQ ID NO: 163349 - DNA, 1167 bp, Cannabis sativa
acactagacactatgatgtaataaatcaagagaaccccaggattaccaagtgcataatagaatttcccaaacatattttgtttcttttattattttattttatttttttggcaagaagatattttgtttcttagaacttaaaacacaattcacattcagtcaacgaaaatagaccagtcccatctttgaagtggtgtccaggaccaatctcatcctttataagattacagagacttttaaatactaaaccaaatttagcatgattatttctcaagtcagaacacggttcaaaaacaaggaaattagtatgtcaaatcagtctccggaacaagtagaaaaattaaagtagacagcacaatcattcaataagaatttctgacacattaactgcagtgtcaaattacagatccgtgattgaccttcaatccgaaaaaaagtaataataataataataaaaagtggacgaaaattatgatcggttgtagttaaaattttgaatatagttttcgagagggaatgacaaatatgaagacgaagatatacctctgggaaggtaaacattgcgcttcaagtagtaaatgtagaagcaccagaggaatccggaaagaaggtagagaagcacgcctcctatatagttacgaagccaagactggaagaagtggggaagaggctcccaaactctggcagggagtaaggttccgagtacaatgtgattgtaaaagttgctctcttccacgaacagttgcaggtactgctccgaatccatcggaataaggctatcggagggtcaaatccggcgagaaaagggtgggagatgtggttttggtgtgttgaataaagaagaaggaggagatgagatagtcaaagggaaactgaaacgacaaaacaagggctgtgaagtggtgtgaaaaaggtagcctggaccgccaagtgcatagggaaatatatacctacgatactaaaatattgatgaaaaatgcaagccactatgggacccgcctgactcattttgtgggtgggtcccatgtgggattcacatgctacttctgtattttttttaaaaaaaattggatagtgatccacgtccacggcctaacggccatacaagttggccactaatcttttaagaaaaaaaatccatatttttgtaaataattatgattataa

SEQ ID NO: 163350 - DNA, 1181 bp, Cannabis sativa
atatatatttgtttttctgaaagcaacgtataaatatttatttatactaaattgatgataaaggaaagttagcaatagcatatattacgcccacaaagcacatattaataattcatgagcctaaatgaattttgtagaaacaatgttattattaatgaaattaagagcattaaataaagaggaggaaatgatttcatatcaatgattttttgagtgtagtaactgtcaattaattattatcagtcacaataagttatgattattcttaaaaatatggtcataaaaaattattataagttcatataatagtaataattgcatagagttttccttagtttttcttcattcccacaatagctagttataatggtaataagtaatcaatgttggttacgtatggtctaagggctattaatgataaagaacaaaactttgtatatatgaagattgacatacacctgaaatctcaattcatgaacctatcttagaaaatggtttaggaaaatctttatataacattaacggtaccatgaagcccatataacaggcacatggttctgggaattgactcataaaaaaatatatactttagagaagaaaagttaaatttcacctctgttttttttttgggaagaacttcaagttcattaactagaaaagatagttgagaatgagatgtccctttctttgatacaaactagctggtaaggtagacattctagctttttttgctaagccattgcaactgagttaaaggaacgattaataaagaaatattacggactctaaaattaggacacaaatctaaaattttcaaataaacatttaaacaagaccacttcggaagacaccttcccattgccaaagcattcataaggacttgagaattagagagaacatgaatatcactccaattactttggtgcgcccatgagagagcaagcagaatcgcacgagtttctgcttccaaaacataggcagctttcgtgatttgcactctaaaagcccaggaatcatctgatcgattaaacacaatagctgccattccccaattccctgaagccaagaaacatctataaacaaaacaaaatttgcctcttgcttcttttgacgagctaccaacctatgcttcatttttagattggtctaggttatttttagtattaattttagattaagtt

SEQ ID NO: 163351 - DNA, 1362 bp, Cannabis sativa
  modified_base (1332)..(1336): a, c, t, g, unknown or other
cttttagtcacaacaaaatttctcgaaccatgagtatagttctagttaaaatgttgtagcaactctatgtacttctttgatctcctttgatagttcctatgcttctagtatcattggggaactttaagtatacgtgccagattgaggtcaccactccaaaatccattaaaaatggtctccccaggatagcatcataggcagtagggcaatcgactatcacaaaagtgtacttgaaggaggatactgtgttacttccaggaacttccccatttatggtcattggaagctgtatcttgcccatggggataaacgtatctccattgaagccttgtaactgaatcagacaaggtaacaggttggcttctactaaaccactggcatggaaggctcctttaaaaatgatatttacaaacctttcgttatccatgaggatcctagaaactcttttgttggctatctaagcttttatcaccagcagatcattatgaggatagtgcatgtgcctggcatcgtcttctgtgaaagtcatgggcaaattcatcatccttggacgcttggcaagtggctacatcaagtgacaagcttcgccttggttcaactcattaaggtatcatttttgtgcattttgagggcttctggcaatatggggtccacctaaaatagttgttacatgaccatctaaaactggtaatacaactccaggagggtactgattttcgagactgagagctacaactactgccgctgctggggcgttttgtgccccctgaaggtaaaatttgagcaatgtgactccgtttacataaaaaatgatgatgggtgggagggtccataagaaagtaatttcatgcaacaaaccttctccactcctaggctttgccaaaagctctttccaagattccatgatagaagatggaatactaatatttggagtaggaggagtaccaagcttattaattattgtgatgtaatagttcaattgttcatcgagatagttttacagtgtgacagacaactatcatcgcaaaactaaaagtatgtgttttagaatgaatttttcattagaaatacgagtatagtctcaactgcaaattattaattattaaaaattttatatatattgataataataataataataaataaaaaggactgtataaataaatagttaccaattattaagtttcattattttacttagaactttgtatgtttggtagctctagtgtatgcatatgatgtatgtactttactactatgtttgttaaatatattacataattttatactatttatattttattaatatagaatatctttatatattaaaannnnntatctaacggcatttcttggtttaac

SEQ ID NO: 163352 - DNA, 941 bp, Cannabis sativa
gaaaattacaaaaaggtttaattaattattagtttggtttttaatcattattccctcttctcatctattttgagcaattatttaatgtgaactatatcttaaatcaagatttgttgttctttaattaatgaccttctcatctccaaaatttatatggtctctctaaaggaaaacaaaacagtagttaaccaactatgattgaattttgaatcaccaaatcttattaggtcataagttactaatactagtaaaaataatagtgacagaagaataattacagctacatgtggtaggttgtttgttgttgttgtaaatgataattttggagcatctcatttaatatataggcccaaagaaccatgaaataccattgggcaaaagtcactttcattatcatagctccaactagatctgaccataaagaactccaatttttctggcagggaccgccattgatattctccttcctaaaatacaagagactttggctatgtttgttcaattacatcacattaataattcaacaccaaaacaaaaaaataaaataaaaaagtgacgacatatctcacgctcttataaaattttgcatgtcacttctttggttctaacgaagtggtgttgtagaaatacaactaaagggagtttgtatgggtactttattttttgtatttaaaaatattataatccaaattattttgataaattataggtatgtagacttttttttaatcaaaattttatgaaatttcaagtaatttatgatctcaaaaacaagtttcaaattaattatatttggtgtaaatttcaatactacaaattattcaaaatatcttaaaatttaataagaaaatttaaataactaaattgtgcacgaatataaatataggccgattttgtgcccatatgtgcaaaatacgaattggaatccgttgtacggcagg

SEQ ID NO: 163353 - DNA, 2861 bp, Cannabis sativa
agagagagagagaagtcacttaatctagcttgatacgtactgcatgaactccgaatctgactccaaagccgccatggtttcaggcgataaaaccacctcaagatcaacggtccccgatccttctcttcctggaaacgccgagatcttaccgtcgaatttgttagcccggccactccgaaccgcgagaggtcgtccccacccaaaatcgttgtcgtacatagggaatctcggggagctacccatagtgatcgatgcgccatcggggtttccaagcgggaaacacctggggttgctttcccattcctctacgaagcggcgcaccattccgctatcgtgggccttcaagtttgtgttcatctgctccgcgcaccagcgtagatccctagacaatacgtccccggctgacgcgtaagtgggaacgctctgtattgcgtttccaaagtagaatggatccaacttgggctgaagcctgtggcgacaattgaccgccattctaaacgttgtcgttttcgagataggcaacttcctagcacgtgtaaccgcgcgccagaggagtgcgcagagtgattgaaacgacgaaatctcaatcgtcgttttggtagaatcggtcggtgtcaaaactgacgtttttagccaattctcaatgatggatgtgactttagtcccattattgttatcgttttgtccaaacgtgtcgttgctcagcttccccaaaatctcaaccgcgctgagctggcaatcaacgtttttagtgctgtttttgttcgtaacgtctttcagtttcaaaatcgcttctctactgaaactgaagattcgctccctcaaaggcgcgtcggcattgaaggtgaccttgggcccaccttccggcaatttcagaaccgccggtgaaataagaattgagtcccgggtgaaaaccggctgaggccgagttatcctcttcgcgcctctacagacatcggcgaagatgttgaagaagttccagaacgaggttccgtccataacggagtgattaacagagcaaccgatgaagatcccgtcggctagctcagttacctgtacggccaagatgggcttgaaatgacccatgtagctgacagtcctatcgaaggtgaagaactccttgaagcaatctgacacctgggtggctcccagaacatcccggacgaataattgcccagcattagcatggatgaagtcgacaccagcgtcgttgcacgtgatgaaaacgtgaccatcggaatctgtcgtcatcctcccggcgagagggggaaatcgagaaagtgtttgagatagaccttgcttaagaagctcgattacggagtccgtcgggaatggaggacgagtgaaaaggcaacccttctggatgtaatggcaggagagcataggaaggtctgagacagagagtttgaggtcttccattgttgacttttcatcggggaagacggtgcagttggagatcatcttaacttgatcggcacaaaaagaagaaggcattttcttttctttcttttatagtggagaaggtgtttgatttggggttcgctatcgatgtgggataattatatatatgtataagtgtttcactctctctctcgctcttggaagtgagggggagtgagtagtgagtaaaatgagaggatagtgaggacatatatataggagttggggctgagatgttctctctctctttagtttgtgtccaagttggggttggggttggggttgggttcatgcatttccttgcttaggtggttcctgctaatgttagcctctttattttagtcattttaacgtcatgggattattttatttctttctatttaattaaataatttatttattctttgtttgtttggggattttttttatggatgtctatgtgatgacattatttaaagagactcttatttaaaatatatataatgattggcccagtgttctgttttttaattaacacatagccaaacatgtcttatcagtaattttatctttgaggaacaaagtcgcaaaaatgtttattgtatatataactattatactttttatatttctttttaaatatctgtgtataccttttataattttaacaatattcaattatattcatcccatcaagctcattattgcaagtcaaattttaatttaacaaaataatattatcttcaatttatttatttagtttttattatatcttctagcttctacatttcataaaatttataaataatttcactttttaaattcaatcgaagtttattataaaatgcttagaaattaattataattttttagtcataaatacttctcaaaaacaaaaataatataattgtttcaatgacttttataaatatttgaatataaaacaattaaaaataaattaaagggagtgatgttctcttagtaaaattaattaactaattgaaagaaaactaaactcaattgtctgtaatatttggtaacaacattgttattaatattttaaactgtgatctaataccatatcaacgtagtattttataattagtgatttttatattatctattaaatctaaatatatgatatccgatattaatatgtataatagtatgacactctacttgacatcttgaagtcacttagaatttctcatttggtaaatataagaatttctcattggcaaatataaaagtctcatttaagtggatatatatatagcaaaatatagagataaaaaattgaatatattcttacgtgtagatggtataggagagagtaggtgggagagaagggaaaaacaaattttatattttattgttaggctatcgaaatcatttcgtatatatgaaaggaaaaagtggttgatttccaaaaaaaaaaaaaa

SEQ ID NO: 163354 - DNA, 1938 bp, Cannabis sativa
ccaacactctcagtagagagaaaagccatgtccaaagatggatatctaaatgaaaaacaacaacaaatggatgctctttttcttaaagagaagaagataataagaaaaaagcttacttttgtctaaaaatgtagttttcacaaatgttgggtcttacatatttgtttcgtaatagagtgttcgtctaattcaatttgcatcattttgctcatagtgcatctgattcaatttaattcgcacaatagctcaaatccaattcaattcacaaaaatatggattagatcgattattttttattggttactttttaatattaaattatttaatatttatcaaaaaaaatatctttttttttcacataactaaaacataaaataaaataaattattattgttttatgtctccatcaataaagtgaaataaataaaataacaaataacaaatttaaaaaaagaaaaaataattgtatgtaaaaaagaatattttttttttttgaataaaaacatcaattacaaactagcagcacttaggcatatttgcgaacatgctaccaccagtagcacaagaggataaaacatctatccaaacattagacacttgggttaatctcgcccacctagctaaacaattaggcactttattacaatttctaggataaaaaataaagtctaaagaattaaaattgccaaaaaaggactttacatctaaaaatagggctaacgatgatctttcttatacagagactaccataaaattcttctacattacttattaaattatgacaattaaaatctgattttagatttaatcacactaagtgtcacattttataggttttatttgggatgccttagagcaactcctgagagactccttatatttgagctaaaattttattttaggacgaacttttgttcagcgctctctccaaccaaactccctatatattttaactcaagtaattgtacaatgttaatctatttatttatttttttaatggaagaattgtataatgttatttaaataaaatcataaagtaaaagttagctctttaatatattgaaacaatgttttttttttattgtaattgcattaaaatatttggaaagaatttagagaactccccacatttagctagttccttaacattccttggaggatagtattttcaaaggagctccctaaaatagctaaggagccactttgcgattattatgttgcccaaaaactaaagtccaatataggaatatttgttgggtacattggtcaatctaatgtgaatgtgatttaagtctgttgtccttgatgggttaacagttgtttaatttgttaaacatgtcattttcaacaaaatgtagtggtgagtagcgtttcttacttatataatcgggcaataacatctaacaagtaacaatcataaatgagcagcattagattaagggtaaaaaataacaatatgagatgcatcataagacacataacttgaaaaaaatatgataacctgacaaatcataggcaaaatatgctttattttagaaaataggaaaaaaaaaccaatggttgcaatataggtcataacatgataacacacttcgaaaacaatataaaattagtaagttgagtaaaacataaataagtgtacatcaaaacaggttaaacaaccataatttcattaaatttcaggttaaacacacgttaatttacagtagccaaaattgacgcgtttaatacaattagcaagtgtattaatctatataaatatattaataaatatattataaatatgttgacatgaaattagcaagtgtattaatctatattaataaagctataacaggttatacatgttaaaataataaatttgaacctattgattttttttaggttatacatgttaaaataatttctctttttttggacttttttatttttacactt

SEQ ID NO: 163355 - DNA, 1968 bp, Cannabis sativa
tattactaattaattgagacagcagttaacatggtagggacgctctttatatatacaatgatgagattcatccaaaaggacattaacatgtgttagcaagttactaggttgtgggtatttttcacgtggagattatatgcgaccttcgcagcactaacatttttaaaagcagttctctaaacacggttacttaaaataatttagtttttgttttgttttgtttattgttgttattatattttcagataatattatatatttatacaatgcactttttgcgatttggacacaattaagctaatgtgggatatagctgctacgacagttataaatagatattatttgtgtgactgaacatgattttgtttctaaccagacaggtaaagaaaaaaaaaacattaatgctggtgttgttacggtgggccttttatttgaaatttgaaataattctctcgttgtatttgtttgaccccaaaagaaaaagactatcacaactgaattaaatacattgccatgtgtatcataaatgacggcttggccatgggttgtcccaattcatttaatttcctatatcgtaacaaactttttaagcaattgacacagttatatttttggattaggtgaaaataaaaatgttgtttaaaaattacactaatgttggtaacctgcagtcttgaaaaaactgtgttctttcttaattatggcatctaaagattaaacactttagccttcaaagatttgtacttttcttttttgttctttggtacttccaaattatgttgaatctataattagtgatacaattcgagctaggaaatttcagaagaaagaaaaccttttatagtttttttatgggcagatgcaattcttggttaacagccgcgatgtgaaaaaatctgactaaagtttatgaataagttatgggacccacggattatataggtagtagccgattttctcaagcggtttgaattttgttacttttaaatattaaaactaaccttgaatattttcataatttgcaagatttttattgacttgactgaactatgatggtaattcaatgcattgacgtgcatgaaacattaatgacatatttgatttgttgtaatgaatattgtaatggaattatgattacaattctcatatttgttttgcttttaaattcttgtaataatattttattgtaatcattattacataatttttacactgctatatctcgtgaattctcgttataattatttaaaatgattatcttacttttattaattttatatattttcttactaaaggaggaataattttatcaatttactacctattttaatattcattccaacaaccaacacaaacataacaattaattcttattacacttcttaattttttttgcattacatactattactattacaattattattctactttaccgaatcaaacatcacctaactacgttgaaaaacacaataatgtggtcatgatacccaataaatttttggtcattaagaatatgacatggtgtttattgaattgtcaacaattaaaagtaaaaaaatttgtcaaataccatgaacatgtaaaaattttcaaaatccattattaaacacctaataatccttctagtatttttttttgttaaaattttaaaattaaaactataaatagattgagttaaaaaaaatctatacatagagttatgcatcaaagtttgaaaataaaaatgatatataataaccttatttaaatttttggtcatagaagtaaagcaataaatgatactaaattagctaaaaatgacatcttcaaagggttgttcatataaaccgagaaaccgtagtttaaatccggaccactacaatcagaatcattgtaaaccgtaaccggggaaaccgtttcggtagtttggtcaatccggactgtttacgtcgtaatggttcggttgcagttcgaaataaataatta

SEQ ID NO: 163356 - DNA, 1395 bp, Cannabis sativa
aacttgactgggaagcattaaccaaaaatctgccactcgtggaggctaccgccacaacatccaactgagaatttacagttttgatcggctctgcagctaggaattttttctccctctcagcttaatagtctttctttgtgctataataatttggtgttgggtttggtagtttccttctaagctcacttattattacaatgctaaggtacacttaaggttcaagggtcattgtccaccattctatacttatctattattgacatttgaactaatgtatgcattttttttggattgtatttgtaccccttccctaacttgtgatgcacccatgatgtgtaaatgaaaagtcgtttgttttaataatgtctcttgtaagttgaattgagcccatgtatgggattcgacaccacaatgaattaatgttttatttagttaacgattctttataatttttattgaagtaaaatatatggcacctgatattgaattgtatcaataataatattacatattacaagagtactagatactatggtgtcttttagtgtatttctttcttaatatacactattctattttgaatagtattcttaattttaaatcataacattcattttctttgaatctgtattcaccatttaaatatgagcaaattgacaagcatggaatcaatcaaaggaaaagaaaataaagaaaagagaaaaattctagagttctttcttaaaagcttggcataaagtcaaatggaaaattggcaaaaaaataaaataaaataaaaagatggcactagtgggattatttgtagaaaaaaattggtaactaatttataaattttgcaaattaggtatttatttatttttttcacttggtgataaatttttatgtattttacaaattagggacaaattgtgttaaaatattttttttggagctagtgttatagagtttaagattagataatgtttctttctcctcataaaaatgaaaaattgataactaaatttgtaagttgtagctaaatttgtaacaactaacaatcacattatcttcttatatttttgaatggagatcacattacttctatgattaaaaattaattacccgttatgcaacaaatatgtgtaatttgagtgtgtcaattatttatcatcacatttttttttataaaattaaacatactatatataagtaagaggattgctaccgtcaaccttttattacaatttcttaatcaattttagtgcctaaaaacacatgtcaaaatattttttcatagcagtgttcattatagttacaaaatcatttctgtaaatttttaaaattttttaaataatttaccgtgttaatgatattataagtataacaaatactgctataaaaaattaaaaaaaaaaa

SEQ ID NO: 163357 - DNA, 1787 bp, Cannabis sativa
  modified_base (1713)..(1724): a, c, t, g, unknown or other
ccagccaatgtccccatgggctggccagtaggtgtctctaaggtctggctagctagcaccttgacaccctggctgacctgctttactagaagtctactcttgtagagctccctccctcgctaaagtgaactctcacagaatggcaactctatatactttatattgacatcggggttgtgtagaaagacctcgtaaagcacctccgtggataagtctaagtacttatccttaatcgcctgttgctcatcaagggttgcgtacttctccttacactccttctcaagttctttcttcagcctggagttttcagtagtcagccttgtcagctcttagtagcagagaccaagcagttgattcaggccatcatactggtgttggacattgcccaagcgggtcaatgttgagtctagatcaacatgcacctttgtaagggcatcctcatttgccttgagttcaacttctttgccctcaagtttcttcttgaaggctgtggtagagcctttagccctggcatgagcatggctaagcatcagcaagacctaaaaccaaagagaaacaaagttagaaaagttgtacaaaaggcttgcatataaaaagttagagaaataaattacttgcaggggaggcatctctgagggtgctcattgtcaagtaatccagggtctagcatctagcttctagaactcctcatcgacacttggaaaatttttgccaagatagtcctcggctacctcgatcgccctatcacccttggacaaacaagtcacttggctatgcctctgggctgccttgcctgatgacctatgagggggaggggtgctcctcagaggaggatccatgaccacatgctggttggctgggggagggcctgaggagggggaggcaagacagactgagtcacatcagaagactcaatggttcaggccaccttggtttgagggtggccggaagaagtgccacctgaaggtcccttcgccaagtttctaatcctggaagtcatattttcaaaaagaaaagtaacaaagttagaatacaagttataagtactaaatgcgagagaaagtaaaaaaagttaataacatctaaagggaaatctggaagcctatcatcctcagaagaggaatcattgggactatcttcagaggcagcaaccttgcctttgtctcttgacgcaggcagtggtcgggcaagcctaccagagtcttgttctccaggcctaacaacacgggggtattatcagtagtgcctcctcgtgccaagtattgtaaaagggccctataacgccctaatctacaagggtgccacatgtgtgcttttattaattagtttataataataaactaacagtttaagaaaagtgtggtttaattaaaactaacaagggtgccacatagaatcatatccttagaagattgatgagctagctgtcaagaagggactcctcgagaattaaccttgcttgaactgaactcgtgagatgatgtgaccatgacagagtttagttgcaatattatgcttcgcgtaatataaaaagcaagaccaagaagggtttatacaattcgcgcaaataccaagatatatgcgatgactaggtagccttcttctacaaccaagtaatgatcgcttctttacataatgaattagtctgaacgataaagcgcattcgatgactcgataggaactcactgttggaattatttttaccaggatctnnnnnnnnnnnnaagtatgtttgattaatatcctaatatgaattctaaaacaacgaaattaaacacatataaagt

SEQ ID NO: 163358 - DNA, 6312 bp, Cannabis sativa
  modified_base (1720)..(1725): a, c, t, g, unknown or other
ctaggttgacaattcgtcaatctgagtgccttctaagtatcagatcaacgatccaacttttgcatcttctttgtcttccttaaaaacagagaaataggtcattttgaagaagaaacaacacttactaggtgccaaaagtaagatccaacacccaggttcacattttgtcaacatgggccatttttattagatttttgaagaacacttccgagcatcttctttgttttcaaaaaaatattgagattcagctattttcgatgaccaaacaaaatttttaaagggccaaaagggggacctagcgcctagattgacacttggagttgggccctacgcccaagttgacatattgtcaacgtgggctatttccaatcaagttcaccaaaaagtgtttcgagcatttttttttaatcatcataaataatgaagaatcaagcaaactcgggagaaaacaacattctcgagaccctagaaacaaggcctagtgcccaggttgacctagtgttgggcgcagcgcccaggttgacaatcaacttgtgatggtgccttcaatcacacaaatgccaaatctgatgagaccattgaattcgcaacggtcaaaaatagggtaggagaccttgttctcaagtttagaagccttggaagtatcaaaacaagatcccgagagcttgagaatgggtacccagcatctaagttgaccaaagggcctagggcgctgggttatgcttattcgattttgaatccgtttcaactatccgtctagtttttcacaataactaggatccatgaagttagaatagttaaattcataacttcgtatttctaatttctgagatgggaaactcacttagaaatgaagagttttgagcctctcattttcgtagaacaacaacatctccgagaactggtgatcaccatcgccagaatatataaatagactaagtagagtcaaaatatcacttaggaatcttaaaggacattccttggatattttttcacttatttagcatccaggttgacatcagatgtcaacctgggcgctaagatgtcaatgtgagcgttgagatgtcaacctgggagttaggtcctgaactgcctttagtaaaacagtcataacgcactcaatattgatctgattgacgcaatttaatttgcgttttgaagttatttaaatgctatataaagccatgtctcacactccaattgcaattctgaagctatcatcgtcaaatttacccccaagggagttacaaaaataagcttcaagttacctatagcgggacccatcaggctccaaaaattggccgtcaccaccagaagttaattttcaccgttagatcatcattaacgatggaaaatatcttatttgtatttttctcccattttcgtgggcctccttcacatataaaaggagagctctcttaattatttttcacattcaaaaaactacccacaaggtcagagctctctctctctagtttctctctctagaatccagagcttaaacacttaatatctcgctttagtttctctctctaggaacctgagcttaaacacttagtatttttctgtaattattatctcgtgataaataaacactcaaagtagacgtagctccattattatcgcgacatggggatttaactataataaatgtgtttttagtcacaatatttgttgtgactaaaactaaattagttacaacttgtaactaaatactatnnnnnngtcacaagtaactttttgttgtcactaaaagtctcaagtaatcacaaaaaatttatattgtgactaaaaagttatcactaattagcaattttttgtagtaaaacaagaaatccttgagttgtcattttcattcagtgtattagtttttttatattttcttattattttttattgtgtatgtaaagagatactatatgagttttgctagtgttatgtgtatgtaaaaagataagtagagttgctttttttttgtatagtgagacatgtaagaaaataaaataataatgaagtgcaaataaatttataaatgtgtatgaaatgatttatttatgtatatattatgttaatagtgtactatctagggttcttgctcttgcagctgagaagctggtgtcatggctaaaacaaggtcaaaaaaccatgggaaacctagatctgctatcaagactaccaagaagaagggtgagaaattgggaattgaagcaattcaagctactctgagcgatgaaattggcgaaatcaatccgttggagatgtcaaaggaagggattctgcaggaagatgatccagctctcatagatgtttttcaacctcctctctcccccaaatcgtctttaaaagcaattcaaagacaagacaatactataaacatacaatagacaaacataccatgacccactatctcaactacaaacaaggcatgcaacaagtataacatcattatggcttcttatctattaatgaccagaccgaacaaatagatgaaactatactgaaaatgatgacaattattccaacaacagtggaacttcccttccaaagattatcaaaataatttctcatgagaagagatctaatacgattgtagccatggttatagatttcgtgaatggttttgtattggtcagagtagatcatgaatttgacaaggtgcatatttcgaccaagattattgatcagatctgctacttccttattactaccaagatggttttgaatgatctttttcttaacaaccaaaaggtcaacatccccctcagtgtctatgagtttatccattaaaaaaacatagttgcaaaagggtgtcatcatgtgtttaattgggagagttttaatggagtccggtttagggattttaataagagaaaagaatacaattaatgcaaagttgcaccaatgttaagtagtggtagggcttggcaaatatttcatatagcttctcaagaaaatagaatggaatttgattctcaaactttatcaagtccatttctattgttccatataacaatggatattgtattcttctgattgtgttgatttcttacataaagagctcaaatatgaagcaagcatcagtgaaaatcatatcttcaaactttacccttaccaacaacactagcatattttttgagtcctcatgagctcatgtagattgccaaagtttttggcatagcgatccttcattttaaattgcattccctccaagcttttcagagccatagttatacttgagatcatctatattcttcttttcaatataaacaaattctaaaaggttatcgcagtcttcattactaagacgtttgagaaacttttcgacgtagtaatacttgtgagattgcatttcatccaaactttcaatggtccaatggaaactagttgaggagtgtaatattttttgttttgatcacatagcatttttgggactctattcatcttaaagttggaccaataagtgtcctgcgcatgcaatcaatttagttttagtttcaacaacattatggatcatcgatgggaatcgaagtccatgaaaactctttgaatctaagaggttgtgctaatctcaaatatcaaaagacatgatttgtaagttggtgtgtttgaaggaactaaacctaggtgattgtgagtgtatcaacaagtttccaaagcttccaaagaacacagtgaaagtagatttgagtggaacatcgatttttgattattgttttttatagtcttgaggttttgtcaatgaaaaattgcacaaggcttgaatctattacaacaagtatcaccaagttgaagatgcttaattaccttgacatttcatattgctcgaaattaaagtgctttccacacattacagagcctcaggtacatttggctcaactttatttagatggatcaggaattgaagagatacattggtcaattaaaaacttaattgggctaagaaagctagatttaagactgtgtaaaaatcttaaatctcttccgataggtattttttgtatgaaccactttgagtatctttacctacctgagcgttcagaaatgggaagttcaacatttttgagatttgagtatcaatactaccacgatgcttatgacatagctaaaaaatccatctcaaatccattccaagtatgtccccatgcaactcaaaatatgctttaaaatattaccaacatagtaatttcctcaaactataatcaaactggaaacaaatgtttaaaaaaaatatggtcatgtgactatgtgtaatattttgtgcatgctctaagtgagcatatcatattcatcttgcctagctagttttcttatatattgaaatttccttaggaatattcttatcttgtttttattttagcagataatagattactctgaaaaacgttatatttatcaagtagatcaaattccattctgtatatcccaaacccatctgaaggatcgatcatccatggactttaagttttcatcaactcggcttgatgaaaccatctcaataactattgctttatgcatagttgttgagtttgtggagttaagaactcatgatgagatgatgaatcatattattcgatgtggaagccatttcatcaagcatgagaacacaactcgaaaatgtgtgtttatgtttcctaaacaagctaatcatgccatatgtttcgattccaagaaatatttgttcgtttggtatgggaatgagatgtgtagctatattcataatatagttaaggtttcttttgacttatccattgtagatgtaaaagggaaacaacatgttgggtttttataactagaaacatgttataaacaatgtaattataaaacattttttgcagttaactattatgacaactaaatatttctacatgaataatgatgatgaaataaaacaaattatataatcaagaaagttacaaattaaaattatgaaactttcaaaattattgagttaatttggttaaaaattttcatttgtaggaaagaaatggcaaccactttgatatgtacctgcaagggaatgaagagcccttctaatatcattacaattgcacgacgagacagactagggaatgaatagccattttgatatcattacaattgcatgatgagacaaactactacaagtctagggaggcaaggtgcataaaatctagcgtagtatcgcctcaagaaataatacatattcaattttaaaataataatatttacacaaatttttatatcgaaatactttattgtctttgattttgaaggacatttgattaataaagatttatttctttcaacaaaaagcatcaaagagtgaacatgaggaatatatttatttatatatatattgaggagctagtacacacatcatattaatatattagaagttacatattaatatattatttataatttaattaacatgtatatagtatgagatttataatggaattggatgaataagctgcaacactatcttttgtgacttttctaacatgtgtataatcatcaccatttttgtagagaagatccataaccctgaaaagattaagagcaagttgtaattagagccttgttattaagcaatattagtggtgtctagcaccttctcgacatgtcgtgttgcgattggctagcgatattcccttaaagctattatatatattaaattatgtgagatccgtacttagttgaacgaatagcaatattgacacataggagggtgctaaatatcactggtaccctttaacatttctcttgtaattaatataggtaaagctacttcagtttgtttcaaaattaaactctttgtttatttctttatgtgcattgattactcgtctcttcagttcatcgcatgcttcttctttgaatacatcatattatttcatgtaacattccaaagaaaatggcatatgatctcttttctacctcaaactgcaaacaaattaaattaagattataactgaattatacaaaattaaagtgaaatatagctattaactaaagtaataaattacaaaactacccctaccaaaaaataatccttaatttggagacaaattatcttcttagtcatattatatataatatgtgtaacgcccgcatttaaaatttactaaactcaaaagttaattttattatattataattaatatttaacatataggtcgggatctcgagttataaacaacagctgaaactacatttgctattacaaaaccccttaacatttttttttaaacaaatgacaagcaacaacaaaaagtaactcaaaatgttggaagaccgaaaccctccaggttgcactgctgcaatatgtac

SEQ ID NO: 163359 - DNA, 2132 bp, Cannabis sativa
gtatcaaaagctccttataggatggcacatgtagagctgaaattttagttataggggatgttggatcaaaaatttactagactgagtacctcacctttgggttcaccagttttgtttgtgaagaagaagattaatactttatgagtgtgtattgaccactaggagttaaataaagtaatagtggagaatgaatatcttttatcaaggatatatgttatgttgatcgattttaggaaagggtcgtcttttctaggttcggtcttcgatctggttattaccaattagagatttaagaggaggagatttccaaaacaatttttcgaatctgatgacttcatagttttcttcattgatggtattttgatttcttctgactcaaaagaggcatatgagaggtacctttggatggtgttgcaatgtctttaggagcataagcttcatgctaaatacaagaaatacgagttttgttggccccaagtaaatttcttaaggcatgaggtggacatagatagtatcttaatagatttggcaatgaataaagaagtttataattggcttcaacccaggtctgcaactgaggtaagatgttttctaggattgacgggatgttatggaaaaattgttgaaggatttctacgttcttagtggaaattaaaccaaaagaattgagacagaggttcattattgtactagcgttgatgttgctagtcaatgagagcttaccaaagttagccaatattacaatacaatacaatttgttaggaagaattgagacaacccaacataataattcgaaactacaggagtataaagaaaagcttgaagttggaccagtagagaattttagttttactagatgaatcatcacgatgtaaggccctgtattagtgggaaaatatgagagatgacattgtggagtatgtgtcagatgttcaagttgtcagcaagttaaggcaaagtgtcaaaaacagtaggaatatttcaatctctaaagatatttgaatagaaatgagaagaagtaaccatagactttgtggttagattaccaagaacagtaggattctacaattccacctgggtaattagggatagatgtacaaagtcagtacatattctttatcaggcgaattacatatatggtgggttactctgctaatttatatgtcaaggaaataattcaactttgtggtgctccaaatattaattgtctcaggttaagatctaaagtttacatccaaatgccaagagagtctgcaacgagtaatgagcaccaaaatagattgcagtatagttttcaccctcagactgataatcatttcgagagaattactcagatatctgagggtatgctacaaacatgtgtattaaaagtttgaggattcctggagtaagcatctcccctgattgagccttcatataataatagttctcaaaatactaatggtatggcactatacaaaatggtctacagaaggaatgtcgttcacccattcattggaataaagtcggtgaatggaggaaccttggacctgatgcagtctaaggaacgagtgaggccataagaaagatacgagttattatgtttttttttttttgagtggacgaaagaactatgctgatccaaagtgtagagatattaaaattccaagttggaattctttctttcttcaagtgtttccaatgaagggaacttggaaagtagggaaggaatgaaagttaagtcccagaaggggaggtagggtagcttatcagctagccatactctctgcattacccggagttcataacttgtacttcaaagtttcaaaactttgaggcagctacgattcgtataccgagttacgaaaatatggagtttcaaatagacttgtcatatgaggaacaatcgatttaggtttttgaacaagaaaagagaaagtactgcaaaataaaaaaaattgtatcattaactaaagcactatgaatgaacaacaagattaaaaggcaacttggaagttaaagtcatagttgtgggtaacggtatcttgaattgtttagaaaaaaaatttgaggacgaaatttctataaggaggggatagttgtaatatcccagaaaatataatggtacttaaattgggcatattctatttaac

SEQ ID NO: 163360 - DNA, 2380 bp, Cannabis sativa
tgatagcaaacttttcaaaattaatcttttaccccgagacagcctcataagttagaaggatacgcttaatagtttcagtatcaccttcattagccctaccaaatacaaggctatcatctgcaaagagcaagtgagtaacacgtggtcccaatctagagcacctaaaccccactagttcagatctggctttagcaagggagaataacaaagacaaagattctgcacagaagagaaataaataaggagatagaggacattcttgtcggaatcacgcggcctttagggtgcccattgattaagaaactgtactctggggttgtcacacagtccatgataaccttcacccaacccttaacaaagctaaactgacgcatcaaactggctaaaaatccccattcgacctggtcatatgctttactcatgtcaagcttgagggccataaatccccttctcccattatttcttttaaacagtgagtgaagtagctcaaaaatgaccacagtattgtcatgtataccgtcctaggaccaatgccatttggaaagatgagatgagggggccaagaacacttttcacccttagcgataaagctttggcaacaattttgtacattacattacacaaaacaataggtcgattctctttaaccaatcttggtttttgtacttttggtaccaacaccatatttgacttattaaattgtcgcaccgaagccccgtcatttaagattgcaagacatacttggctgaccctttctcccacaatatctcaaaatctttagaaaaataaagcatgatttccgtatgatcgcagagctctgaggcaattatttgacttgattatgtaatgcaaatatggtacaatggagtggaaaattataacgagttccacgtttaaagaaaatgcatgctcttgcttttatatagatacatacccacccttagatactaaaaatctactatatccatggatccaaaggctcacatgcatttgaggtgttaaatccctctacgtatgagtgaggttttacatgatttccctttatgtgatcactcactttgatttgaggtgtcatatcccacacataggacaaagttttttcactatagctctaggttaattttttattacttgacctctcacagcgagtttgctaactggtttctagttgataaaaaaatatcattcttaaattattttatttttttgttatttttaaataattaattttgagggatgaaagagtaaatttctttctttttttgtttggaggcttgcatcaataataaagagaagtatattctgaaagaagaaaattgtatttgaattttgtaagttgttctaaaataatcaacaaaactagaatgattatttcaaaattaatattatttgtgcttaaaaagaacagtattaatattatttgtcctatgcatccagataaattgcttgagccagatggtttcaacccgagttttttccaaaattctcggtcgtggtgggacaagatgtagtgcggttggtgcaacatttcttcactttcggtacgtttcttaatttccttaaagatactcacataatgcttattcccaagaagtcaaaacttgaaaacatgttcgatttgaggcctatcgccttatgcaatgttatatacaagattatttccaaggttgtggctaataaactgaagattgtgttgccaaatgttatctttgagtctcaaagtgtgtttttacctgggcacctcattactggtaatattcttatttcctttgaaaacatgcactatttgaagaggaagaggaagagttcatgaaaggaagggttcgtggccttgaaaatggacatgagcaaggcctatgatagagttgaatggagtttcttgcaagctattttgaaaaagatgggtttagtgagcattggattatgctaatcatgaaatgtgttacttcggtctcatacactttttgtaatgactgcaaaaatttggatatggaatattaagtgctttggaaattaattaataataataagaagaatattattatcattggtagttatatgtgaatgttaatattaaatataaaaagtattatttttgtgattctagctcggtggcgatggaaaatacaacgaggtgttattctagtcacatcggtaaacatagaacctttagttttaatggattattgtatgttggacttgagtgttgtgtttaggtggggtaatggttttggaccatttgacccctaagccgctcattgatttacgttttgatgcaagggtaatgttgtcgagtgaatttcgcaacaccaaaatgtattatttaattaatataaaaagagaatttttagggaagtgacaagtgcgagtattcgaccta

SEQ ID NO: 163361 - DNA, 2438 bp, Cannabis sativa
  modified_base (298)..(321): a, c, t, g, unknown or other
ttttttttttaaaaataaattatagttatagtgtttgtgtaaataactggttattttatatgacaaaaaatgaaccacaattttatagttttttatggcatttttttttatctataataattttcccatattttaaagtattttttgaaaaaatgccatatttaatgcaattaagtttgcatgccatatttatcaaaactttaattcattttcccatatttttgtaaatagccctttaatattaatccaatgacttacaaaaaatgtaaccatgatggttataataaaaatgtaaccnnnnnnnnnnnnnnnnnnnnnnnntatatatatatataaataagaagtataaagcggtgacataacactctaaaattactctaaatacatctatttattttctctcctcaattctcttattattctaattttttattaaatttttaaatattctacaaaaatataaattaaaaatatatattttttattttctatacgctaaaacataattttctatttttaatttataataataataataataataataaatgaaaaaaattcctaaacgtgtatatatagatttttttttttttgaacaaaaggaattttattcaaaactgagcaatacaaacagtgtgaaaacaaaacaaaagctcaacgagccaactagagactgctaacaacacaacagtaaaaaaaaaaaaaagccactaccaagacctaattacattaattagatacatctcccttttctttagggtctacaagccatgctcaaaattctagtttgagcaaccttcctaacttccattctcaatttaagaggagaggtgcaagctaaatcgaaaatacacccattcctttttttttttttaaatcatgtaaattgcagcagctaaaaccgtatttattattcgattcttgaagtcaagggggcctcgattacaccactgctggacattacttatgtcaaccggccacttcacataacccaaccaactaccgatttcagcatagaatttcctggcgtaaacacaatcaaagaaaaggtgagaatgagtttcaatttcattcttgcaaatcggacagagatttgagaatatgctcaagaacttgcataaatggtctcgggtgaggagatgaacgttgcaaacctaccataagatgaatctatgttttgggataataagtttgttccaaacaacaccactgtgcttcacttcatgagcatctatatgaagttataaaaatgtttagcatgaaattaatttgcctcccttttcagcaaggaataaggatgtctcattagtactagatcgaagtttcaaaagccaagaagactccacacactatgctcctttgggtaaatagaatttatccacttcacccaaaggctatcttgcttactagcaatggcccaaaggaacttggccatcaaagatttatttcactttttaccctcacgaaacccaactcccccgaactttttaggaagacacaccttctcccaaaaagcaaggtggaatttggtctggttccctgagatcccccataaaaattctctataactcctatcaatggcagtggtaattttacttggaagagtaaagatactcatccaataattccaaacttcagggagaaccgaatgaatcaactaagcacgacccccaaacgagagattcctgctagcacaataatttagattcttgttaatcttatctagaatcactccacaatcttcagtcttctatttagttggtcgaagcttgacccctaggtatttgagaaggaaggagccctcctccatcttgacaagatccaagatctaagctttaatttcatctttgattccacaaaagtaaatgtgggacttagctttgttggcaaagagacccgttgcttggcaaaatctcaaaaaggcttaatttaagtggctgatcgagtttaggttccccttgcaaaatatgataagatcatctacaaaacactggttagtaagcttaagttgtttgcataaatggtgaaacccaaacccttttctcccggagaactgagctataagtcttgacgaagatgagaggggacatatgatccccttgacgaagactagggatgcacatttcccccacggggatgggccccgtggggacccgcccttaatggggcgggaattccctatctaaatggggaatggggcggggacggggattactttttatccccgaatgttaaacgggacagggacggggatcacactccccgtcccgacagggacccgtttagtattttatcttatatttttactaatattttatattttataatttatctttacattttttagtatattagtatttttttttatgaattttaagttctattttggataataattagtttattgaataataattaatatgtaatattttaatttt

SEQ ID NO: 163362 - DNA, 1158 bp, Cannabis sativa
tagtggaagaaaatagaaagttttgttaaaaatctttatatatatatgcactgtgcagtagtgtttgtaggaaattgggtgaaggtcctttcaaatttaaagctatatacaaaattacatatttaacactcttaccaaacatctctatccaaaaatataaatatttatttaaaataaattcaagtgtgaatcaaatctcaaatccatccatatatcttgtgatgattttaatttcttaatgtttattagtcatgtacaatgaatgtcatgccatgctcatgcatgtttgtacttatatatatacatatgaatatgaatattcacaatgcaataactagcttgtacacaaaatttgtacttaagaattttttttttttaaaaaaaatcatataaaaacaacaacaataataataatacctaatatagttgtggtccatatatatataaattaacaaacaagtttacgtgacgtaatgagctatatatgcttatctcttcactaagttgttatatatttttttatattaattattattaattaatcttattaagtatttatatggctgagaatctgcttatctatacgtcattggtaaacaatgaccacttctagatagatatgataattaatcaataattattttggtgctaatataattaaataattcaaactctacattgtttgttttggggttaatagaatattatgtgatcatcttttttaaatatctatatacaatatgctatttgttgtttttgttattgacaattctacaataagagagaaccaattgataatttatttttagtttagtttttagtgcacttcttttcataagaattaggcaaacatctcattacttcaaattattacatattaatagctatcaagattactattattttccattaataaaaaaaggattgataaatagtgaggagtgatgattacaatctcttattataattttttaattaatctttacgtccgaaattacatgttggaatatttttttttttaaattttgttttatagcaatatccgttaaagttacagtatatcattcttgtaaatttttgcaaaatttcgaatagtttacaatactgaatatatagagttcttgatattccagtttactacacgtgttcaaaaaactt

SEQ ID NO: 163363 - DNA, 1163 bp, Cannabis sativa
tgatgtaaaagttttagtatatatatttttgaattaaaagatatattacggtaaaactgattgtaatttttttaattaacgtacttttgaaaaaattcctaaaataaatattttatttttatattatataggttgggattgttctatcgtttgagagaaaatgaaaaaaaaaaaaaaaaaaaaattgagtttgacttagatattttttacctaaatatatttttgatatggtgtaaaaagagatatttttttataattttttttaattaagtagctaaattaagtataaaaactcaaatttatttttttattatccattgaatgagaatttaataatttaatattttttaaattatatttatagttaaatattttaataaccatcaagagcttttattttttttttatatatatataggaacgaaatgagtaatggtaagaaattaagacatagttttgcgatagagaaattccaagcaagaaaacatgtatcataactattttgagttcatcaatttagtcttttgctagacttaaactctttaaacacatcaaaattcaaccataaatgtattaatgacaagcctgctaaaaaaatgtgaataaaatatattttgtaatttgacccacatttacttagaaatacaatttttctattcaaatgttatataaaatagttttgagttatttagtcccatattggttggaagtagaaatttttcagtccaaaggctatacaaatatagctcaattatagtgataacttgtgagatcaaagaaaattattcaaccatataaggctaatcattactaaagagatcgaaataataaaaaattgtggctatatatatttactcatcctttcaattgatattaatctatgttgacactctcttcaatgtaaagataggttgaagcaatgatacattttactaatgtataattagatcaaaaaaagtgataaattttgttatgtaagtacattaataaattaatattatatgacaaggacattcataaacaaaaatataattcattaaatcactcatgaatttacgacgctcgagtccgccaccggcgctggaacctcctcgaactaggagagcttatcgtctaaccgcagagcatgctttgccaatcataggccgctaaaatcttagagc

SEQ ID NO: 163364 - DNA, 2692 bp, Cannabis sativa
  modified_base (2069)..(2069): a, c, t, g, unknown or other
tgaaaatatgaaaaaattggatgtaactaaaactgggaaacattattctggattccccaatagtgcattcataaggaaaggtgaggtaggagattgggtgaactatttaacacccgaaatggctgagcgtgggaagaagcttattcaagaaaagtttgcacaatccggtttatcgtttgatttctaacttgtttgttttcattgtctaaggatgtaatatttatgatttgcctaagtcatttccttttcatccaataagttacttatttattgttggtgatacgtatatcttcttatgaagagatgtcagttgttttctttgtcttaagattgttgtaatttcgtttttttccattgtcttaataaaattattacaatctttgtttgtttccgttaaataaagggatatttgtgtcattagttcctatattaatgaaattgtacgaattctgttttaatgtcttaaattttataactacacatggtttttgaatttattgaaagattttgaaatgaactgatcctatatatgtacctttttatccaaacccattaatgatttaaaatttaggaacaaaactgaatagaaatttgacatggggcacattacaattatagtatcctttcaaacacaatttgtagcaagagatgatgatattctgttaattagcttcttgcccaaaattagacactactttctattgtaaaatgtaatgatgaaaataataacaaccatttgtttactgtcaattcacactatcttgttcatttgcttgaggttgagtcttcattacttgttgaaattgttgagtgtataactaaagtcccacattagctagaaataaaaaaaagattataggtatataaggatgaacaatatttccattagtttaaagccaaatatcatattaatgtggagatagataatgtccaactaaaaatttattgtatgtattccttcttattggcatgttaatgataactttttgggagataacactatattaagtcgcttagaagttagaagagtcctttaatgttttgtaatgaaattgtggcggaccatttttgggagataaggctgccttatcttagggcttaccctattctctctacttttagatcaaaaaatcatctaataacaaactattagacaattcatacaacttagtatattgtgtgcctgttatttttacatcaaaaattttcttgtttagtcaaaaaatgttgtattttaggactacattttgcgattttataaagcaagcttagaaatgtcccaaaagatattattttcaaaatacaaaaccttaaaaaagacaattttttttttcatcaagagattgtagaatttttggggcttccatcttccacttaacaaaaaattgaagagttccatgagaaatacaacatttttatgtagattgtagaatttttggagctctcattttctactaaacaagaaaatttttgatgtaaaaatgacaggcacacaatatactaagttgtataaaatgtctaatagtttgttattaaatgattttttgacctaaaagtagcgagaacagagtaagccctaagataagacagtgtaggcccatgcttagggcagcgtaaagtcacaaacgttcgctgattaaattaattataaaattaaataattcatgacaatcattgagtaattccagtatggtgacattccatcatatttgactttccaaatatgttgagcattaaatcataattagatattataattgtggtgatttaaataaattaatatgatgttaagaagaatattttaattttaaaaaaatagttgtagcagaattgtagaaaagaactgagctgagtattttgtaaaattctaaattttaaagtgctgcgagttattaagattctataataataatattaatattttaatctatttcattaaaatcataaatatgtatatacaaaaaatatgttatatatataaaaaaattctatatatctttaatattttttttctatagtataaatttatatgcatttgataaaaataatttttaatattattaaattanatttttatcaattgtaaaaaaaatgtagtttataagaaacttaggttgatattgtttgttaataataaaaatataaaaataaatataaaatattttttaaaacaaaataaaaaattagaaatttaaatattatttattttaaatattttttcctttaaaaaaatatttttgttttttgtaatataataaataattaaataaatctttagtaaaaaataatttattatagtcttttaatcaaaacaattttttcgaaaagttgggttgtaccaactttaggttttagctatagctattccataacttttttaataagttgctttttaactgttaaccaaatgcatttttgtcacaatttatttgaataaaatgagcttttattttttaaaaaaaactgtgacccttaatattgtaattgtagtgaaaataatttttcacaccaaatttaatatatatagggacacgattttgtcccgtgatgtactttcacggaatgcattacgtggtacattagatgggtctcaagtacgttaccattttttaaccgtaattactcctagatcaaccccagccctcagatcaaataactctccccatctaacggttgtcgtacatcacggaat

SEQ ID NO: 163365 - DNA, 1589 bp, Cannabis sativa
  modified_base (1543)..(1550): a, c, t, g, unknown or other
tttaaaaaaatactattttttactttaaataagagcttaaaaatattattttttttataacccattaaatttcaaagccgatcccgtgtacataaggtcagccctaaatataggtgggctaagctcgcgcttaaggtccactcattttaggagcctaaataaaaaaaaataccttttaaaaaatatacatataatttttataatttttaaaaatagtatttctttttatagtaaaagtccaaattttttttttttttgtttatggtccatttcaactcaggagccctgcgtgtacatccataatcttttataatttaatgattttattttctataattaattactaccatcagtttaataatcaatgtatatatacaatcatttttactatatatttatttattttttctaaaaagcactatatatatagtatatagtatctaccattgaatggtactattatatatcctacgtatttgattatgttcaggtacgtgtaccacgtcatttacataatattaatcagtcttatttcaattgctacattaattgcaagtttaatatatatttgactttataagtcatttaaaagagtgaaaatcgacataaaccaatatttttaagcaacaaaacaaattgcattttccttctcggtattttgattaataatataaaggggcattaatttaaatcgaataatatattattaggataataaaacgttggtttattaaattgaatatgaataaataaacggttgttgtctttctgagctgagcgatgagcataacgtgaaacacaaatcttcaaagtctgtcgagagtaagcaatatacaacacagtttaataaataatatatattatgataatatataattaatttatatatgattagtcattactcattatatataggcatctacttcaacatataaatagaatatgaatatataatattagatcgagtactaaatttgaatattaattaattatcaaatatatatactttaactaacaacatatacactttaataatgagttgttctcattattatatataattatagttattaattgggatcatgatatttatatatatgtgccttcagctgaagtttatattacaattatatatattaagtataaagaaaactatgttttatcctttatgatcaagtggcagtgaacagcttcatttaaaacatggtgatgatatttgttgtatctttggattgaagaaagcaataaggttaatcggaattttatatttctatattgatatatcaattaataacctgtataaagttgtcataaaggggaataattagcaaacattgaaatatatacatgttaaccttgcaaataaataaataaataaagaaagaaacatacatgtacatgttaaaaatacttgattttgttaaaagtaaataaataataataatgaaagggcaaaagtgtaaatacacaaaaagtataataaacatgggaaattttatttacaccccaaaaatttataagtacaccccattttaataatttnnnnnnnntataaaatttatatctttaattttactaagtatttttaa

SEQ ID NO: 163366 - DNA, 962 bp, Cannabis sativa
  modified_base (934)..(936): a, c, t, g, unknown or other
attcttgagcaagaaagttgattttagggtcttcctacccagggcctaaagaagcaaaaattgaagcaacagcttcgagatcacttccctaggaagagaacaggtcagagaaataggatgtgattaggcctacaattccttcctgagtgttgataatatcccctcatcattcttgaggtattttatgtggttagattttctacgggatgaggcatgtttgtgaaatttttttgtattcctatccaccgcatgaagctagcggactctagccctttgcttccaatagatttcttctttgtacagcatggcttctaacctagagtgtaactgagtgagtttagaatcatcgtccctagtgagtacatccttattttgaatatgattaatatcctgcataaggtgttggatcctagattagaacaagcgattattgtgtttattccaagccttaagagaggaaatacaatgagcttgtttagcaaggaaactatgaaagccactgctggtagaacgagtgtcatgccactctttccaagcagtgtccacaagggtgtagaaatagtgtccttaagccaactattttcaaacctaaatcttctatgagtgcttagggggttagttttggtgctttctaagacaactttgaggacacggtgatctgaaccataaaaccctaagtgatgcaaggaattatcagggtaaagatcacaccaggaatcagagaccacaacccaatctagcctttctctaaccgttttattagtccaagtatatttgttaccaagaaaagggagaggaaacatggaaaagtcctgaagaaatttgttaaaacatgccatagaaacctgatcaggggaactgcccccaattttatcagtgttaaaaatatagctattgaaatctccaatgattaatctgttgggttttatgcccnnnataaaactctttacaatctgattagt

SEQ ID NO: 163367 - DNA, 1165 bp, Cannabis sativa
attaattattgtttaattattcttcatatataattaatatgcatgaataaatatatatatatatataaatatatatacatatattagaatgtgaatttaatcaaaattgtgtttagtaaggaatatagactagtttcatataacatacaattattattataatatatgtacattacatgaatcgaatatatatctttggttaattaaactatatgtacgtacgtatagcatgataacttataattgggtgaattaataatcacatttaattaaaatctcttaggacgtacgatagttataattaaaaatagcttggctttcagagcagagtactatatatagattcgctttgtatgcttgatattaagcataaagtttatactaataaaaagcagtcaaaattaatgaaaaataattcaaattgataactaatactaataataatatattagataataaattgtgtttgggatttgttgaattattgttgtctttttctctaaaaagagaaaaccactctcttaaatttgttgaattttctattatatatatccccttatacatttattggctacaacaacatgtgcacttcaatttttagatttaaaccattttataatattaggtaatgaattaattaaaaaaaatcaattaaaaagttatcatatatttagattagaccttgaataaatagatgaaaggtacatatatataaactataatccaaactttttggctattaattttttggttgttaattgttaatatatcaaatttttattagaacaaaaaaaacaaaaaaaaaaactctaagaacaaatttttaggataaatgctcattagtatatcagattatatttgatatatcaaaacacaaaattagtgtacctcggagaggggagttacaaaactcaaaataaagttttcggaaacgatggtctagtaattgatgactaaggccggtcctgagattgagtgagcgggagaaaaaaaaaagaggaaattgcgtgggggtacccactttaagttaatcattttaatttttaccctctttttaataattcattttttctacccacttttgtagttaatgttcctataataccctttcttcaacccaaaacaaagacttaattttcaatctttaatgttaatgtgggggtat

SEQ ID NO: 163368 - DNA, 2434 bp, Cannabis sativa
ttgaagtgtaaaaataaaaaaaatggtccttatgcatgattaatatgtatatatataaatgtatctgcccataaatattaattatctaattaattattgtacatttacacatgatgatgagtataaattagtttattattactttcatcaccttattacaaattaaaatctattgatcgatgggtaggaaagacattgagtgatcatgttgaagggattggtggtcgtgatgatgatctgaaacaaacttattattactagtactagtagaataaaccatagaactgatcatctcgtcattccaacccatatccatatcattaataataatgcctccaccagcagcagttttttctttaacactgctacccctactgtcctcctgatcaacatacaagaactccagcccatctggaaccggagcatcttgattagggatattatcataaataccacttattataactgcctgatcctcatcctgaacctgtagctgatcatgatgagagctactactgctttgtcctttctccaacatctgctgtgggtcaaacccatagccggcatctgtaatattatacgaaagagaaacttggggcggcggcggcggcgacagttgaggtgtcggttttgatagtagcggcggagcagaagaaggaagatgaagtaataatgggtgatgatcagtgtgagtagtgttattatagaaatcacgatgatgatctgggaatctcccttcgagattggtgagcaactttcttatagatgatgagtggtcgttgtaattattagagggttgaccagcgccgtttgatgagtaggttgggggagtcagaacaggtagctctggccagtaagttttttggctgctattattaatattattattagtattattattaattacagttgtactataaccagcttctggaacaaccgtattattattattattggaataataatggggtatgcctctagtactaataatattactattagaagtagaagtagtccctgatcttttaatattttcgggcttcggctgtttagtactcagagccttattacgaggatggtccttacgttgcttattaccaagaagctttttcttcagccttgtgttccaatagttctttatatcattgtcagttcttcctggtaattgtgcagcgattatagaccacctgttgttaattaataataatattaagtaaataataaaaaacaaagcttaataatatttataatcaagcgatgatactatagctaattcatatttatatataatcattttattaaaagggaaattttttatttgagattgttctcaaatgtttatacgtagaagctacctagggtatacgtacctgcttccaatacttatataaaggctgcaaattatgttgtcttcttcttctgagaaccctccgtgctttatgtttggccggagatagttcaaccatctaagacgacagctcttcccacacctcttaagacctaattaataatattaatcacatatatatgatcaaacaacttaatcagcaatgaacatgaagagatcaaattcatgaagtgaattaaggattaacttttaaattattatgaatgaaatcattcataccaatcttctgtggcaaagcgatccaattaccgccggtgccatggttttcgatgtaggacttgagcttcgcatcttcttcaaccgaccaaggtcctttcttcacattggctttgtcgcagcaaggagctctccccattttttttttttttgtttttttagtttctagcttgaggggttattttggtttgagcttaataattaattgtggtggttctttgcttctctggccctataagatagaacaagaattgtgacagagagagaaagagagatggagataattattatataataattaggaaaagtgataatgataaacatatggtttcatgaggaatagcaataaagaatttaaaagagaagggtgtgaaattgtaagaaagtgactgcgtgcatattttaataataatacaaatatataaattaattaatatttgaagaaaatgagtgtgccagtacataggagagtgccacaacaaggattttcttcttgtccttttcactgtagaatcaatataactatattattttcttggaaccctaagtccaattatacataacccccttattatctagtggggcataataatattaacaatataaatatttattctatataaaatgtggctatatcacagaattcttactttatgagaaattattgggtgattttttttttaaaaaaaataaaaaaaaaataacaaattattagaggttgccacgcaaagagtcagtatttttttttattaaaaattattttcaaattttaatatttaaaattagtaaaattttaaatattattttaaa

SEQ ID NO: 163369 - DNA, 1538 bp, Cannabis sativa
  modified_base (1484)..(1499): a, c, t, g, unknown or other
aacagacttaactgtcttcaacataataagtttatttttagatttataagtgtttttaatatgtattatgtattcataaattaattgggcatactcttaagataaacaaataacttgtttcgttagtaaatattattagttcttttaaaatattttgtaaaacattatgattgttctcaataaacaaaattttcattgcttaaaagaataatacatcatttttatttgtaatatttttttaaaaaaaattaataacaacaaatttatttcttttataatttttgttgttctcttggagctgccaacatataattgatttgtcatcaatagaagagctaaaaataatgtcattgaaacagataatcttgtggcaattcaatcaatatttagttctgcaaaattattatttaccttttgtttagtgatataagattattgtaaggggttgtttggatgtttgagaagtgttaatttaatatttgttaaacagtctactaactgagatacgcatattatataatttaacaatcttaattgtttgttaatcatatatttacgggggagtatgctcttttaaaccttttatctattcttttgaacgattgctttaagtattaagtaataaagtttacttttcattcaaaaaatatatataatgtccattgataagtaatttaatttggtatggacaccaaattgataacaaactcattatttttcttaaatgctgaaatcaaataatgtaattgatatatcacctcttttttaattgctagaaagttatgggctaccggaatcattttaggctcataattgagaaggaaaaacatatttaacaattaatgtaccatagatgaaatgaaagattattccaaatatcattcataaaaattactctcaagttatatgctttcaaaattaaatcaacacatccaaaactagcaaattatatttcagtttcatcaaacttgtgtttacttcttcacgagtgttttttccagttgttttcaatatttatcccaatcatcaaattgaggtctccattcaatttttagagaagaagaagatctgtgattacatgattgagtaatcattacttttaaaattgcatatccgagtatccattttcttaataaaagtagcacattatgtaaaagacaagtaaaagcagaatgccatttttccttttctttttcaaatattggtagaacttaaaagtaggtttctagtttatgctccaagagttaggtcccttgtgaaccattaggtgcaaaaaaaaagaaaaaattagtatatttttttctcataatttgagattgatgttttattttattacactttggtatactctaatgtaaactccttcaaatctccactgaatatacatataaataaggaaaaattatcattatattctaaggtctttttgatttatttttatttgtttcagtttaaaaagaaaatatgggtaaataccattttgnnnnnnnnnnnnnnnnaaagttactaattggaccctgtgttttgttaaatgacaa

SEQ ID NO: 163370 - DNA, 6048 bp, Cannabis sativa
tatggcggccagcctcccctcttcgttaaccttgctactttcatagcttctgttatgaatctaattatataggcttcgagaggctctcttggtctttgtttcacgtcgaccaggtcttgtaaatgtaacgaaagtttgcgagaagaagagaaatgtacatggaactccgaggagaaagctttccatgaattaagccttcctggtggtaacttaaaataccattgatgtgcggctactgagagtgtaccagggcatactctacatcgcacatcacctcataccccttgtagatccatttgcatttcaaaatatttaagatgtgacaagggatcctccttccctgtgtacatcttccaggtcggcattttgaacttgaggggtagcttcaggacattgatctcgggagtgaagggtgatccgcatgctcagtccaactcaagattagtgagtttttgaccggctaggccttggaacatatttttttaattcatctaactatgcttgcacagatggtgaactagttcagcctcttggccgacttgcgtcacatcaggatctcttagagttgggtcttggatgcagatactgggctgagcggctggttgaacatattgtcgtccaaacccctccttctattcaaatcatccctgagatcattggctgtacccagtctgttgaatactgagagaccaggttggctcagtgattggttggtttggcgggtctgttggccaaaactgtcagtttggatggagttattaggtataactccacctaaagaattctcggataaggtctggctgcctaccacttggcccacaggtggaacgtgtgaccggggattggacgactaaccattatgagtttgggtggtatgcccagcaggaaattcttctgtgctgcacagtgggacattggacgtagcaactggttgctaattagcaacttgataggctttccatatcagtacggtggcctgtcttattcggccatcgatggctgcctattgagccttcaatatttccatctccctatccatccactcaatgaactgacgcttctgctcttcaaacgcaaggttcattgcagcatggagctcttcttgatcatgatgcaaagtattagagtgaccttgcatgagtccaagggcattacggaagttctgaatctcattatcatctccaattattgtttgagcattggttgtggatgggatttagtgctggtagtgctctaattggctgccaaactgatgttcccagtctcttgcacaccgggtgtgatcctagccagaggggatgtcacacctttgcctacagtaggtggctgcgtgtctattttccctggattggttcttggtgggaccttgtatttccaggagtctacaatgtaggatctattaacagtgggtcactctggtcaaccacgcctctgcgagtttgtaccaccattctgtgtgtctgataaaacttaaggcaaagagcaaacttagatttttgctctctatgaaagcaccaaaatgttgacctcgcttttagccaatgacagtgagtcaattaataagcgattaataaatgtaattaagacggagcaaaaatcaatacgcaataaagaacacaggattttaaagaggttcggccccttgggttcagtaataacctactccccttagattgtattgacttgagaacaaagaatgcagtgttccctctctcaaagctctcacaatggaatctctgagtgtttactcttagatctctctgatgcaattctttcgatccttttctcagtgaagctagatcactatttatagggctaaatgcatatgagggaaggtatccttttgcttacaatatctataataagtaagaacatacattatatatttagaatacatgaaatgagggattcggacaacttgccatatgcctttgatacgatcaatgctgaagtagctaagtcttgatgcacggctcagagaaatgacttcatttcttgttcagatcatctgctcttgctctgctcggtcaagcaaactttgtgcgtgcagaagtattactcgaagtctgtttagaacatttcgcagaaggaataacagacacgtgccactagtacatattcccacgtcgtggtgcgaaaaatgggataacaagaagaatctcaagtaattacaaaatcgaattgacttatacaaataaagactcccattttgaaattttcacaattgttgtagtctatactcctaatcaaattttgaaagtgtcgagatctcaaactcccttcaaatcgtagcacttccactcttccttccaaaaagtaactcacttgcacttttcctaccaaaatgtatctcacgaatgagtcttctcctgaagctcgatgatcaatatccaatgtgttcaacttgcacatttcaataagaaacaatacagaaataagcagtaatatacaatactaagaacttgttggaattaagttcttcaaacaacaaaaaaattctctctaaacttgaaagtaatttagaatttgatataccaagagggttaatcaaaaccaacgatctaagggcgtctttatacaatttagaaaccctttacgtcgtagaagatgaatcatgaagcaaacaactattaaatggaaaattttctcaaagaggaaactcaaattttgttctaataagttgttaatttattcaaatagatacattgaacatggacaattcttttagaaaaattgtcttatataaataaaaaaacatgataaacaataaacatccaacatgtacacgatttcttcaagaaatcagatcaaatacaaacaatgaatattgatttttttccttaaatataaaaagtaaaataataataattttaaataaagaaactccaaattcattcaatcaaaatcaattacaatctcatttcaaaacttttttcacacacaaaaatagaaaaataattttagaaaataataattaaaaaatataaacaatttcgaaaatacgattagcattatttttatctattaataaatgattttacaataactgtatttatctgattatcaataaaacagatatattcacttcttcattgtgttttaaactcatataattgcttattctgccgtctcatataaatttgccaatgtttatgtataaatatatttatttatatattgaagaggcactaattattatctgatgtgttgtcatgattatatattgatattaccaataaaatatatttgtttgaactagtacatcacctagtagtataagtagtagtagtacaataacctaattattgtctgccatgattgagagaagctaatgacattattcataagagaatagctaattaaaaagtatagtttgcacccaacaagtgttggtgggtgtgaatattgcttttttggtcttatatatttttaataattaatataaatttttaattttataattaatacgagataataaaattggctaaccatttctatattcatcactcatttgcatattatagagcttccctccttcctactcctacttcgattatggtggaagcctggtgtcctcaccctcgtgattagattaaactgaattgcaacttaaaagttgatttaaaaagcatgaatattgcggtagtagctagaaacacataaacgcgtggtggcttgggtaagcacgaccaaattggatttttttgatgccctttgtggagaaatggctgcgtgttgttcggtcctagataaggccaaggaaaaatgattcaggttcattcttgtggagtgcgactcaagggtagtgatcaattctctcaatggcaaggagactcgatgggaagttgagaattactctgcattttgtaatagtatttctccttattttgtgggttgtttattttcatgtattggtcgatcatgtaattttgttgtccataatgtggcaaagtgggtctttacccacaatcagtatggttgcttatctgtattctctatcccgataaatattttgtgtaatgaccgcgagatctaactttttatctatccacgaactattttctttaaaaaaaaaaacatttctaaacggtgaattagtatattggataacttatagtgcgtaacttatagtgcgtagctagcaatggtgatctattaaaagaattttaattactgatagcaattgcaatcactttccattccatgtagagatgtatcccttctcgatttgggttttctcgaaagaagatcagttcgttatgatgatacgaatcaatgtggggatatcctttttgactggaatattttttctttgtgaggaactggtttaccacttatgtaaagctttatgtgaacccccatatatttgttattatatgatcccccatgactcaacttagtacggagaacttttatatttttttttattatttttcttttaattctattcaaattttagcatatacctagtactataattaaattaattataattgcctgtgcacgttgcgaaagagaccgttaaaacaccacccacctctagctatactcatcataaagagtactaataacttgtactgactttctctaaaatatatatctagaatcaagtgtagacatgatatatctctatattatttttctttcatgaatttgacatgtatatatagtttgttagattagtttatacgtatatatagctgacttagaactcaataattatattattattaaagcattcgcatggataaccaaaaggattaggaggtcatttcaataaaagatcaactggtattaaatttatctcaattaggccagctgtattagttgccgaaacccacttagctacaagataggctattgaattacacacataagaaacccactcaaaagaataacccttatgattagaacgaaatgtaacacatgacttaacaaaactagaaatatcccacctagctgaagtttaccaagttaagcataaatcatagtgagggagtcatactcaatccacaacaaaatccttcgagaaggctgtgaccatctctaacacatgttcacaggcagcgacttcgcctagtgtaacgtgcgtgccaagatggcacgttacaagctaagtgatgcccacaagttagccaagtggtggtcaaatggtggcgcatgttgaggtgcatgctggtagcatgatgatgtttagtttgtacggcagtgacatttttgtaaatatcttcaatattgcccggattgggatgggacttagtattcactatttatttgggtctacgaatacaatggtgcaattggatttgagaaactctgtggtttggtatatggtctggccatatgtctacagagccaaaatcatatatgttcccggtagaaggctaaaagctcagaattctctttaaggggggacctggtgtcagctctccaccagcccctgacaccttggtgctaagtgagctactactagtcagcgggactagtagggcaggcatatgaggaccacgaggggactcgtatgtctccatgagttggattactcatggacattatcaggccgacccggtagtgcgtctaagaagctgccggaggttaatggatacgtttccattgacttgccggtatgccgcttgcacggaacgtggatcaaacttccaagagacgttgtggtgcgtcttggccacgagtctcaacacgagatgacacaggtagtcattcgtgggctagttagcatacgtgcatgggacggatgcaccatgttggaaatggacaaaggtctaatgtatgcaactagtttggcaacttgtctcgagggcttgccaacatgcgtggaggcatggcaccttgaggattggtccatagatgtatgggggtcgttgggcgacgagggagaatgttcagacagtatcgaatggggcatgatagaagcattgacacatgagcttggtgttggcacactactacaaaagtgagttttcccaacgatttataactgtcttttatactatttctcaacggtttttaaaaccgttggctatgtgggtg

SEQ ID NO: 163371 - DNA, 1591 bp, Cannabis sativa
cttgtacatatttttgtactttttagtatatgtgtacgttttcataaaaaagaaaagtatataattttttgaaaagtatacatgtaagttgtcttctggtagtacttgcctgctcaaattgtgtatcattcatccttagatatgacaattccactacaatagaaggacaattctctgtctctctgtattttgggtggtgaaaatgagtttataacaataagattacagttaaatgattttttttttttttttgataaatcttaatgtttacgaggcacccaaatgaattagacgaaaacttaattaaaccatatttatgtaatagtactatccatttcatctaattaaaccttaatataaatctaaattaatatttaatcgatcaatttatagcttttaaaaacacattaaaaaatgaatgtactaaaaataccagtctgttatgtgtgaagttttatattgtttttatttaatacatagattaagttaataaacttgtctcgtgttcaataaagaagaatatttgaaaaaagaaaaaaaaaatgatgagaaatgcaataatttcccacgtggaaaggacgtagtggtagtaaatagtaacttgtaatggatattactaattaatttttgctatttgttgtttatattactaagaagatttgtaataaactttttttcctaaagaaggaaatcgtgaccagattttttcttttcaaaggaaaaaaaagaaaaaagaaaagaaaaggtcacgattatagaaagtggtagaattatccaatatagagaccacgcttgcactaacctaaatccttttgtaaagtgatcggagggccacggttaattggacctttccagtggacaaaatcaacggcttgcatccacaagtggttatcatctcatgtccactacaaaaatctaatcacatcagtccaacgaaccacagctatccgcgtgtcaagctcacgatcattagagaagtaggcccaccgtaagagagtttttcatcgtatcagctcgtaactcgttcaaagaataagacttaggggagggacccaccggaaaacgtgatctatatccattagacacgtgtcctagcccggcgacgagagatagaacggggctccagataatacgacaaatatttaatgcccacatttggaatttaaaatttctttttatttgtgataataaaataaaaaattaatgattttattttcattcaatgtaacgaaaagcttcttttcatttttgtttttatttttttaatttttctattcccaacccccaggctctgacaaaaaacatgccgtcacgcgcttttcgctagctgacaaaacacgtgtcgttcacaatggcaatttcgtcgtttagtggagtgtccgggggtgttttgggaaattcggagccagagtttggcaaaagagccgagacggaaccccgtttgtcgtcacgtgccttggcgtcggccgcacgcaggaaactcttgtctccttttattgttatctatttatttatttatttatatttatttatttataaataatttatagtatgaatatttaaatttaactattaattttaaaaaaatatt

SEQ ID NO: 163372 - DNA, 1740 bp, Cannabis sativa
ttaagtgtggtcaatttgtgaccccaaaacaaaaataaagggtgtcatgatttaatgattcctgggttactaactaataaattttatttagaaaataatttaaagaaaaaaggatggtggtgtgttggtgttggttggatagggagcacttggtattataggtctataaggaaattttaagagtcaagattgtcccaagtatttggtcattgtgacaaagaacattgaccctctctacttagcataggaaaatcaatatggtaaaaagattaccatgagtttcccactttgcttaattaagcaatgattaacaggtggcacgcgccgtaaacttaatttctaagcacagtggctgttttattgtgatgctgaaaggtttgaaatttttgggccatctttgtttgacaaacgcaacgcaagtgttagcagcaatagcattaacatcgtttctttactactagtatttaatctgttgatttggttaaaaaagaaaatgaaattacatcacaattacgaaagcaagccactttgcttgtgcctcttcattcgtaagacttttcctcattttgtaatatgactgtttatctatctacatcaatatttagtcttagatttgggtccactcagttcatagattaacctatctctgtctgctacgtttaatttatttattaaaaaatatagtaaggctatgattttccttcacgttacatattttgtgtctaatctatgttgaaccagaacatgtttggttagaaattaggatacctgaactgtgctaaatctattcagcaaaagaaaaagaaaaaaaaaaagaactgtgctaaatctgtggagtcagttgggctttctttcatatagaatatgaattgacctggattgtatcaaaacaccatgtacaactttattacacagtgatttttttttgtctttcagtgaactggttttgaattactaactgtgcctaaacattttttcttaggtaaccatgtttgtcatctatgaattgatcagatcaagcttctcattttaataccagcaaaaaaaaccttctcatttttattcctttcacttttaggttaatagcaaaaaatcttctttcaagtttacaacagtcttagattccttaacaatttactaatgggcttcccgtaaatatacccaacactgtaaatgatgggtcataattatatgggctgctaaataagaagaaatccattagcgtggtctttagccagccagcccaactccactcgattttatttattttaaagttttcaatattaaaaaaatgtttttaagaaagtttcatttataacatcctaaaattaaaaagtgaaaaatttacaaattatatcagttttcatacaaagagttcaaaaatatgaactttcttttttcaaaaatgttatttcttgagaaattaaaaaaatacaaatataaataaaaaatttacggtataaatataagtctattttaattttatacacttatattgttttcaacaaataaaaaaagtaaatcccccttattttttgaaaaaaaaaaaactagaaagtagtttcagaaaatgtattttctttttccaaaacttaataaaaaacctaatagaaacctaaaaaacataatttaaataaaataagataaaagcttaaataaaaaaagtgtaaatattattttagaccctgtgtttttgcaaaagttatcaattagaccccctgttttgttaaatgacaaaat

SEQ ID NO: 163373 - DNA, 1594 bp, Cannabis sativa
tatatgtgtatatacatagttgtgtgtttgtgtgtgaatttaagcatagatttagcatttattgtacgtttagagaggcaattttctaagttaaatgtgttagatatttatatcatatatagaaagggcaaaaaagactgtcacgcggttcacaaagcttttttgtctctctagcagtagtactacaaattattatcattattattggctatattataaatttatagatatacatacataaacataaatataaatatgtatgtatagagttcaataagaggttgctttcctagctgtgtcaaactactactgctggtactaataatcaagccccaaattttgtgtcgtttataccacccttaaaccccacgttacagtacaaatatagaaaccctagctacttttttcgtattattttagcttattagctatagcacctctggtagtaaattaatatatatatatagatcatgaatatattttatttattgtaattacgtagtggtaagaaattataataagaaaaaactaaatagatagagatatatatgggattggaattggaaatacctaatatggaaagtgttaaaggaaaaactaaaagagtggtcggtgttttaaggagagagagtaaaaggttaagctcaacccagaaagggaaacccaaaggagtagttttgtctctgtgaatcatgaaagcgatctaacattgtacacttacactatatataataataaatatatataaatacttacacgtatctatactacctacatgcatatttatatatacacacaacaacaacattaattaataatataatatgtattattaatactagctagctacctccaagccaatatttccatctccacagtcaagtctcactcgtagtcttagtcacacacagaaaaagagatatataaaaaaatgaatactctttttcaattttcttgtgtaatattatcgatctatatttgttcatcaattatatatattgaataataataaaagtaaaaaaaaaaaaagaaaagaaaaagaaaatagagaaagaaacataaacaagattattcccaaccgttgaagcaatcccatatatggaaaactccatcatcatctctaaaagtccaaaaaatttgtgtttcaaggcaaagagagagagagagtaatattattttgcctatactctactttatactttaccttttgttttttcttcttattattctccaatcaatttctttttgtttttctaaggatttttttttttttttgtattttatccttttcaaaaatttattattatttttggtctgaatagtctgttttactacgtacactgttataccacgtttttttgggggttcgataataattatttttatttattgttttgaatttttacaggtaaagtaaggtacgatggtattagattgagatctgtttggtctgaggttttggcagtgttttcctcaaagaaaaaggatctagtgagagcggctttaacctgctacaacacagacttactttgttccctttttggaatattattataaattattttattttattttacaatcctaaaaatacaca

SEQ ID NO: 163374 - DNA, 793 bp, Cannabis sativa
tatatattaaatggttttggtagcttattgatgttaacatgtgtattcagatgtggcaagtaccctgatcttggaatcttagagactaccacctctgtgtctctcattactggaatagccccagccaaggcgtacgtacacacatataaatattagatacaaaagattaatatagaaaagaaaatataaatttaattatatttgtgtttaattgcagttactatgtggactcagagatgagctatggagctgaaaatgatggctgcaactgtggttctagctgcaaatgtggctcagactgcaagtgcggtaaatgatctatcagtggataaagagcccaaacccccggaaaaaaggccatataattatatatatgaaataagagaataataatataattaaatattatatcataatgattggaaaagtgtgtagtgaaaatcaaatgttcgggtaatgaatgttttagagtgctgtactccagaagtactgaataatatttgaatggttttaattaatgtgagtaaaggcatgtgtcatgcaaagttgtacaagcttcatttcctagtaagttaggatttgtgggtttgtaaatatatgtatgtatatcatggccactcatgtataccgtgttactcttttcaaatctttatacatggtttatgttccttttatgctttatgatctatatatattattaagataagtgtcatacgctactactataaaaaaaaaaaatatatatatatatatacctataaaataaaataaaattatattttaaatattatga

SEQ ID NO: 163375 - DNA, 1935 bp, Cannabis sativa
  modified_base (1897)..(1899): a, c, t, g, unknown or other
taatcaatgattttatcagatatagtaaagaatgaagggggaagaaggacatcttccagcaactcctcaagatattctttagctccgatactaccattgtccatgaacgacctacgtggacaaatgatattgcccattaacttaagagggtctgggctgtttgtagaacttgaaccttcaccattttgaggacttgtgtaagttgcaaatagatgaaggagtaagagagaattattacccggagcactctctaaatctggatcaattatgcatcatcgtattataagctctacatcacctaagatttcaaggggacgcatgttttagtgttgaatatacatagtacaaagtttttttttttttttactttgataatgacaacaaacataacatttttcccattataaaggtatttatattgtccagttgattttgtgtaatatttcaatattaaatttgttatatatatactggaatttaggataggacaaagatagttaatattataatccaatgctgaccttgggaaggaaaatagtgttacacatttgttctaccaataaaaataattaaaaataggaaaggtttcaattttctttcaagagtacactataaataatatcatatttcaaagtaattgaacatagccatatgggaagttgttataatgctataataatgaaacattgatataataaactaattccattctttttatgtggaatgtaattgattaagtgaaacattaaatataagattggttcatattataaatacttatttttattaacactatttttgttattaaaaagaccattggaaagtttgtcaacaatgtatatgattaaccccaacgaaaatgatgttagtacttaactaaaataggaatttatttaaccaatttgaaatctacatagagggtaatatttgctagtgagaagccacttaaaaataaaatccttatgatatatgtgtgtgcaaggtagctttgtagatttaaaattgtcatcaacattctcaaaacaaattgaacatacaatacaaccatcttttatgtccccattttccaaactctcaatcgactctttagtagctggaacgaaattaattggggcatcatctacaccatattcatcttgagcttcaccatcattatccggaatatcatgataaccaatagcggttgtgtacacatcaatagcgaaattacaatctgtatcaacccaattcatctaacaatacttaatgattatatttgatatattaaagaatgaaggagggagaaggacagatcgaagcaactcgcgcagtttatctgtagctacagtaccgtcattatccattaacatcttacgattgaaagagacactaccccaaatcttgacaccattgttgtcatcattcattgacatgttgtgaagactatcttctttgtaagttgtagttagaaaaacacaacgatcgggttctctatataaagtcggattaagttgccaaggttcaatttcaagatctacatcaccgataattttcataggaatcggatcgttaaatggaaatggaagcatatgtataactgtaaagaattttaaaacaatgatgtgaggtgtacacaagtcatcttaaatatttataatgtcaatttttctctatgataatatttaattttttttttcaccaataataaataatttggtgtaattacttttaatttttttaaaaaaaattaaacatttaaacaagttgttggacaaacttggttttaattgtatataatattaaattaaaaaaattacattgggaaggaattttcaatgaataatctaaataaatgattgaaatattttactttgggaagatagatagggtccagggccggcccaagcattgggcagcnnnggccattgcacaaggcccccatttttctaaggccca

SEQ ID NO: 163376 - DNA, 4543 bp, Cannabis sativa
tatccattatatttcttgtaatttgaaaatataaagtatgagtcgtgtaatacatatattaatttctctctttgggatttatattaattatatatgttaaatagaatttactcacgggcctaaagctgactaaactagctagggagcaataatacccttccatttttatatacattttttctttttttattcttaattcctttgtttctttctataggattttcaaatttatagactagctagccttctaaatttcaaattttagcatataatattaatttatttgtaactaattaaaaggtaaatatttttatatatatatgtgcatgatatgtaattttttttttttttgatgacggaaggctcaaaagagccaccacaaacaagaacaagaacagggaaacaatagtcgaatccaacctacacacaggttgggattagctaaacacaacaaataagccgactactaaagttactaatagagctactgaaactaaacaaacaaacgaaaaggacataactaacagactaaaacaacaaactacaggacataaccatctgcctaatagatagacaggaaactatcaaaattggccttgtcgatgctcccaaactgggatgaccggatagaccattgagccacatcatgggccacacaattaaggttccggggaatccaactaacttcccaaagatccaactgatccactgtcgtgtgaaacaaattcaccagttcctggatgttgtagtgctgactttgtgcatctgttctcttacgcgtaattgcagcgattgcacccgcacaatcactttgcagaatgacctttttgtgtccaagttgaagtgcattctccacccccccacaaagagaggcaatttccccagccaggggatcgctgtacagcaatttcttcgtgtgaacgctcgagatgacgcccttatcgtccctgaaaattgtagcaccaatagaacaacaaagacctatcgcaacatccgtattgcacattttccatccttctggaggcggcgtccattctgtcatgaccctattcgagatgggaggggtctccatggactcaccggcttctcccagacgaacattggtctggggaataatgacattcaaaggagttgtggctctttttttgtgtatgctattattcctttctcgccagatcttttcaaagatgatagccactcctccaaggaaagaatgaatacttatctcgtttggtctatggcggtcagctttaaaccaagtgatccactcgtcccaagtgttgaaggaggtagtgtctattctaacctgccagttacacccgaaccaaatttccctggcaaatgggcactcccagaacaagtgcatggagttttccactgccgtggaacaaaaggggcatgacgggtcttggatattacaaattgaactaattctttccctggttggcaggttgtttgagagaattctccaccataacatcttcagcctgttgtaaatcttcgccccccaaatacttctccacttcgcgttattttggtgtccagtattgtctaagttttttagcgttttgtacgctgaacgaatggagaaattgccattgttctccgggagccaaagccaggaatcttctttcgggtgtgttgggagagttatgttgagaatccttttggcatcatgaaagtgaaaccacatcttgactatatcttctttccattcattttttttgaataagattactcaccaggccaactccttcgtccgcattacgccgcggggttggttgacgattgtcccctggcacccacaggtggaaccaaatcgaagtagtattcccattgcctattctcctgcatagaccccttagtatgattggtcttacttggagaattgccttccaaagataggagtcagtggcttgagcttgcaaatccaagaaattttgatcttttaagtactttgaacgcatgacttcattccaaaggcctgaatcttctgttaggattttccagccccatttgataagaaatgccttgttagtagctttcgttgatctgaagccaagccccccaagtgtcttcggcttgcaaattttttcccaagaagtgtagtgcagaactcgtttctcatccgagtctccccaccagaaattccttagtgttttgtcaatcttattggcggttgtgattgggataacatcagatgatgcgacataattcgcgagagtagaccctacaaaccgaataaggcaggcccgacctgcactagataggagtcgcattttccaaccttgcactcgcttcagcactctgtcgacaagataattgtagtccttagttttctgtctcgatcgaaagagagggaggcccagataggaagcattttgggccatcttcttcatctccaaaagctccaaaatcttccttgatctagctctaggcacgcctttggagaagaaaagtgaagacttctggaggttgatcgtctgacccgaccattttcagtaggtagctaggcactctttaaacgcctttacttctttaatcgaggcctgaccaaaaagaatgatatcatccgcgaacatgagatgatttactgccgttccatgtctccccattttgaaccctttaatagatccatttccttccttaaggaggaggaggcaggagagcgtctcaggtgcaatgatgaaaagtgatggggacaagggatctccttgccggagtcccctctccggtattatcttgcccacaattgagccgttgagcaggagtttgatttctttgactgaaatacacttccggatccattcggtaaaagagtgcgagcatcctaagtgcgatagcaccgctagaataaactcccactccatcttatcatcataaagcctttacttccttttttcttcatagagtgaacaatttctctggcgatcattgtgttttttgcaatacaacgaccttttacgaaggccgcctggttgggagagatgatgttttgaaggagtccccggagccttgtggcgagaatcttggagataattttgtacgccacattgcacaaggcaatcggcttgtagtcttttgtgtacattggtgagtctttttttggtatgagaactatggaggtgtcattaatgtagtgaggaagctccctgttcaagaagaaatagatcaccatttcgataacgtcatctctgatagtgtcccaatgatgcgaatagaaggatgggggaagcccgtcagggccgggagccttgtcttttcccatctctttaattgctgaaatgatttcctctgcatcgggtattgcattcaacgtgaggttgtcttgatcagatatgggttctctgaagacttcctccaaattaggggggaataggttggttttttggtgaagagttccctgtaactttcgagaaaacattgggctatttcgccttgatcccgaatccattgccccccttccgagcttttgatgcactgaatataatttctccgtcttcgaataatggtggacgccatgaaaaatttagagcacatatcgccctcttgcagccattggactcgtgatttctggcgccaaaatatttcttctcttagtaaggcttctgacaacttcgattttgctagttctattgccttgaaatcatcagggaagtgcgtttcagtatcaacaaggttggccgaagcatattgcacttggattttgaggtctttgaaatgattcttgttccaacgactgagtctgcagaaagtatttttcacttttctgtggaaattgatcattgggttctggtgcattcttttggcccaagcctcttttactacccagaagcaacaggggtcccttgcccacatgttttcatacttgaacatttgacccttgcacatgatccctcccgaagtatccaggaggataggtctatggtctgaaaccattgttggcaagtgattcaccactacacttggaaacaatactctccaatctatagttgcaattcctcgatcaagtctagcccttttcatgtgaccccgtcgtggggattgagtgttattcttcgtccatgtaaatctaggatcgagaaatcccaggtcgattagccccaccctattaaccattctatgaaaatcaaaggagtagctagaagaattaccaatttttgcataattaaagcattccgagtctttcagcgtcccattcatatctcccagtagaagtataggcactgaagcatttaggaccatatcaccaacatagttccaaagaatttccttttcattttcatggggaggggcatatatgcccaggataatccatttctcgcctggtgggtcagaacatatctcgcccgcaatcacattcttataagcggagaggatgttgcattgcacccctttcatccagcataacccgaatccccccgacatactaatgggaggaacataatggcattcttcgaattttaagcgggtgcaaatcgtattaaaccttttagtttgaattctagtttccgatagcagtagcatctcgggttgatgttga

SEQ ID NO: 163377 - DNA, 1509 bp, Cannabis sativa
taaatataaaatagtttaataaattaatgaaaaagtaataatgttttatgattaaaataaacctccttacatttacatttagagagctttctattctttatctattatagagaataagttatttttttaaaaggtctcttggtcctagctaaaatattgtcacttatattgttttactagttttgaattcgaatttgagattaattaactatacgtacatctaatttagggatgatgccgacttagttaaagacattgtgaaaactatacgagggaaaatgggcaagaagaccgaccctgatttcgataggcttcttgaagaactagagactaagtccctccctcttgctgaggtgcttgttgatgcagagcataagcagatgagcaacccaggagttgagaaatggctagacaagcttcgagatgctgtggaagatgcggagtatctcttggaggaagttaagtatgatgcgctcaaactcaaggtggagaaagagccaaaactgaaatcaactattcaagaaagaaagaaagatatgaagaagattctagagaagttggatactttcaaaaatgataagttcatccttgatttgcaagcaaatgctgaaaaaattccattgcagaggccaccttcaacattctccataaatgattctgaatttttcggcagagatgatgaaaaggaaattttgaaagagatgttgctgtcaaatgaagtggatggtgaaaaaatatgtgtgattccaattatgggcatgggtgggatcggcaaaactacgcttgctcaagctctctataacgatgatgaagttaacaatcattttgaactcaaagcatgggtttgtgtctcagatgaatttgatgtttgtaagataaccaaaacgattcttgtagcagtaactagaaaggcttgtgacattgagaacttgagtgtgctgcaagagaagatacaaaaagaattggacgaaaacaagttcttgattgttttggacgatctttggagtgaggactacgatttttgggatacattaaggatgtttttcaacgtcggggcacaaggtagcaagataatcgtcacaacaagaagcgaaaaagtttcatcaattgtgggaacgactgcatctcaccatcttaatgtattaagtgaagaagcttgttttaaattatttttcaaaattgtaagtggcaataaagaatttactacaactgattccaacttggggagaatcgtacaagagcttgttaggaaatgcagtggtttgccattggctgtgaaggcaattgcaagcctcttacgcgtcacgaaagttaaggaatggagaagaatagcaaaaagtgatattttggatttaccagttggagagaaaaatattattccagctttgagattgagttaccattatctgccattgcacttaaagcgatgcttcgtttattgttctttatttcctaaagactacgaatttaaaaaggaggagttggtcttactctggatggtagatgatt

SEQ ID NO: 163378 - DNA, 1870 bp, Cannabis sativa
cacaacattctggtttaagtcctttctagcactatggaattcttccaggtacgagtaagcgaaaaagaggagggcgtcagcatgttttggtcttgtaccatgcctctctttatttcattcactccaaaatgcaccatagaattgttgcaaattgctccagctgctgagatgaaaaaatggttgagcaatgcataaacatttccatcaaactggtgtggttatgcagcagcttttcaagacaaaaagatgaaagcttccaaacatgttgagctcttttacagtagaagagtgtgtgtgttatggtttctctgtcacgattacatagagaataagccgagtcatttatatgtctagtgtgaagaacatctgatacagggaggcagtcatgaatcgctctccaaaggaaaatgcaaatttttcgaaggaagagaaagaccctagaattttttccaccattgaattgcttcaataccactagccgaaggagagtgatcttcaagttttatagccaattcatatcctgatttaatcgagtataatccattagtttcatggtgccacataagtatgtcttgctggttgattaaagttaagggaatattgagaactttgttaacattcgattccaaaaataactcccttaacaaatcagcatcccattgtcttgattctaggagtagatcagcaactttcatattcatgtcttctccataaaaaactaaaggtttaaagctggtatatcctggaagccacgggtcagatgctcataaaatgttagctccatagcccactttccaacgaagccctttgacaagtaattccttaccccacataatgcccatccatgttagagatggatatgagcccaaaccgagatccaagaatgatttgttattgaaatctcttgccttaagtacacggcttagcaacggacacgagattgaaaaaattctacacgcttgttttgctaacaaagcttgattgaaatgaataaagcttttgaaacccatcccaccttccactttagaagtgcgtagtgctttccatgttttccaattaatcccattggaagaagagttagagccccgccagaatttattcatcatcgtttcaatttgcttgatcaaggatttggaaagacggaagcaactcattacatacgttggtattgattgagaaaccactttgagtagcacttctttgcctccgattgagaataacttttcttgccaagctgaaaggagattccatagcttttctttgatttccccaaacagtattttcttgtctcgacctgaataagaaggcaatcccaagtaacgctcgtgacatggtttaataggcatttgtaggagttgctgtaagtgagattgaaggcctagtcgagtattaggggagaaatacaatacagacttctcaacattaagcctttgaccaaaggtagcacagtaataatcaagtgaagatttaatggcagcaattgatctttgatttgctcgacaaagaacaaggctgatattggcaaagaacaaatgcgagacagatggagagccgcgagcaatttttaatccttgcaagttcccctaatttcttcacgctgtaagagtcgagaaaggccttcagcttaaatgataaacaagtatggtgataaaggatcaccctggcgaattcctcgggacggagtaacatggccttgtatcttcccattgacaaagaaagagtaagtgacgctactcaggcagcgtaagatgagatccaccgttgtaaaggtaaatcccatagccaacatcatgttgggattttatgctctaaataaaactcatttcaatataatctgatttttcattaatagaagattagaagtcattta

SEQ ID NO: 163379 - DNA, 4139 bp, Cannabis sativa
taatattaaaaaatagttagaggcggagattgggtacgggtttgaggttaaagccatagggttcgggatctgactttgaggttcaaatttataataaagatattataattttatatgatttgataatacaaagtaataccaaatataacattaaataatattatataatgtaatgcaatttaatacattataatacaatacaatataaaacggtgtacgaaataagtttttaaaaacataaattatatgatacacaaaatggttccatagttctattgtttatatatgtcatcgtttttaacaatgatctttaacaaaaagagtatgttgcttctttgtttcaaatttaacaattcctattatatttgtttattttggtaacatcatgataataaatacaaattgatactaatataatcttcaacaataaaatatttgctaattataatttatgacaagaaaagagaaaagagaaaagaaagaaagatttgtatgcttgcacttcatgcattacaaaatacacttaaggttagaaaatcaataattaatttgattaccatctaaaattccatttacagtatacccattaatatctcattaaataaaatcttaccttatatatataaattattatacataaatggcaaaaatcccatgcaacacgtatccatatgatgatttgtgagttctgaccattttagatcagtgcttcaataaaatagtaatttaaggaaatcaataccacagttttgggatgtattaagagttaacttgtaaacaattcagtagatcaaagtatttatagtgactttaaaccttttttttttctttgtgtgtatgtacgtaactaataatttttttttttagaaaaatagacttgttgcatataccatttagctacttattaaattgactgttactgatttcattacattagtaattactgttacaataagaactttccattctcagctgattactttatatagcagatttaattagatcataaattaatgagagaaattgaaagaaatcaaggtcataataagaataatgtatattattaccttttttcattattgtaattcattgctcttctgcctataaattaaacatttcacaatgacacatttcaccaaacagccatggctaagtttcatattttgattgccttagtagcactcacttctaccctagtcaccattgatggacaattcatcagtgattggcaagatgctcatgcaacattctatggtgacatgactggtagagaaaccatgcgtaagtgatcacaatgcatatagtttttttctttttggcacattatttatgtatcatttttaattgtttttaacattttacagaaggagcttgtggctatggtgaccttttcaaacaaggttatggtcttgagacaacagcactaagcacagcattattcaacaacggccaaacttgtggtgcttgctttaggatagcatgcgttgattcacctcagtggtgcatacctcattctcatattacagttacagccactaatttttgtcctccaaattactccaaacctgatggaaactggtgcaatccgccacaaaagcatttcgatctgtctatgcctatgttcttgaagattgcacagtacaaagcagggattgtgcctgttcgttttcgcagagttccttgtatcaaaactggaggagtcaagtttgaggtgaagggaaatccctattgggctcttgtgttgttgtacaatgttggaggagcaggtgatgttgttaatgtcaaaatcaagggctctagcactgactggcaacaaatgtctcgcaattggggtcaaaattggcagaccggaatcaacttagttggccaagctttgtctttccaagtgaccaccagtgataacaaagtgttgcagtttgataacgttgcacctacaaattggcagtttgggcaaacttttgagggaagacaaaacttctgagtgtataaactcaactgcttatagatgcatttgtctagaaaatattggttgcatatagcaatttcactaattgttaaaactaaataatgaaatatacttttttacatatttaatgaggtatacttttctatgaacatttttcttgtactttgtgcattcaacaatatattctgcaatcccatataggcgtagacaaattattctaacatagaacatagtttggtacaagaaaaattcagtcaactccagacagattattggtactccctattggggagactaaaatgataatataacaacaattttcatattcgataagtaatatgatgtacagacacaaacagagaagagagcagcatcttatgaccttttcgaaagcactcttccatagtctatatacaattcaacacttcacttccaatcaagcatgtccaatagccacaaaacttcctccttggaatttgcagcatcacagaaatccatttgaatcccgaaaacatcaagggcaccatcattgccttcgctgcttccatcttccataaaaagcaaagagatccatgcccggatgctcgaagaaaaagggtacacaggagcaaactcaaggtagtcaaatgccatggccctaaatgctgtccgatcaatataatcaaacatagatttattaattatacaagcaaccttattagaatctttgcgtccaacaagcacagaaacactaacagtctgacacacaggaactgtaaatcttggttcaacaggaagtgtcatcttgtagtcagggccatctaagtaagttctaagcttgtcacagattcctgatggcaagatcttaaaacccaactggagggcagcacctggaactgcttccgagaagattaatcgatcctcaatccatatgtcaatgtaaaattccaagttatcaaaggaaatccttggaggaggaagaattcgattctgtggccgcttatgaaatgatttatacagcttatagtatgttacagtgggaggcttgggttttttgcaaattgaaggccactttttggcacacaagcatttccaaaagtaatcttctaaggcaatatccttccattgcccacatactctcatacaagaagcaaggtccacagcctccaataaagggaaaacagccttcaagacttcttcattaatcattttgaactcataaactccaactcaaaaacagaactgagatggcttcactcattgaaattcctgttagataattaacagagatgaagtaaaaagtcaaatttttaccatgacaaagttattatagcattgaatgtacatagatgagctcctaaaagtcaccccattgcaaggattatacaaacaataggtatacaatttcactgaacaaaagacccattatcaaaaactaacaacataacccagctcaccagctgtatctaatacctttctttatttactacagtaagctcagcataacaatataaaaaagctcatgaagttgaatttcactgatcaaactctactaataaaatgtccccaaaactatgatcaacctaccaattataatctcatagatagaatgcaatttttttatataacaaataacaataacagcaacaaaatcaaatccagattctaacaacagataatgattggtaaaagcatgcactgtcaaccatcgagagaggattaaccctagagtttgatggcggaaatgaactaacgtttacctagttactgatcaccacaaatggagaaaaaaaaatacatatatatataaataggaagcttcgaattcggataccttaaatgtcgtcaggaattcgtaaaacctaattagcagtgggagaaagagatttcttttcgggtacaatgggcagggagatcaaagaagaaaggtttggattagaaatataataccaaataagcccctcagcctcaatcattctaattttctgaaaatatattttatatatattagttaaaaaatataaatctcaagcctaaatgggcttgtgggcttacccaaatatgacaattcttaacttgggcttctattgttgatttgtattgttaaagggggtaagttgaaaaatgcctcttttattaatcaattaactaaatttgcctctaattttatatttatttgaaacatacctctttt

SEQ ID NO: 163380 - DNA, 1694 bp, Cannabis sativa
tttttttttttttttttatgagcggacaaagcacattaacattgattatcacattttttgggagaagatagatccaacaagggtgcctcaaattcttcatgtctctacaaagaataatattgtagacctattaaccaaacctctctttcccaatcaattcaaaactgttgtatccatgaatgttcataatttatacactttatcttgagggaggtgtattaaattggactattttgtgtaatgggcctaagttattgggcttttctctttggtttgccgtatatctatatttatttgtatagactttttcaattaggagaataatataaaatacattttgtactctaataaaaatagaatgatttgtatcatagtgttttaaattaatattccttaccaggacttgtagtttttcttttattgatcgcattctcagcaatattaaacccttttttatttgaatgtattggttggtactataattcaacaacaataaaaggaaataattaggtggaataatatatatttaataagatcaaataagaaccgaactcgaatatatagtatagtgcaaaatgcaaatgaatatgcatgcagtttttattttgatttaaaccaaacaactgaacattgaacaatgtacaatacataaagcaaacagtattgtgttgtcacgcactacttgtctgtactatatagtatagaatcacattgttcacaacaagccaagaaatagcctatatatggaacgagagagagcagagcctaactacgcaacaatcaaaacacaccatcaattcataaaatatatataatatatagatagagatagagtagagtagagtagacttagggtcgcatcgcatcatatgtcacttgcattatttttttattagctttgtcatgaacatattgtaatattactcgttcatgttattgatagtggctaactaacggcggaagctgacgggtcgaacttcacgttggagagcgtcaacctcatcgtcacggagcttaacggcggtgtaggtagcagcacctgccaaggccccaagtgttggtgccaccaagaatacccacagtgctttgtagttacctgcagccacagcagggcctagtgtccgaactgggttcattgaacctccacttgccggcctgcatccatgaatctcattatatatttatattattccaaattaactactaattagctctaattaataataactctccattattgtagagagacttgaaaaacaattacgtacgtgagtactactttaaatttgtattttcacctccaaatttgtactactttaaattattgtaccaataatagagttaatatatgtattctatctgacaagtcagatattttgacttaacagttttcttttcttcatatctagctgattgactgatttgattcttttaatcccaccactcatagctagtctcagggactcagatacaacgacatgccaaaagttctttattgcttgtattaaaaaataagttaattattattcttttctaaagtatcattattatatttttaatgcaacaagacttttgattccttaatttttcttaatttttcttagagttgtacatcaaaccgctcaaaccgtccgcactgcaaaaaaaatgtggtttgaaattcttcgcgctgcggtagcggtttgaatttttcc

SEQ ID NO: 163381 - DNA, 3200 bp, Cannabis sativa
gttataataaaagcctaaaacttgcataatcagcagatacttaaaattctcgagtgatcctacctattaaccgttcagcataaggttttcctatatttacaaattcatgctgaagaaattgtaaaaggtttgcctttgaagtttctgttataagacgcttgatcagcagtaagtcaactgatgatggatggtgcttcgtctcaagaggaattggcggcattacatcagttctccgtgaaaatcttatagttacgtttttactgcataaaaaacgagaatacaagtgtgacttgatatttatctatttcttaggaactattacatgtatttcttagtgtgtgtgcgagggagagagagagcatactcagttgagtctgttacaaatttaaataggaattgggcataaggagtgataacagccatttgtctcatgtagtgcaatatcttggactgcacatgccaagaaagaagttttctcagattaagatattatggtgaaaataaaaataagagagatgtgccagtcatgaattgcatacacgataagtagtccaatttccctcaattacaacttgtatttcagctccatgccatcgctccttattatctcgtttttcatgtgcatgtacatgtggaatgttcctgacaacttggaaagagcaccattatgaccatggacaacaaaatctaaaccaagacaccccaaccaaaaacatcacatgtacaagttacacatacaatatattaatcgggtttgcaactttgcatgataaacaaagaaagaaaaatatcattcttccattaaatttgacataccgatgaatatctatatccagcctgcaaaacgtactgtaattttggcccttcatcgatgatgatatctctataggaagccctgtactcatcttggaccaaattaaagcctgaaaaatgtaaacatatcttatcaagatacattcaacaaacgaattccattagagcagaggaatatgaagtccaatcttaccatctttgcaccaagaccaaatttccctcgtgtctgcttaaggccatattttgtcccagatagaactgcatgggtttgttcatttacataagattatggatatttaaggaagagaacaaggatcaagaagtttgagaatgaccaaaatagtatggaaacttgacttataaattaattctgaacctcgcccaaacatatttggtatgtcatcatgtggcattccttttccattatcctgcatttaaaaccaattataaaaataaggttttcacttacagtgacgaaaacaaataagtgatgttatgttaaaagaaggctgtgaaataagatatgaatccaccttgcatgtcacccgataaaatgaagcttcaccccgacccttcattcccttcgaaggttgtgactctttgacctttttaccaagagaaatattttttgcttgcatttcttgagcacgggcctcctttgccaatcgtttctgcaatattggaagcaaaaatgcatgagaaagaatttgaaagaagctcaactttgacataaattcatactaacgactctctggggttctcttaaattcaaaaattcaaacagtcaacaaattaacattacatagcactacaatcacaaacacaaagaagtaacaaaagatacattatgcatgagggaaaatacagcataaatgaaccacttacaaaaacaaaataataataacaatagaaatgggcacacctctcgagccttagttgtctcataatcatcatagagtgcctcatcaatgcgctcccgatcaacaagtccaatcatagagttaaacttgctttttccaatctcttcactacaataggtgaacataaagatcaaacccatagcaatatatccaaattcaaacagaaataaactagaattcaagacatgtatattcacttcaattcatagtgatcttgtcaagtgaaaattgatcataatttggtctcagaaaatccacatacatggttatttcgacgacaggaagctccgaaatggactcagcagaatcaagtgagttttcaacaagctccctcacagtagtgtaaagagatttcccaggctgcgagttcaacaaaaagaaaaaatcaagctcctaaaattacacagctaacatagggtaattaacagttgttcatttctgaaaaattaacagaaaatacaccgaatttaatcaaattcaatagatttccaatgctgaaagttcaacaaaaggaacaaaactccaaattgaaatcagcacttttcaattccaaaaatttgactcaaaatacatcaaacttaatcaaattcaaccacaatcaaacaagagattattgaagaaaaaaggaaaagaaaagtacattatcaaatccagcaatattcttgttctccgcgaaaaactcagcgggagattctgcgagatcacaatgaatcaatcaacaattacaattcacaaattcacaatcatatacatacacataaatatataattatacatgagaaagagaaactaactctgcttgagagtgctgggagtttccttagactttctcggagccgccttggatttggatttcttaagctccggagagctttcgctgctctccatttccgaatctcaacacagaaaaaatgcgaagaagaaagagaaagaaaggtaacagagcaaagctcaagctcaagctctgctagggctaagttacagatttttttttttttttttgtaaagttgaaattagagaagtttttttttttaatctaacgatggagagaaaagggtatggaatccaacggctgagatttaatgctttattattttctccaaattttgcttttgccgccaaaatatggatcaaatctcaacccttgaataatggagtgtgtggaaaaccgttggatctgaacatcatcacgatcataaattaagcctaattaagaacaattttgttttcaatattgctaaaaatatattttagtgtgtctaaaacatcatttaagagttctttcaaaaaaaaataaataatcatttaggatttattatgatggtatttattaagagataattacattagacgctattttttacggatttttttacgtttgaagaattttttttttatatttttacagttttttatagaaacaacaagaaaactatataaagataacatgaaaataacatcaaaac

SEQ ID NO: 163382 - DNA, 1835 bp, Cannabis sativa
agtatcccaagagcttcagaacattgttgtggttgctcatatttgatgccacagcaatttcagttgcaattttttccaaataatcaccatttttagaaaatggttctgatgaaaaggttttcacaaaaattccacaatcatctttttcaccatcattaagtactcccctatacatttggtagcctccaccctggtgtatgattctgctaacatgaaagttatttgttgctttattgagttgttgagaagagtatgaacgaagtggattggattttccattgaacaaacgaatggtttgctctaacactgctgctccattcttcaagaagaaatttttattgttgttgttttctctgtaacatgaaaacataatgaaataagaaatgaattaagattggttttgaggatatggagagagttggttttctgatttcgatgaacaaattatatattgattaattgtgagttgagacacagaacagaaccttcaccaaggtgcatgtggtgactttaagtcactgtaattggattcacaaagtcatatatacatatatgatttgacattgttttcaaagataagaaaaccacatgcactttctatctactattgttggaagaaatttccacatatttttcagcaattatgtatctatgtctatgtgggatatgtaagtgttctctgttataaaacatcaaaattacttgttcaaaaaaaaaaaaaaacatcaaaattattgtgggtgttgtagtaacttgaaaaagtcatacttaatatatgtttgttctggtcaatttcgtagaaagacttatattgaattgtattatattttcttttatggcaggtataattaatatgcatgagactataaataagatatgagagagagagagagaaagagaccatattccaatccataatccatgtcttcatctccttgatcaatattaatcttcctttagttcattatgttttcatgctacaaaagtaatactgcagaagatgatgatgaagaaatgaatggcttctttattaagaatggaggtgcagtgttagagcaaaccattcgtttgttcagaaaatccaatcgaccacgttcatacacttctcaacaactcaagaaagcaacacataacttccatgttacaagaattaatattggaatggtaattgaaacatgagttggaaaccaatgcgtttgtggaagaagaagaagaagatgaagaagttagagatcaaatactggaatgtggtaagctggtagagagattatgtaccaatgcaagagttgaagagagacctaatgtggtaagctgtcattttgatcaaaaccaacagcaccatttgatttgattaatactccaacaatacactattgttttccttgtttatggttcttatgtcatgtagttgtatccactgtgttcttattcttaatatgttctttttggctgaaaaaattgctcatatatgtttatcacttctaattgaccctcaactcagtagcatttatatcctaaagtatttgtcactacacgttttcctgtcaataattcagacaataatatcccaaagtcataaacatcactcctttcagtgtatcaacatgagtttccccttctggagttcgaattgaagcatggaaactgcacaacagctttgcattgtagtcattgtctaaaaacacttgtcccattctcatatctctattgataaaagtctttgtctcccatacttttcacaaatatggaggagattgccatgaaaaggtctgagtcaaggcagtaacccaagtgcttcaacacatttctgtggttgctcatctgtgatgccactg

SEQ ID NO: 163383 - DNA, 863 bp, Cannabis sativa
tgatcacggttaggctatctgagttgacaaagaatggtcgggccttagatttctgcaccaggttcaacccgaactgaattgctagacattcagccataacagtcgatctgtaaccctctaggaaaattacttcagcagctaccagacgaccttcatgatcacggatgactgctgcaattccactaccctgctgatcctttccaaatgctgcatcacagtgcagagagaagtaacctctcggaggagccacccagcatttgggtcttgacacttccttcactgcactagtctcatggggctgctgcagagcattatcaacgaaatccatggcccaaggagtccagctttttaaattaatatttttattctgaaaaatacgctggtttctttggttccaaaccatccaacttaactccaaaaacgattcaaacttgtgtttggagcagttttgttccatatgcatgagaaactcctggaggtctgtcatcattccgagaccagtggggaataaatgccagtaccctgctgctttccaaacagatttcaggctaggacagttccaaagcgcatgtccaattgtctcctctttgctccaacatcccgagaaagtcttgtcaatttttatgcctctttttaccaattctgtctttgtgggaagctagttatggcaaacacgccaaacaaagttcttcatttttggagttaaattagagtgccaaatccctttccaccatcttcttaccattgacttatctgatgtctccgctgcctgttcctctattcgattccaaatgtacccactagccacctggtactctccataagttgtatagtgccaaattaattcatcctcgccacaacct

SEQ ID NO: 163384 - DNA, 1202 bp, Cannabis sativa
atttttataatgactacttttgtatttacatcgtgattggcaaaacagtattatttgtgatatatttgagtggcccaactcacgagaatgcttaataaaatatccgaatgaagaactaatactactgatgttgggtgctcagattgttatcgtgcatgttatgtttggtgcccaatatgttgctttgttttattggtattaagtgatgtatgcctaatgcctttcaaataaatgcaaccaatttttggttttggagttttgcctttgatattgaccgtgatcgtggcagttcagtagaattatgcgggccattgttttgctcccttgggcttatatggagtttaatttagagtagtttgtgtgttaataatatgccaataaaaattgaatggagattaacatgccacatctacacaaagctcattagagtagtgaaagtgtcaataagcttatattttatgaaatgagattggcattgtatcgacagtgatgagagtgtttgaggcttcttcttgtctttgttctctatttgcgtagttgggttattgcgattggtggtgtggcaattttgcctatgagtttttgcacaaagacgtagaaattagaacaacatgaatatatatataatatataaatatatatattttttgatttttgacgtggaatcggtaaataggcaaacgggttttcagaaagtgtgcttaatgaggcccaatacttgtaaattattgtgtataaactggcccgttaccagtaacaatttgaaaggcttataactacttgatgtgtgcatccagaatatttcgactggccaaggtaatagggagagtagaggtggtggctcacataatttgttactttttaagttaaaattgtttgtgaatttttaaaaagctttatagaataatactttaataaattatacatatgcatgaaacatgcatttttgtgtccaaatcttcccaaaaataatttctcaataatagaaagattttcttattcgaagtagttgttgatgaaacagttagaatgcacatttgattgactaaatcaatctagtaggaatgtgtttttcgtgagactagaaagaattaacaaataagggccacctatataaattaaagtagttggatatcttgtttattcaattcagttcgcctaatttcatattttgaattcaatccaatatatatatatatata

SEQ ID NO: 163385 - DNA, 2020 bp, Cannabis sativa
tctttctattattgttgtcatcctcaaaaggttttgttggtaccaatatagatacatataaagtaacagtggataaaaaagactcaatacctgagagagtatagtatagtacatacaacacaacaagcgggcttgttggaaaataagagagaagaaattgatgagtgtgtttctttcatattcctatataatctctttcaaaaaacaaatgatggcttttttctttctttcttatttcttctttaatatctttcttttaaaaatgtccaaatgattcacttcatgaacaaaacatatctatggtcttaaaaagattctccaaaagaactagtctttattgatttccttgtatcacaaacagtctttttttttttaacaagtattttatcctatggcatactcattatctttttcttctaatctcttgggttttattctctatatttaatgaaaagccttagattcttttgtagtttgtcttttgctataaagggttggattaaatttcattttgagggcaatggataagctctaagaggaggagaaatcaggaaaagatggagtggtgggtaacctatcatctcttctttaataaaagcaaaatgaaaatagaaattaaactgaattattttcttttaaaataataataataattaataattgaagaaactatttagaaagcgtgaaggaactaacaactgtccgtagtaccatccttctaccaaacttccaagcattaatgatctgaactgtgagccaacctaccataccatttaatttagaatagaaaccctaactagatttctttcctcttttcctttcccttttggcctacatcccaattatttaatttgaagtagcttatgtaaatttaaatatcaaactgttttttttaagactttggaccactttctttcagggttttcttcattcaattaaccctacttttggttttcactctcttcacatcaaatttttaatgaaaatattatcaaccccaataatatatttttatttatttttttaacagtttagcaccaccttcttagacaactgctgtttcattgtcattcctcacctcaatggtatcctttttctttttaaggaaaatttattgtactagttgacaatatatttaggatttttctttaagtttgaaatcataattaaataaaaatttatctaattaaaatcgtgaatcatgtaaattgccggtgcctaatatgagagcatacgtatgaatattgagagacttttggtaacatttctatttttcttcattaaaatagttgagaggaggaataaattttgtgaattaatattataactgaggtatatatgctcgttgatacaattcaatattgaattttgtccataataataataataataataataaagtgaatagattataaaatttagatttgagatcatatattattgacatttattcaaattatatcagtacataaaagttattattttaactgctttgtttgaaaaactaaactgttttatgtgacagggaacacaaaaagataaaagagaaaaagaaggcttgaatcatttttgtattctaaaaagtatttctatatgtatgtactccttttccaactaataataataagggataattatattttctattacaataatatttaatattactataataatactacatattaatattttatttttatgtacaaattttaattattttttttatttttattgttggagtctatatttatagtaagttaattatgtacattccttattttgtattgaaataatatatttttctatttaatttaaaaatttgtctgtattatcttttcctttcagataaaatatacatgcttacacatttttaactaactatattttttaaaacaaattgttggatatattaatatatttatccatcatctaacatgagcaataaacatattaaatatttaatgcaaataaaataatatgtttaattatggaattattacatgaaaaatacaaattg

SEQ ID NO: 163386 - DNA, 2534 bp, Cannabis sativa
ccaattaatccaacaaaaggaggaaggctgcagagacgttgatggggtccttgatcatattagatatttgttgtcttatgctaatgtaaaaggtctgtcgtttgtgtatagggaagcactcatgttttagtcaattatgctttgttgaacaaagctagtgctatgtggattaggattaaccccctgtgaaaatcaagctatcttgcgagatttgcctaatccttgtaattgacgtttagaatgaatgaatttgctttaaaaaaaaaagtactatttaaataaattgaaatttcaaaattttcattattattttaaacatattcttacctttctgaatttaaaaataaaaatgatctaaataattattcacaaacaaatcttacttaaacttttttcaacattttaaatcaaacttacctttatgcatgaattgtttaataaaaaataaaattcaaatggatttttttattatcaaaataataggtagccttgaattctatacattaaaatagtgattaagggatgggaaattgttactatctagtaaaactaacatggtgtttatatcaaacaatagattaataaatatatattaattatgtaatttgctattattttagttggacaagttgaattatattaatccataattaatattttagtccagctagcaaatttggacttgttaagtacaattagcaatataaaaaggaaaaaaaaaatattaattgatacattttttcgatccaaaatttttgtcattttcttcctggccaaactataagaataacttagtattttgaatcatcaaagttcagattaaactcattcatcatggccaaatatgatagagaaatcgagctcaaatctttcgacgaaactaaagctggtgttaaaggacttgttgatgccggaatcactaagattcctagtatttttcattatcaaaagtcttctgatgatcatgatcattatgtcaagaacacgattagtgtttcatcaagagaaactgtaccaagtattccagttatagaccttaaaggtcttgacaacgacgatgttgatcaagagcgaacgaaaatcgtccaaatgataggagaagctgcagagacatggggtttcttccaaattatcaatcatggaattcctcaaagtgttttagaggaaatgaaagaaggtgttcgacgatttttcgagcaagaaaatgaggtgaagaaagagctttatactcgagattactcgaagccagtgtactacaatagcaactttgatctttatagtagtgtttcaaccaattggagggatacttttatttgtaatatggctcctaatcccccaaaactacaagacttgcccatagtatgcaggtatttttttttctttctagaaatttaaatatagtatttttctttataaaaaataacttgtttgctgtttatatatgcgaaaatttatgtggtttttatgtttttcttttaaaaaaatacattttagtgtgtatttgatcgatgtttgttgtgtgtattcttaccaatatttagtagagaagaaaaatgagaggaaaaatatgatagagaaaagtgaaaaaaaatagtgtttggtaagaaagaaaaatagtgggtccataaaaagttaaaaacctttctcctcaaatttgaagagaaattttttacatttacagtactgtcaatgtgaaattattgattcatttttacataaaaaaattatgttaataatttaaagtttttgatttacgtgtttatatattacataattcataacttagaactcgaatgaggacttccaatacacacacctttttatagccacttgaattttataattactcaaatttttttcattcctattccaaactaagaaatatttatttttttattcttcccttctaatttttttttatctctcttttattttctttcgtaatttaaattaccaaatattatttttgccacaatagccaaacataaattagagagttctatctattcttacaaatttggttttatattagatcatcatgtcacataaatgataaatgagtttttatttatttatttatttatttttcctttaagtgaaatactaatggagtactcaaagcaagtaatgaaagtgggaattttgttgttggagttgatatccgaggctctagggttgaatccaaatcacttgtacgacatagattgcgcagaaggattgtctgttttatgtcattactatccaccatgcccgcaaccacgcaaccagaactaactatgggagtaaccgagcatgttgacgttgactttctcactatacttcttcaagatcaaattggcggtcttcaaatattaaacaataatcaatggattgatgtattgcctcggctagatgccttagtagtcaacattggagatcttctacaggcaagtatttgtgttattgtacttcactacaaaaaactgttacttttagtgacaactgtttagtcacaacataatatttttgtgactaaatgtgattttagttaccaa

SEQ ID NO: 163387 - DNA, 1576 bp, Cannabis sativa
gttattcaaatctttgttcaaccttaaactgtatcttcaactttgatactctgttgtttggttttctgatatggataacctgctttctgatttgaaccacaccatgactctgtctgatcgagaacgagatgttcaaacactcccagtttcatcaagtcctgggcttactgcttctcagaattttagcctctatgctcgagtggtgtcttcccgtgagatcaatcgtaagactttcaaaattaaaatgactgggcactgggaaggaaaatatccagtcactatcactgaccatcactctggtctgttcctggtatcattcggttgccttggggatcttaaaaaagttttatttatggaaccatggcactttcaaaatcatcacatagtcctatgtccgcctactgctcttcaaattgcctctgcggaatctttgcatttatctcctttttgggttcaacttcacagacttcctttcttaagtaagtcgaaaatcatggctgagtgggctggtaatattgttggcacttatattgatgttcatgaggattcacttaatgaaggatggggtcctttccttcgattccgtgcttcgattgatatctcaaagcctttactcaggggaaaaatggttaaattgcaggactctagagatgagttctggctagaatttcgctacgaaagactaccagaattttgttttgaatgcggcactattggtcatccttttgagcattgtcatcaattccttgagaagatctataatggtattgaaccttccttgtcatatggaccagagatgataggctctcccctcccacaatccggatatgataggtaccgaactgatttttttaaaggagaagtgtggcctcttatgactagattagccaaaaaatcctttactgctgctgtgccccaaatatcaaacagaacccgatcctaccctcccagtttaaccattgcagaatcgtcccaaacaccagtaactcagcataccaatatgccattgaatgattccaatcgtgcccctatgattcacaataccacaactacagttacaactaccagtcctaatattgcagtcactcttccaatgccatcttatctccaaaactcttttccatttgctacttaccctccatcatccacaaacatcaacttacaccaatctacaagtttcttgtcttcaccactaccctcagccatctttaccaacactgctggttttcccaatatacccaaagacatctccatgcccaactcgcagcagaatgaagttagtaaagggaaaaaagttgttattgatgaaggtgacaaggaaaattgcaatcccaataaggtgttcaaaaggcaaattaatgctgaatcattaagatctgttcttaagcgttgtcgatctaatacaacttccagtcactctggtacttcaggcttgaatgactgcaatgctcattctgtttctgcactctcggattcagatgagtttctctctgaaaatttggcggatgttgctcagcaacatcgcccccagccatgaattgcataagttggaatgcccggggattggggaacccca

SEQ ID NO: 163388 - DNA, 2200 bp, Cannabis sativa
ctttttgaatggaaaacgctgttcattcattaagaagatgtgctcccttgagcatgtgagcttggtattaataggtgaaatccatgcatcgaggctcctcctccctcacaatcttcttattttggtcactcctacctctattgagttccattttcttttgtggttcttcatgcgtgcatgagtttgccaatccactagggccactcttccctattgtgagattctcgtgtctgtccttgactcgaatgtattttttggctctctcatagaagtcttccaagtcttctagctctctcttaagcatgttgttccacaaattgctttttggatggactcccacagcgatggccatcttgtaatcatccttagtcagtctccccacattggttgcttcagcattgaagtgctggatgtagctcttaaggctttcaagttctccttgtttaatgtttgcaaagctaattctaggtatggtgtatttccatgaagcatggtgttgggttaagaattcatcaacaaaatgtttcgaagatgtgatagacctaggtgcttaccgtttgaaccacttatacacttctcccctgagcatcaccacaaagcactagcacctcactttgcttgtgacccgtttcatcttcattatttcattaaaggcgtctaggtggtactttaggtctgttatgccttcgtaaggcaacatcttaggttctttaaagtttgtgggtaaaggcttagcttgcatctcccttgagaatgggaattcttcattgaagttatcctcgtaccagttacaatcttcagatgcaactaatgctatccttcctcaaagatcctccatctccttatctaactatttcctcatcttagttagcttctcctgaaggtcagttgtggttggcttcattctctttttgttttaaaattaatctactgtgagtacccacttcttggtcgtggtcctctggcaaagcttttctctcaagttgccctggactcctttggacacaatattcttgggtcgcgattagggttccagatccttttgggttgaatttcttcgtgggctggattcgggggtgttgtttttgggttccagtacattgatgctaccctgtcctctagctcacttactcctcgttttcttgcttctggttcccttccctcgattaaaggtgcctcaaaatggcctctcaggagctcctctagcgctctttgcgtatttgcaataacttcttctagtcacaagttgcttacccttagctcattcatctcctcattgtgtagctgagtctaagagctagaactcactaagtatactcgctttacctttctcattcagtggtgtgaggtttcgaggtttctcagtcttggcagctgcagtggccttattggggctagggcttcggacctttgcattctgcttccttcctttagcataatagaggcaatcactccatcttgctagttatttgctgagttatcttcgggccgattattctcttctcccactgggggttcataaccattcatgccttctccatcctgaggcacctggttatttttacctcctcttctagcgataggtggtggcgggtcaggccttgaggcgactgttgaaggccatcaagtcgaacctccacttcttggcaacaatgagagcatctcgacatcttttctacaattctaggtaaagaaatgacgttgcttttgcatgtcaattaccacagacgtcgccaaattgttgacggtaagaactcatcaacgatatgttaagaactcaaaatagtattcaaagttcttaatagaagagcattgaaagtaaattttagactctttacttttcctcagaaaaactattgtttcattaatcttttattcaaagaactccctttataatgatctcaaaggtccttttaatagtgagttctctacaatttagaattacatcagatccctaagactgaggatgtcaagtcactttcacactagataacctagtaattcacgtagcgtgttgtctcagacatcctcaattgcaccaaaacttcctcttctttttgtacctcaaatgaacttaactttgtctcctttaccaatactccttgtgtagtcgctatcttgtctgtgatctcctagcctaaacgaccctaacatcgatattttcactgttagactttttatttgggcttacattaaattt

SEQ ID NO: 163389 - DNA, 2297 bp, Cannabis sativa
taataagatctaaaatagataatgaagtactaagagacttccaatctgcagagcattagtatttgatgaccaaggcttggattacttgccaacaattcaaaagaatatgaacttctttccattcattttcagtaacccataaaagagtcatttgatagatttaatcgtgtaaatatataatttctttcctttttctttagtttttgtttttctttataaattaatgatactagacataatatctattcaattatcaaaattctagtgtggataggcttagtaaacataatatataaattagtacatatattgtacaagttatcctataaatatatacgaaaaagatttcaattattacatcaaatattgtaatcatgatatggttatattaattttaactaaaagatcacattgaacaatagaaactgaaacttattaaacatggttagatcaatgaagagttagtcattactgacattgagcttctagggatacgcacttcaagagtacttatattttgaatgtagtaccctcaaagagaatctgcaagaccccaatagaattacggaacagaagaaaacccaatttgaaacaattctatattttgggttgtcctactcttgttataaaactgaggatagggaaacttgctcccagataaaagcttgtatgtttgtgggttattcagaggaaactcaagatatgtacttctatagttatgaagaatataaagtgtttgtatcggcaaatgctaggaacatgactatatgaaagatcaaaaaccacagagtcaagtggttatcaaggaaataaaaaatgagcagatttctaaaccatcgattttagtaccatctgttgaatgactaataatttttgccattgttcctgaaaaggaaacccatgtacatcgtcatagtgggaggattgtgacacaacctgtctactatgaacatgaggcacattttcttatctatggcacaaacaagaacgattcattgacttaaaagcaagaaatggaagactcgaaatcagataagtagaacaatgccatggatcaagaaatagattttatgctcaccaacaaagtcttaggctatgaaatcctacctaaaggtgtggcaccaatacgatgcaaatggatttataagaagaagagaaatgatgaagggaaggtaaagacttttaaagctaggcttgtagccaaagactaaaaagttgagttttgaataatgggtccaaagcgttcaagggtaattgaagagggtgcctcatcatccaactctccacgagcttcgggaagggcaaccttggaaaggactaggtttgtaagccttgaagcccaagatcattatcttgaattgaaaaatagggtgctcattgaagataagggtattgagtatagtaattctcctatgcctaatcacccattgtttggaactattaggctctaaattcaaagaagagattgggcgcaatttgttgatattaaggaaaagacgaatcaaactttaggccttgatttttttttctaattggcccgaaaggaagaatgaagtggtgaaagtaagggaaacaaatgttccagtcacaacgcgagcaattcatgcattgtatttgcttcccaccttcccacgtgaggaacaacgtgtgagaattattgaggaggctaaggaaattgactatgttgatgtggctgacacaattgggtaccatagcctaaggtttcttgagtgtgatggagaaccttatcaattgtatcgatgtgagctgaactaggtagctcgtgcctagttatactttgtgagtggcaggttggtgccaagtaaacacttttcagatgatcaaatggataggttgatatatgtgtatgctattataaagggttacaatttaaatgtgtgtgacattattcagagaagttttgatacaatggtggaagaagctttcgatggaggacttgggttagctaacgtcgttactgatttgtgtgaggcctataatgtttgttagttttcatatgattcgaaggtccctccacaatgccaaattgatgcggggatgatgtctagatagaaagctccacatccatatggacaacctcttcctggtcaaaacccagtaccaccacaacaagaagcccccaatgaatcctcctaagcatgacgaagtgcacgatgaagagttgccacaatgcattacttgtgacagtcagtagtctcgtgatccgtaaagggaattaccgggtaagctgtgcaatcccacatcgcctgggaaaggtcaagtgggatgattatgag

SEQ ID NO: 163390 - DNA, 1475 bp, Cannabis sativa
  modified_base (1440)..(1449): a, c, t, g, unknown or other
ttttttttttttttttttgatgaccttctatttggttgaaagagcattgaaaaaatataaagagagagagtgagaaaagggcatgaaatgaaacagtagtattaaacacagtcatgggacacacaatgcagaggattttagtggatggtgtaggagaaaaatgcaatcattgatatacaagtggctctctaacaatgactttaggactattatcattcaattttaggttttgggttagtaatttagggcaattagtaatttagggcaattagtaatttagggcaactcttgtcaactcaaatttagagttaaattagggtactattttatcactatttttttttttaattccaacagtaatattaaaaattataataaaaataatattttttattataatattattttattaatataataaaaatgtttacttaataaattaattatttaattattaaaaagtaaaaaaaagaatggtgtggtctaccatgcactgttaaactgtaaattcttatcaaaataagatacgttttactgctcgattggaatattatgtagaaaaaactacattatatgtaagcttttaaagtgtttttggagatgggcttaataattttttttttctttcccaagtctcctattaagagaaatgttgaaagacatttgttattgtatatcactattaatataattaaatatcagatcttacatattttaattaataactattataaaatatcattaaccttcaactcaactcaactcaaagtagtacaaacacaattggtataccatatattaatactcattatataatacgatgatagtgaaatcaagtatatattgcatgtagtggtagtaatagagtaagtaatatatatgtatatatatataatataatgttacaatgattgaaattgaatgatgttacatacttacattaattttctttttacaatatattatggtcccaacccacaacccaacatgggtctttcccttggttggtccaaaattatctaagtattgagacttgtgaaaagttttggtatcaatgaaacttgtcattttaataaatcccatatctcccacactaacaaattaatcagctatatatcaaacataattaaaatcaactttattatgggtaatctaataatgttaaattcaaattgagatgggggacccaaaagatatcacttatgaaaaggcagagtaataagatgtaataggttctgaagtaatagtagcctttttcaaaagaaaaagaaaatagtcattactttgtctcttatgtttaaccagaaaatgacataactaacattgaactccctaatcacacaaggactacatgcataggcctaatattatagtaatataaccctatataaccccccatattatacaaaacttaaatatgtatatatatctttatatatnnnnnnnnnntatctaacggcatttcttggtttaac

SEQ ID NO: 163391 - DNA, 2137 bp, Cannabis sativa
aatctaattaatgtggtaatcgaatcggatcctcctggcactccttggaatttaatgggagtttatggcccgcccactttagcggggaaagaagccttctggaacagaattggtgatgtaattatgaacaatgtgaatccttctatgattattggtgatcttaatagtacccttgcggaccatgagaatcttcactactcaaactggaggaatccagcccgttactcgtttgatttgagacgtatggttgctagaacaggcattgtagatttggggtcacaaggaggaaagttcacttggtttcaaaaatccaaagtcacagggggagggtgcggtttaaaaagagctcgtcttgacagagctttggcatcgatagagtggagaatgccgtacccgagtggtatcactcatgcacttagtgcagctacttcagaccatagaccgattcttctcgacacgaatgggggagccaactgcagtaaatctcaattcaagtatgaactaatgtggggaagagatcctaaatgccactgggtagtcaagaatgcttggaaggagaagcttcatcaacatccaatgattaatttctaccgaaagcttaagaagacaaaggaacatttagcgaggtggaacaaagtccatttcaaacaaatcggacaccaagtaaatgaggctagatcatcactccaacagctcgaaggtcgggacaaagtaaatggggaggacctaacaaaagctagagatagtttgaacgaagccctcgccagggaagagattttttggagacaaaaatctagagtcaagtggctacaacagggagatagctgcacaaaattcttcatggctaccactgtcatccgacggagacgaaattacatccaacaggttcggttggaagatggagggtgggagagaaacctaaataacatcgcaaatttgtttgttgaaagattcagcaacacatacattgacaaaaaatcggttgaccttccatcactaaatttcctagaggattgtggtatttcgactcaagttaatgagcttctgaaagcttcccaaccgacttggaaattgagaggtgcatccgatctatgggacaagaaagagcccctggacccgacgaaatgtccacggggttctatatgcagcattgggcaacggtaaaaagagatgttctggatatggccaaccacttcttcagcagcactaaacttccccagtgcattaacaacaccaacatcgtgctaataccaaagaaggaatgcccgagtggagtcaacgattataggccgattgcactgtgtaacgtcgcctataaatgcatctcaaaagtcttagcacttaggctaagaaacatcttaccctgcatcatctccccagcccaaacaacctttgttaagggacgactaatagcagaaaatactgctgttgcaaaggagatagtccattcaatggggaagaaacgagggaaaaatggatttatgatgattaaattagacatggagaaagcgtacgataaaatgagctggaaatttattgtagaagtccttcgaagcctaaagtttgatgaaagatttataagatgggtgaagaaatgtattgaagttaaaagaatggggattctgcttaatggtactgtacaaggagtgatttccccgaagtgtggcttgcggcaaggtgacccgttatctccagctcttttcattattgcagctgatgttctctcccgacttatcctggcaaagaatgaggtaggggagatagctagtttcaagtttaaaagaggcggactagccattacacatttgatgttcgccgatgacataatattgtttggtaaagcctcagttaaggaagcgaaaagctttctaaattgttttgacgaatagtgcgcatggtcaggacaagaggtcaattatcaaaaatcaactattcacttcacccagggtgtctctaacaagaaggctgatgagatcatgaacgtcttaggaatgaaaaggatgcacaaagatttcgcgtacctcggattgcctctatttaagtcgatgaagagagccaaagacttaaatttccttgtggagagggtcatgcaacgagttaaaagttggaaaacaagattgctatccaaggcaggtcg

SEQ ID NO: 163392 - DNA, 1631 bp, Cannabis sativa
  modified_base (1589)..(1606): a, c, t, g, unknown or other
ggagaacatcctcacgatcttctgttttgtcgaaaaaaatgccccaaaccccaggcttcagagtcttaaacctccaataacccttgagcttccaaatctggctaaggatatctttaagcctggttcttgaaactcccttaccatcaaaaaaactggctagtacaccagtactaactacttcagctgttaattcaaaagatggctccagatcgatggtcatagactgtaggaagttattacgtagtctctcgagttcctcattggacttatcagtaataccgttaggcacttcaacccccccttcctctacaccagctacatttatacctcccacctcagcatcattaattcccccagcatcagcttccttaactcctccactgttaacatgagatagttgttggggcgaatcaatgctcataatgacttcagggacctcttgtgaagggacaggattttcatttgcaagagcacgtgaaccctcattattgtcccccattgacacaccaggaaaagacaaacggaacttgagagaaagcagaaagaaactcacaggaaaggaataaacagttgaccaaagcaagaagagaagctaaaagccaaactgaactaaggaaaaaaggaacaaagttgatgcactgttaaaaccttaaaagcaaggtaaaggttaaactatgaaaagacaagaacaaagttgatacactgttataacctcaaaaaacaggtaaaaggttaaactgtggataagacattgatcgtcaagttggaattccaacactctcaaccgagagaaaaactgtgcaaattgtctgttctctccaatgctcactcaattttgacactatttaaaatcacttccttttagccaatttaattactcgtacaaattttatcccattttcaaaatctagttgataataacattacaccgtctctactctactaatagagtttcccttattatattttccatgtgatcttgctttctattattgttaattgtccaaatttaaaggaaactaatagtaaatcgttcgattggacaactcataaccgaaacgagtgcttattattctttcatatgaatttgttcgatcatgtgtcacataatttatttatttttagcttaattaattatgtaacacattataactgacaaaatttggtgggtattttttcaccaaacctagatttatttgttttcttttttgaaacatagttaagttattatagttcttctaactagttctgaaaatgaaattttgggtccacaataatgaatattatttttaaagcaacaatatatatgaccaactttctgaatttggaaaagaatattgataaagattagaaatatcacctataaatgaggttaaataatattaatatgtaattacatcatcattagatgttttattgtttaattaagcattaccttgatcatcataattctttatagtaacgtagagagagatcttggactttactaatattaattaatatagagtgaattattgtatgatgaacttttcttaatttggtcccaagattttaaattaacaaatacactactctctctctctctctcnnnnnnnnnnnnnnnnnntctctctcaatatatatatatatat

SEQ ID NO: 163393 - DNA, 2130 bp, Cannabis sativa
  modified_base (496)..(503): a, c, t, g, unknown or other
agcaacctaccttttgtccaacattcactaccatgacatttactgtacacgatcggcggtgcatggacacttgtcaacattagacaatactatgttcatgttgaacggatgacgattatccctcaattaggcttcacctacccgacccaaagtcaacattataatgtattttactcaggggctcggtgcgggtggtgcagtttttgaacaatttttcaaaccaacccacacataccgtttttctaattttccaaaccgcactcgcaccgcaaaattaaaaaatcgtagaaattgcaccctaaaaaatggtgcagtgcggtgcaattgttacagtttctgcagtttgaactatcaccaaataattaaactatcataaatacaataaagcttgaacaacacatgtcaaaaatatcataaaacttgaaaaaaaaaattaagtttcaacaatacaataattagtgaactttgggctggacattcatatattggacctaannnnnnnnaaaaattagtatttttataatgtatagtgcgatgtggtttgaactgcatattaacaatttaaaaccgcaaactgtactacactgcgcggtttaagaaaaattcaaaccgcgaccgcaccacaaagaatttcaaatcgtattttttgcggtgcggacgatttgagtggtttaatgaatacctttaaatttaccccatcaatgggcttactttcgtataaaaaactctaagggaatccgagttcacctaaggacttggtttcagcctataaatagagctttatcgcttcatgcaaaagtttacgaactttggctaaaaactctacagaaatttagcaagaacactcttatataatatacttcatagttaaatggcttaataatattgactcgtggactaagactcattaatgccccaaccacataaaaattctctatcttcttcatttcttaaatatttttccttagcttaacttattattaattcaattttttaaaaatatcgataaacatctactattaatacaataaatactattattattttaagtgctttttttcctataattttttctatatatactttattatagattactccaaaaagtaatataggaaatatttttattatatattttttctaatatatatttatattatcaaagaaataatataaaactatttttcaaagcctattattattaaatttcttagaatttcctttatcaaagaaagaaaaaaaaaacctttataaaaaaaaagtcatataagaaatatattttactatagattttttctaatatatatttatattaccaaagaaatactatagaaatattttttaaatcctataattaaatatctagaaaaatccttcattagaaaattaaagaaaaaaaatctaaaaaattaattcttgtcatatttttttttctacaattataaataggaaataaaataactgttatgaatatcacatcatttatagacaattcactataagagctcctacaatattattatctatcatatttgtctgaattttaaaacaataatgatttttttatacatatacattgaaatactataaaatacatttattaatgtgacaaatttttataatggatgattgtttaaattgagtccctaaaattgacaagcaatatatcattaatttaaagtgtgtgtactatttgatatataaaaaaataattgtacacatatcattattcttgtaaaaatgtaatttaagttataaataatattttcattggagaatggagattatatgcaattgcataaattaagaatgtgtgtatataagagaatataaataagtttttattagaattcggcaattatttcatcaaggaatagattcaataaataagaacttgaatcgagattgaatttaaattttttatgctttatttttgagttatttggcgtctttagatttgtttagttattgtctaaccaatctaaatgtgctacatgactcaaaagattctgaacgaatgatatcactcttattagttgacagttagaatttatttttaaagaaggataaatactattttggaccctttgttttacaaaagttacaaattagaccctgtattttgttaaa

SEQ ID NO: 163394 - DNA, 962 bp, Cannabis sativa
tttttttttttttgaaatgaatcaaataagtagtgttttacttttccaagcatttgctttatattggtttcaaaaatttcaagttaacttcaataggccatacctagaatacatattttgattatagcaaatagtacataacgtctagtacactaattctaattatagcactaattagaatcaatgaaattggaaggcagagatatgtttttttaattattattattattttaagaaaaagaagttttcattaaaacaaaaaagcctgtgcccaaaacaatcagatcgatcaaagacccttgaacttgaatattgataattatccataaacactataacacaaaactacaaaaagctcaaaaaataaacttaaaataataagaaagaggtcttctttttgccggctgatgttcaaatctcacatagtaaattgggtgacaattctacaatagtccgctgccaccctacacacattcaaacaatcctaattcaaataagaagatgacatctcatcaactggataatagagtaagatcaatttgttgatagaacacatattatatggctctcctaggaattggaaaggtttatgttaattttgtgtagttgttatctgtattctcgaatgctggtacctcacaatcgcaagtagtctaatattttacataaaaaaaaaaaaagagagagaggtttttgggtaaatattattatcaaatggtttaattgttaaaaaaattacaatcgagacttaaatattaaaacaatgttatttataaatattaattactaaaaatatctatttaatattttaattagtttcttaaatatataattaatttaattttagggaaaaaaaattacctattagtaacctgttaaaaaaatatagggttattttcagttttaactaaaaaaagtaacaatattacaaaaatacgttcagctagccaaataaacaaata

SEQ ID NO: 163395 - DNA, 1246 bp, Cannabis sativa
cccccccccccaccaaactgacgtaaccatgttcttttgggaggtgatcaacatcccttgttgtattcaagggagaggtctacaattgtttattactaatttctttccaaaattcaattttccatcaagaattaaggttgctcgagatatttcattcttggatgaaaagaaaaaaagttgagaaaggaattcatcaatagttgatagttagaattgaactatcaatcataatttttttttttcttattttaaaatatataaaatgaaaacagttttattacactttttttttttttttgaatgtaacatcgaatttttttctttgaagagacttgaagtttaagttgagtttaatgatagatactttattgagtaaaatgacagaaaacatgcccctcatgtttgacaagaattgggaattttaaattgtagcagcatattgcttttatcttggatctaagattcaaattggatttattcataaggttttagttagctctataatccaattttcagctgaaaataataataaattgagaatgtgatgacaaacttatataaacgctataagaatacgatacctctttctaattcttctacgaagcaacaatcaagtggattcacaccttttcttattaagcaacagtttgcctccaatgaactaactagtgatgattgagatgattatcttgctgatagaaaagaaaagttgatgaaggatggagaatgaatggttactagcacaatgatgtctttccacattgcaaagagatgtttgttaggacaggaagtaataaatttataggaattgatgactaagagaagagagagtgtgaattagtgttggggctgttagtaataaaagggagggggagcagagtgcaaggtgtgaaggatttggattagtttgtaactgtttgggagagagaacagggctctcgaagtccctgatatcaataccagtataatttcctctatttctactactgtgttctttgatttgataggaaattcctatcaatgacttggttgttcaaatgtctacagttgcttctgaatcaatttgttctactagagcagagatactcgacctatttaaaagttctttgcctccaaaaatgtttgaagctttagtgcatgtttggcatcataactaaaaaactgtttttgtttttaaaaacagaaaattgtttttaaaaacaatttggcttgtttggccttgttttttaaaaacaattttcagaaa

SEQ ID NO: 163396 - DNA, 4147 bp, Cannabis sativa
taattataagaattattactgttattttcctgaaaatagtagtaataataaggattactactatttccttgagaatagtaataattataaggagtactaccacttacttgtgagaggtagtagtactgtgaacatgataatcgtgaagatggccatgataacggttgttgtaattgatgagtactataattactcatgacaaaagttgcctgaatggtcggtcggtttgataaagggcgtgcacttgccttagcgacactacaatcgcttatttgtgccaccgaaaaggctgagcctgatgatgtcaagcttgaacgcgatgacattgtgttctaacttccttaatcttcttagttctctttataggaaaactaggttattaattagcaatacgctaaacaattaattttagctagtaataaaaatgtttggaaagctctatataagttatctcctaaatgttttttgaatgagtgatcattgtgatataatacagttaaatttataaccccatgtcacatataacacctaattgttaataatatccatggcttgaatttctctaaactttcgtaataataaagtatctaaaatttaatatatatttgacttgaaattttcttaaatgagaatatgtagttaatatacacgttggatattgcatgtgcataaatatattttgatcatgtcacaatatttattgtaactaaaggtaaatttgtgacaacttgtatttaaaatattatattttagtcacaactttttgttgtcactaaacgtcataatatgttatgactaaaaaattatcactaaaaatttttttgtagtgaatggaaaagatatcttgattagactacaaattattattttaactaattgctattaataaaatttcattatttattaaaaaaatatatataaatataattttttaaaaaataaaaaataaatttaaaccggcgtataatatatatatcttcgtagaaagctacttgccaagataggtagcatgcatcatgacgtggttagatacataaatgcttaattataacaagttaattaattattaaacaaagtctttcttaattaattatgactaacatcatcaatttatcagaatgactttgaaacagtaaacaaatcagtctttttcatcaaaattatatatgatataattaagtaaagaaagtaattacaaggctttttcgatgcaacgtaaaggaacattcaacaaataatttgttatatttcttaaatattgctgtgtgattcattctcttcatcttaccattaatattctttaaaaaattactttgaattagccttcatatagaaaaaggaaaaagacagtttttgcttatataattgagatgctcatagctagcaccgattcgggtgaaaactttttgccggtgccgatttacgctaacaaaaggtaaattgttgacaatttttagtgatgaattgtgaaaaatcgtattttttgcaaatgttaataattttattaaattttagtaaaaatacaactgtaacagactgcagtaacaaattgtaatcttgtcactacagaatacaaatttgcagaatcaaacagaaccagaaataaataaatgcagaattttaaaagaaaaaattgacacaagagaattatatatggcatcagtattcttttcaaacactactagaacgaggtcacgctcaaaaaaataaaatcaattagtaaagtatcaaatattgcaaaagtgattgacttaaacaaatttagactctttctagtgatttttcgcagccttttgtaatccatcttgctaatctgatctctgaaacacaccaagtaataaactcccttcagctattgatgtgtacttacttcctcctaaagtaaggcttaaacaaatctgctcccgaaaatatatgctcacttcctcccaaattgagacttggaaaagtcttctcctgacacgcttgttcaaagcttctcttcaatctattctatgaataatatgagatcataacaagaaaattaaaatctagttaaacactctaggtttttacaaatgaaacactcttctcacaaaggtagatatgaaaatatgagcctcgaagagataaaaaaacattaggatgctctctaagtcctaattataaaacatagcaaccccaaagataggcacaaaaacgattgcccaactatacaaaactttcttaaaaaatttcctgatttgcagtagaatcgaactttgcagcagcacatcaagactagaaatgaaactttttaaattgaactaagatcacgaatttagacttcaaacctgctaataaagtttgtttgatttgctaaaaacatatcaaaacagaattcatcaattagaaaaaagaaaaagtcaagtttctcaaaaatagacaatattccataaagaaaatttcttctcttggaagaaaagattctcaaacaaatgcaactagctgaggaaagaacttcccataaattaaaagagcaattagaggcatgaaattaacacaataaaatcaatttaattgctcaataaaattatgcacattatatcaaaaatattttgtcaactaatttgctaaaaaagacttaacaaattggaccttgataaaagaaaaagtgagaaaattctagcgtgaaaattggagttggtagaaaacttttgccaaggcatatttgcatcggcaaaaacttattaaaacgatgtgtttcgttttagggttagtgaatcattttttactggcgcttttgtagacttttactggtgtaacgaattacgttggtaaaagcgcttgattaaaatcgaaggcacgaaagccttcttccccatttctcctctctctctctctctctcaaaaaacaatgaaaaaggagaccattattttcccaaagggaccctcccgccactatcgttgcccgaacaattttgaccgctgctcctccctctctcagttaaggtaattttttattttttattcttttaaatatttatgtttatattttttacttaaatttgtatagataagtattttgtgtaaaaatatgtaagtttgtgtatatataatgtatgtgtatgtgtgtgtatgtgtatatgtgtatcagtatgtatatttatatgtatatgtatatgtatttatttgtgtgtttgagtgtgtgtatatattagtttatggcatattgtatatttttgtgtatagtattataatcactacaacaaatattatttttaggggcgacaaattttgaggcgacataaaatcgtctctaatagtaaaggaattaaaagttttccctcttaccaaaagaccaggtgggaattttcccatgtactttttcttttgagttttgtcggttcttatatgtgccggtaaaagttacatctgtccctctgaaacaaattaaaatgtgagtattctcctgctaaaactgaggaaattttaccggtgcaaatataaaaaacactaaaaaaagtatttgcaccaaaagacagttaacttggcagtttaccggcgcaatattttgtgctgccataaatcatttttactagcgtgtattatatttgcactggtaaaagttttagcttaaaatctttggctctcttatgctccttctttttcggtgcatttggttaactacgctggtaaaagttgtatttcttatagtgtcaggaaaataacttaattgaatctgaattagttgtacaacttccacaattagatgatatttatgtctctcgtgatgttaagccaattgaagttccaaacatctgtcgtgtaaatcttgacactcaaggtttaaataatttcattgttgatgacatagaggagagttcaaatgtccaaaaacgattgtaacaataagtaatgatgatgataagtaatgatgatgaggaggacaatgacgtaattgtaacaatattgtaataacaaataataatttacaaaatattttactatttttttttgaaagaaaatagtaaactttattagaatgaagtttcaaccattatacaatagataaaagatcagcaggagcagtactcttactgaaaatagtaatacgatctgaatacaaacaagagctacgagcaagacagtgtgcagctttgtttacagaacgtttaacaaaattaat

SEQ ID NO: 163397 - DNA, 1339 bp, Cannabis sativa
agcccttaaccgattaataaaggagaacattaaatacaagttaggcattctatcaaactaaacatatatttatatttgtatatagatattttaagggctctcacacagaatgcaatggggtcctttagctaaaaacttttgagagatccaaagtgaataattttctaatggaagaaataagaaattgaagcttaatttataggagctgttaaaattaataacagagaaagcatatatggacataaggtcaagttgaaacttatttggggcattttgttttgatgaaatacaagttaagtatttttttattaataacaattcatttaaccgattaataaaggaaaacaataaagtaaaattataatatataaatgaatagttatataagggcgaacctcttatattattatttttgttgtctactatttgcttgttgatgaaaaaatttagtattttgatcacttatttagagccattgtactctacaccgttgttttcaaaaaagttcctcctaattatgtaatagttgagctaaggaagattcgagctgaagtacataggaatgatcgtagtcttggccaatttgattcttaacatgagcaagcgaagcttgagtcgctttgatatcctttggtaaggaaccatatttgttagagtgccactcaaataacctggttgagcaaagattaatattggaaagaaccattgccaatgccgaattggaactgttagttagccatttagaggatatagcctacctctttacatttctcatcctccttccacatggtttcatatcagaatttttttgcttttgagaggattgttgcgcctcatccgtgtcgaagaccacattcaatttaaaaggacgatggtcagattcacaaaaatctaaatgagaaagtatatctgagaaaaataattttagccagaaagtgttagtaaaggcccaatctaaatgttctaaaatatcaaatttattgaactatatttccaagtgaatctattcccattgaaattcataggaacaagttcacatactgagattacttctctaaattgtaaagtcatattaggatcgtgtttgccctgagcagtggtaaactaagaagatatttagcaaccacgaactttcaaaatctgtcattgctcaagtgactctcaacttcaacttgaaaggtcagaacataaacttctacatgaaaaattttatgtcccaatctggttcgacatagagtaaacactgttggattaaaaatcatttgtgggcacatatgtataatgtatatgctattataaagtgtgatacaaaattaagtgaccaattatgttatgggta

SEQ ID NO: 163398 - DNA, 2561 bp, Cannabis sativa
ttttttttttttttttttaggttattaaaaaaaagtgcatatatttttataatcaatggatgaagccaatagactggagagtgggtttttactatccgaagagagcaaaaaaaaagtttgatatttatgtcaaattaatatcttaattttatgtaaccaaaagttattgttaataacttttattgaatacaaacacatggttctattaatttataccttacatttacactatcaataaatataagggtatgtttagttaaggaaagagaattaattgtatggtattgagtaattctcatttgtttattaaactttgtaatgagaaaaattattggggcccacttaaattagagaaaaaagaaagagaaagattttctttctatttttatagagaatacatttctctcttctaacttaatttatttttatttttattttattaatgaaaaatttaaaaataaaaatatgcccttctaaaaattataattaaaaaacaattaagaatatcaatttagtcaaattttaatattttcgttatataaataaaataaaattattttgattttttttttttgcagacagttaataaacaacatttaattattttatattttaaactcattcatttatccattaattattctgattctagatataatttagtaaacgtgccataacattaatgacttataaagcttcttaacttttattaattagttttattaaaatttaagttaatttgatagttttttgttgtattaacttatattatagtgaccaataattaatgtgcttaaatagaagtatagatttttttagttagctgaagctgttgatgagtagaagctccctcctaattctataaatctatattatatacgaattttgtaagtatctgggtttattaatttttctaacaactcctaccatagtcttatatattttaattggggaggggaaaatcaatagaacaacgaataaaatcctcatcaggctcatgaatttgacgaggataaattttatttttgaaagcttggcgaggataaatttaatgaaactaaaaatagataaatgaatacgtatatataatgtaaaaattagtaagatatataataatgtaggtataacttaaattagtaaaataattgcagacattgtttacataaaaatataaggtttcgtgtgactttattagactgtggaaaacgagcaagcagagcccatcgaaagtaaaaaaagaaaaaagtcaaaagcaggcccccaccgattaatagtgtatggatttctgtttttaagcccttgtttctctattctaagaatatgatcaagatcaatataagttaattataccaattaattatctctaatttctttctatatataacgaagaacaacatatggaagatacgtactaatggagaacaagagcaagatccaaattctttacgatgcttgcagtgtcgtttttactcagaatcaaactccaaattttcaacaaatccaatggctcaaaagtcttcttggtatattatatatatgtactgtactgtgtgtgtgtttgtgtcatttttatttttcttatttgtaatctcttttttctttcttaatatatatattgttttggtcgtaggcataatcgaagccaaagatgttggaatcgatgaatttggaatatcatcatcatcatcatcatcatcattatgtgaatcttcattttcaaacccaaataaggagaattacaataagggactaatctgtgggctaaccatgtctgaaatcacgtatattcatatacatgaatgtaacgacttttctgtaagtacatatttaattatttatatacaggcttttttgtttttatatatacaagtgaagtaattaataatatgtggtaatgagcagattggtgtgttttgttttccggctggaggaacatttccacttcacgaccacccaggaatgacagttttcagcaaactcctctatggttctctttacactaaagcttatgattgggtcagtgtgtataattcaacagcaaccactagaacatgtaagattataattagttgctttttgtatagatatagataatttattctcttttcattattgataagtacatatatgtattatattattataatatttatcctttttgagtgtgtaaattatttatagttgggttaggaggtttagtaagagaggagatggtaaatgcaccaactgaaacaagcatactgttcccaaactgtggtggaaacattcatacattcacagcaataactccttgtgccatattggatgttcttactccaccttactctgatgaccttggaaggccttccacttactactttgacattctcatcccctctcttcccggtacatacctaattaatactacaatttggtatcaaattttaaatatttttatttaaaatacttaatttcacccgtcaatgttagaattatttatttgtggactaatataataccataatcacaatcattaactatgtgcccaatatttatggttaataattaataaatgtattaga

SEQ ID NO: 163399 - DNA, 3958 bp, Cannabis sativa
tatccatagtgatttattggatattttgttgaagttgatgttagggatttatttctttttattgtaaacgacttgatatgctttgtattatattaattttgttatatgagctatatgctcatgtaataaatttggttgatttacttattaatgaaaattattattttctctctaaatatatttataccgcaaacttcttaaattaaaatagtttgaaattttctataatttttactaaagtataataagtagcacttattattaaattgcaataataatatatattatatgaggtcactgtggctttgaccccgtgtgtcgcatctgttgaagttctatccacaatttttctgtttgggaaagtgattgctccaatgttggtggatgaaaaaacggtgcatgagtttgttttgaaggcctagaagttgcaggtgaatgtggttgaaatcctggaggatgccaaaaaatctaactgttttgattttggattcatgaatgcgaaggataggatgggctctggagaatggactgtggtgtgttagaggatatactttgatgcttcaggcttggtctttgaggtctacagggaatatttcatgggaagcattctgcatttggacccaaattcataacctccctcatgaatacttctcctctataaatggaaacttactgggagctcttgctggtaaggtgtgatggtggagtttgatgaaggcaaacctgtgtcgtggaagaggttactacgagttcaggtggatattgatactgccaaacctttttctcaggctgcttctttgagttatgcagtggcaccaaaatatgggtccaatttaaatatgagaaaattagaattttttgctttaattgtggaaaattggggcaccacgtaagggtgtgatctttcctcccatgtttctgttgttaatcctctaggcactcctttcccgatctttggaccgtggatgttcgtttcttttcagtttatggacgtagtttctggtttgaggttacctcttatgcacaaaccaggtctgaaagtggctcttgtctatgggagctcgtcgttctacgactatggcgggcaatggactcttggtcgcaggcgatgttgctcatcatcctaggccacctactgtcgcgagaaaattgatgattgggactagaggttcccgtggtcatgccggtctggcatcgtgggttcccaaaagttcgtatggcatgtgtgaagcacccattgccgattctggtaatggtgttgaggagttaaggtctgatgttaagctgccgtctgcggatggtgctgttttagaagttaacagtttgaaaggttgctcaaagacagaggtgaatttgaatattggtgaggtgagtgttaatggaaggaaacctggtcattgtttggtatctaatggggtaagtgttatttcttttgggcctgggacaaaccctatgcgagaaggtggtgggccggttgtggagggccacagtttgggccctactattgtgggcagtcaggcgggccctagttgtaagttggaccttgtgccttttttgtctgggacgaatgtggatgcactaagtgataagttggtggtgcagtcgcaggggccgagtattgaggcaaagaatattaatgggtccacggatagttctgtgattgggcaggaggtgaattttcttctagatgagggtagggccttatctaatttttttaggcccaagatattatactacatgatctaaagaagtttggggagtttgatttttatcagatacgagcttttggcggtgacattggagtttctactgccttggaaatcaatgaaagaattattccattcaagaaaaagaagcttactgatacttcctcctcgccgtgcactagaccttcaaaaaattcttagataacaccctggggtgattcgtgatttcccttgggattttaaggaaaggactaacggggttgtttatgagcaaatgcatgttaactctactagtcaaaaaggttcttcatctagtggggacttgctgattagggtgcctggtaattgctctctggtggaggatgcagattcgactgaagactctggttctcgtgtgtcgtctcactatgtttcacctgtggaggagaatgagttctctgctccacaagagtcatgagaggcctgtcttggaactgtagagggttagggcagacctctacagttctcgaactgaagtctcttatttggtcatgctccccagatttcatttttctgaccgagttaaaagttgatgcttatcatatggtacgtactcttaagtcacttaatttttattttaatgttgtgtgtccggcgattggtactgctgggggaattattttggcttggaaatatggctttgtgtttgaatgtttttcttgctctcagaatcaaatcttgggtctggtgtactcagatcccccctctcacccttggctccttacctgtgtctatggcccgccttactaccatgctaaaagaaaattttggttggatgtcatgagtcttggtgagaggtttggtggtccgtggttgattttgggaaatactaattttgtgctgagtgagtctgaaagaatgggttccagaggtagagataagttcgtcccgttcatttcaaatctggtggatgccactggtctcattgatttgctcatccaaggggataagctcacttgggataatcaccactttggcagagatcatgtgaagtcggtgcttgataaagctttggctaatactagttgggtaagtcttttcccaaaagcaatttttcactcattacagatttacaactctgatcataggccgttgtgcatacactctaatggaaaggcaaccaaatttagaaaggggctttaagtttgaagatggttggacaaggaacgagaggagtaaattagttgtcgcccatgcttggtcgtctgttgttcacccttgggctccggccagaatgttcaagaaactgggagccactcgggtagctttgttatgctggaacagatctcaatttgggagaatcgatactaatattaaagagctagagcagcagttggaccaaatgcaaaagctaccaactggcaataaagactggaacaaggagtgtcaaattcggaatgccctaaatgagtcattacagagaagagctatgttctagaaacatagggcccgaatctcttggttaaaggatggagatagatgctctaaattcttcttcctttcggctgctatcagcggtagacgaaatgctattgagagtattttgaacaaggatgacatctgaatcacggatagagatctgattgggaaagaatttactaattttttaagcggtgttttcactgagacagtcccaagtacggaggtgaattgtgagtgtctagttcagaatggtctctctgagttggaaaaggaagaactgactagaatcctgtctgtggatgaaattcgaaaaacactctttaacatgggcaatagtaaggcccctgggcctgatgggatgtcgatttaattttttaagcaccattgggagtttgttggggacgatttctgtgacgcaatcttagacttctttgtgactgtttctatgcacaaagggatcaacgccattaatatagtgctcatccctaaagtctagaatctaaagagaacccaacactttaggccgatttctttgtgcaatgtgacttacaaagtcatttccaagatcatcgccaaccgtatcaagcctatgctgcctagtaggggtattcgcggtgcgggtggtacggtttttgaccattttttcaaaccaacctgcacgtgcagtttttccaattttctaagccgcacccgcaccgcaaaactaaaaaactgcactgcaaaaaatggtgtggtgcggtgcgatttctgcggtttggactatcaccaaataataaaactatcacaaatac

SEQ ID NO: 163400 - DNA, 1547 bp, Cannabis sativa
tggtagaatccgcaggcaggtaggcttgttctccattctcttcaatctgttttccgcttttctgcctacttccttacccctcctccttctaaaattagggttgactcaagtatttcccagaactgagatgaaaatgtagcagtctttcctcgactgtacttccaaaatttccaaactgagtttagtcctcgaatctctgagcacaacgtgattcccaaaacctattaaatgagtcgtataaaaaatagtgaggctgagataagtcttccatgtcaagggttcaatggaagatgtggaaatttggagtccgatggagctagtgctttagcttgtgacagaagttgtgaagagaaaaatatgtcaggaatatccagcaatctttcggaagttatatgttctggttcacagtcggatactgtaagtggatcaatggatatgtcaaatcactttcagattatacggtttttgggaatatggttgtaaatgatcaaattaataatctattgttgcttctctgcagaaaaaggctagagggcacaaggaattgacttttcaagatatgtatgacaacaacaacctatttgacgaggatgatgatgacagtgattgggagcccttgcagaaacatgtggaagtcttgaggtggttctgccccaattgtacgatgctcaactttgatgacattgtccactgtgatgtatgtttatggtttttgccccttctttctgggtattatattttttttttctttttcaatacttgtttggtgtttcttgcaaggtaacttggttcaatctcttatcgtttatgtagatatgcggtgaacacaaggaatctgggatactgagacaaggattttttgcctctcctacgtttcaatattcagagttggaaagtaaacaaatacataaaggtgttaacagattaaaactttctattatatgatgaaaattaattgttttataactttgttttcctttcatggatgtagatactttttcacaaaattctgctccaagtagttgcacagcaataggtttcgacgagaggatgttgctacattcggaagtacggtgctgctgatctaactatcattttactaaattccttttctgatttctatttcatttaccgttttctttaattcaacactattattcttttccttctcttcaatacctgctcatgcgatctctgtgaaatacttgaatttgaaatgagaacatttttgtggtaatgcttcctttattttatttgccccatgtttgttcaaaatcttacgtgcagaattctaatatccattaagtagttacatctgagcttttatttcctcccattattttgtgcatgcatttgctatatgtttcttttctgatcatggcggagcaagtcattgaatttgctgagttcttatgtaatacgtgtttctgataattgttatgcacatataatttttgctagaatgtctcttttctgatcatggcggagcaaatcattgaatctgccgatttcttatgtaatacgtgtttctgataattgttatgcac

SEQ ID NO: 163401 - DNA, 3264 bp, Cannabis sativa
tcaactaagactcagattacacagtttcaggccaataaatatttgaaacaaaaaagctttttacttataaataacgagatcaaatcaaccgtacaaaattgtttgaatcgttcaaaattcttcttaaaaattgaatgaatcaatgaatcatttttggggaatacaactaattagaaactaccataagagtcggggatataaattattgtataaattttctctcatcagatctatctataatacatagaaacggcacctgttttctcaacgatattttgttgcagcatgtccggtgtcactcaaatgcttgtgtaatttattcctgccataacaaaagcaaaagtaatcccataaaatgactcggacaatgatgaggaaatttgggagaataaaataaagaaaaggagacattataaagacttgaattttcttactttgattcaaactcttctccacatttttcacatgtgttgctagaatgctttattgcctgatcccaaggataataacacagatttatcagcaaagaacaatagggtcaatgccaaaacttacttttgaattgttcaaatattagtactaattaatctgttcaatcaacaacaaaacaaaatataaagaagggatgttattgaataccttagcttttcttcctttggatgagttctttgatttggtattagtatcatttccttttctatcatgacactgactcgcactcttcttattttctacaaaggaagaatcattatcatctcctttatcattaagtccattccccaaaacagaatgagaagatgactcctctgcctgcacattctcctttccattactttccttaccctgaccatccttgattacatccttctcaatatcttgatcattcttcttactcctctcctttcttgccccacgtttccttcttgtgctcttagtcttgttgtaatccataaactcaaactcatcgctatcgttttcaacattaactttggttgttgatgtctcattcaactcccgcctcaaaaaaccatttctcctattcttgcgtccacctaacattgcttcaagaaaacctatttcatcttctccatcttctttttcttcgacgttgccatcattgtcaccatcctcatctaagttgtcaatgccagttttctcctcaaactctgtggacttatcggcattatcaacaccataaaactcatcactcctatcacttacttgggtctcttcctctccaatccgaacatcatctttcaattgctcgactagttcatcaactccatcatccacctcatctttctccccaacttcaacttccaagctttcttcatcctcaatagaatccctaaactcagcaaccttttcgcgatgcttcttggattgctcgtgattcttccattgtttctcactcttaaacttcttcccacacatcatacaatacaattcctcagcctcagttttcttcttctcgtctacttcttcgaaacccttttgatccacttcctcctcatcttcgtcctcttcagcaattctagcccactctggctccacataagccatagccctctctaatttctctctctccaatctcttcttcctctctttctcctcttccctcttcttctccatctccaaattccttttcctcgtcatatcaataactctcttatccctcttcttcacaaactccgccaagcccctcaccgtatcattatactcccgcttcgccttcttcctcagcttcttgttctcctcttccatcactctcctcgatttccgattcggacccgccatagcatcatattggtccacccagcaaaaatccatcaccgtcgaaaaccctagccaatacccataaaaagccgtcacctgagcgtacggggaatccaaattccccatggccggagcctcccgcactaaatctgaactcaaccctagcctagtgatgaagctaatctcattggcgtacagcttattgaacacatcggagtaaaccttgtaaaaacccttccctttatcggtatagccggaataaacggtgttggagaaaaaggagaaaaggttggggattaccgagtcagggacggagttggccgagttgggatcagcaaaaagaatctgcgagcggtgagagtcgtaccaggcgcgctctttagagtcggagaggacctcataagcctgaaccagctcctggaacttagccgtggcttcggcttgggataagccggactggacgagcttgtccgggtggagctgcaaagccatcttcctgtaagccgaacggatttcgtcgggcgtgcattcctgctggagcccaagcacctcatagtggcaccgtcttcccgacgccgccattgtttttgggttcacacgctctgtgcctctgttgtgtgccgtatgaaaccgaattaaaggccaaaaaagagtagtttatggtatatttataggcttccagccaaaaaagaaaaaaaagaataatttgcaatgaaagtaaaaatatcaacttcattcaataatttaacattttaaatacaaaaaattaaaaagttcaccagaaataaaaatatcagaaatactacgatcagattgataccgagaatgtctagcaatataatgtgctattcggtttactaattgtctaataaaaaataaattaatatttaagaaggtaaatgataaaagttggcaatctttaactaaaaggccgaaaataaacctaattacttagttgctatactaaatttagtattaaattaataacaaaccattataattttaacactaattttttttctaaccataaaaatgtatacacatatgtactcgtatcatattgtacacattatttggcaattagatgtcaacttggagtgacaatatctaaatatatgtacatgtgtcatatttttattagcctaaataattttatatatttatataattttaaaataaaaaataaataaaaataatgtatttttttttctatacttatgagatttttaataaaaataaaaaattaaaagaaaaacaaaagaaaccctaaaattcaaattccatctttctctctaccatctatatcagattatcttccccatgtgacaaatctctaacactaaccatatgtttggtaagaaaaaagaaaaagaggaaggagggagaaataaatcggtttcaaataaaaataaaaaaaaatcaaaaataatattttattatgttgtttactaaactgtccgaaaaaaaaattgttgaccgagattttcg

SEQ ID NO: 163402 - DNA, 1551 bp, Cannabis sativa
ccgccatctcgtcgtgaccagattggactcgctgcgaccagatagaggtagaggctaaccactgttttgggtttgagcctcatcgcagtgaccctatatctggtcgcaacaactagcttaaaaacccataaattcccaaaaatcaggcttcttaccaaaaccaagcatttaccaatcacatccaaacttcacttagttcatgcaatctctattaaggttccaaactagagttcaaaaaatataaacacaagcattctaaatgtttaaacacataatcataagctcaaactcacaaaattaaaacatttagaaatttaactcaaatttatatgcttttaaaaactcaagaaaaagtataaccgaaattctcaagctcaaactcacagtaccaaactaaattaccaaaacaataactcatgattcaagtcataaaaccaacaaacaaccggcttacactcctcaattacaagccttaaaacaacaattaaggcttactcaagtccatagcttttccgtaacaaaccaacaaaacacaacaacatgcaaccaacatcttaacaatcaaaatcaaaaatctaacattaaaagaattagataaaaactacctcaatgttcttcaagattaagaaaaacacaaatcccctaaaagagccttccaattcttcctcaaagttaacaatttaccaagtgagtttttgagagaaagataggatcggttagaaaggatagaaccagaaaaattgatagtgttttctctaactttcgaaaaagaaacatataattcatttattgtatttttgatcaaatgaccatttttctcctaagccttaaaattaatcaatataaatggcaattaaagaaagtatagtcattcataaccacaccaatatattcacacattaatcacaaagttcataattttttggactccgaactcgatccaagctcaaatacctaattgtgatttccgtgtcaacttattagaatatacttgtagtaagataatacgaacatattatgtaataatatagtccattagcacaatatataaaaaaaattacgatttttacttttttcaagtcaaaattataaaaaatacccctaacttaattataagtgggatctttgactgcaataaatctcaaataattttacataattaactatataataatataattactcattatactccattaatttaattagggttgctaatccatttactaatcctgagatattacaatgaaagtaggggagaaagaagaatttaaattccacggacgatgtgagtaattaaagttgaatcatctttgttgcgagaatgatgttttgtttttttgtcatggagatttcaaatatatctactgtatgcttcaaggactcaaggtcttctcccaaacatctgggctacaaccaagtgaggcaaaatttgaaattttttgttgttactgttagataaattaacatttaacccaagatctatttgtatataacatagaacacaatagtagtatatgataattgagtatgtgtacctgattgatccat

SEQ ID NO: 163403 - DNA, 2163 bp, Cannabis sativa
gcttttaggctagcgcaagttgcgtgcctgtgtgtgtggtggtccttgaatcgaatctgtgtaactcaaaaatatataatttttttttaaaaaaagctgcatgttagaggaatgtaaagtgttttgttgtggcccagtggaaaatttcaagcagtagttgtgtttttctcagcagatataattgaaacaaacaataatcgaactgaaatttagacatgaataaatgagaaaacataaacatgagttgcctccgaatcatagagagaacaaataaaaaagggtatttaaaaacagctgaaagaactatatatatatatattctgttagagtcttatgagactatctagtaatatgagaaatgaatgaatccaactcaatccgagaaattcctccttcagcagtagccttcctcaactcaccacccaattcctcagcttttttcctaatctcatctccttcatttgaagccattaatctcttcacaacattctcaatcacagatgagctcactaactcatctctcttttcccattcccgaaccttcagaccaactttgataaactccgtgactaaagcagcattcataggctgatctgagtgcatgggccaagctagtaagggcactcccaggctcatactctccaagcaagagttccacccacaatgactcatgaacccacctgttgatgggtgccccaaaatctccaattggggcacccattccctcaccaccaatccctttcctttgatgctttcctcgaacccttttggaagttgacgtcctccaactttctggtcatcaaaaacatctcctcggtctgcatctctcaaaacccagatgaagtttactttacttttttccaaaccaattgctatttcttcaatctgcttgtcctccaaaaaagttgtagtcccaaaagagatgtacagaacagatttaggcttctgtttctccagccactctaagcaataaactttctctgaaacgttattgatggagttaagtgggatcttcttgaatgttgttacagtctctaaaggcccaattgcccatatcttcacactctcatctttttcgcgctctttctcgagaatgaattccagaaagtctctttccataaacctgcaagcgttgtaaagatgcccagatttgtttctcctcataaatggcatttgtttatctttgaaagctataaatcttggatccaaacacccttttaatgatggaaccttgggctgattatcttgatcagcttcaaagcctattcccatggcgtctcggatagaggagaatcttgaaatggaggagatacaatggaaaacatattcttccgagttgggtgctagagaagcagtgtcctgaacgacatagctcatcaagttgtcgtgtataacgacaactcttctggctgtagttgaaagtttagtgaggagagccgaaaagggctggcgaaggtgaacagaggcttcgaaggctgggattagatgtgaagggaagttgtcaggagtcttggttggcttaggagagagaaagtatggagttgggaaatcatgaaaatggattttgggggagtggtgaagaagggttgaagctcgagatttgacctgggaattgtgaagagctgagctaacgtagtggactgggatgtcgtataatgaagtaacgacatgggagagctggagaagctggtttaggtggctttgagctgggaaaggaaccattaccacaacaacaggtgaagatgatgataatgaatgttgtttcgagctgtgatcttcagaagtcgccatggatggaacttgtggaatatttgttttctgctctttcagcttaagcgcagaagagcgcattgtttgtctcgtcaaaattttacttttggaataagatgagacgagacaggagaaaagacaatactattgtctgtttggatctcggaattcggccagtaaaaaagagacgtatttatttttgattggaaaaaaaatagttaaggtaagcaatatttatttatttattttttttgaaagaaaggtaaccagtatttatattgttggctaatctgagtagtttagagaatctccatgcaaatgcaaattagtaattagtaattagtaatttatggctaaaatatagcttattttgtaaaatatttgttttttttt

SEQ ID NO: 163404 - DNA, 988 bp, Cannabis sativa
  modified_base (938)..(939): a, c, t, g, unknown or other
gtgttaccaaacggcaccctagttaattgaaaaagaaaaaatcttttgaaatggcagtatggcaccattagctagtgaatgagttggatttttgtccaactaggcatcaatgttgatatgtgtagtgtagggtaatactaataggatgtctttttttttttttttgaaggaatactaataggatatctattatgtttcaaataattttttgcaatacaaagctctcgaaattgagtaaacacttgaaaatacaaacacattgagaatttctcaaatttggtttatagtgagaaagagcattgctatgggttgctatagcaactcaagagatacttaggtgttgcatggctacaatgagcattaattgtaatttcatatatatattaatataaaaaaaaaaacttagatggttgatcatgtgtgagtatatgtgtgggaggaggaataggatagatttaaaatatgtataaaaaaatagagtattccattttcaaagaaaaaataaagactgcacattaagtataataaagttatttttttttaaactccctatgatgtatatttgggcaccattaatatttaacatcttttaaaagtattactttgtgttatgacagttagttgtaactgtcactctgttgtgtctgttaaattggttagtggttaacttctgttagctgattttcttgtcttttcctagttttggttagtgcagtgattaagtgccttagttcttgttatatataaaagcttgtaacaagtgtacttaatcaatgaagagttttttctctctttctttctttcttcctctttctctctgttcatttttttttctctttctgttactttcttaatgctgcaatgtctagaagactgaaccaattcaatactttacaattaactatcgatatttcttaaaaatattatattaaattatnngagactcgatatttaattacactaataataatagggctatttacaaaaa

SEQ ID NO: 163405 - DNA, 1501 bp, Cannabis sativa
acctaaaacattgacctctatagtaatttgcaattggtagtctaccaaatttctaattacgttgcaaaatctagagagttgttgcaacattataagcatcattcggttaggcaaatccctagggatcaaaatacctttgtgaatatgctagaaaaattagcaacagatctaaagatagaaaaatatggattagtccccatcacacatctatctgtccaagcacagaaacactgggggtgattgtaattgatcatttaacttcctagatggccccaatttagaagtacctagaatctagaacactttcggatgacagagcagctttgcaaaagattcaatattaagccccaaggtttgtgctcatggatggaaggctatgcataagagggttgtcaatgtcatacttgagatgtatagttagaattgagataagctctatcattcacgaaatacatgaaggattttgtggagatcatacatttggacccagtttgtctaagaagatcatccttcagggatacttttggccaaccataaagaaggattgtatcgaatatgtttgaaaatgtgagcattgtcagggttattcaaaaattcctagagctccaccaatagagataaccctgatgagcatggccttttgttgtttagggaatcgatttagtaggatcacttacaactggaaaaggaggaatcaaattcgccattgtcactgttgactacttcaccaaataggtggaagttgagcctatgaacacggtaacttccaagatagccctagactttgtcatcaaaaacattgtatgttgttatggtcatccacacaaaatcgtgtctaataatggaaaacaatttgatagtgatcacttcactgatttttgtgccaaccacagaatcataaaaaaaaaataggtgaacctaaatcacaagcaaatagacaagtggaagcctttaacaacatccagaaaacaacgttgaagaagaagctttaggcatgtatatcgcaatggctgaaagagcttccaatggttctctaagcatacagaacaacagaaagaacatcaacaggatacaatccatattcgatggcctatgaatgtgaagtagtgatcctactagaaaccatagttccttctcacaggagggaaacttatgacccaactcaaaatcatacattacttcaggaatctttggacctaattgaagaagtccaagagaaatcacaagttcaactccatatgtatcaaggaaaagtcactaagcatttcaattctaaggtaaaaacttgaaagtttgaacttggtaaaattattttgagaagagtatattcagcctctcaggagccaggagtgggggtccttggaccaaattgggaaggaccatacaaaattcaagacaaaataggtgatggaacatatcacctgaaaatgttggatgcctcacaaatttcaagagcatggaacacagaccacctgcgctgatactattagtagacttgggg

SEQ ID NO: 163406 - DNA, 651 bp, Cannabis sativa
  modified_base (606)..(607): a, c, t, g, unknown or other
cccaatctcacacttgttgtttgccgatgatacccttctcttcactgttgctacggcttcttcttgtcatgctataaaggacgctcttactatgtaccatcttgcctcggttcaagttgttaactatggtaaatcttccatgctcttttcccctaacaccctcccatctatatcaaattattttttccagcacctaggtatgaccccaaaaccatttatcagtaaatatctgggtgtccctcaatgttttggcaggtcgaaaaaggatagttttgacttcattcttcatcgagtcagcagtcatctcaatgtttggaacaacaaacttttctctagagcaggtaaagaggtacttttaaaagctgtcatccaggccataccatcttatgctatgtcgtgcttcaaaattcctttctctatttgtcacaaaattgaaaagttaatggcccaattttggtggggatccatggggaaaggttctaaaatacattggaaatcttggcaacaactctgtgtctctaaattctttggcgggttgggatttagatctcttgttcatcataaccaagccatgctagcaaagcaagtgtaaagaccgcttagttnnatttggaaattagcagttaatcttgattaattatgaaattattt

SEQ ID NO: 163407 - DNA, 1270 bp, Cannabis sativa
cccccccccccccccccaactaggcattttatttggaaaacttccaatcatgtcctgccttgtgctttaaatcactacaagaggaaagccttacataaccatacatgctctctttgctcttgtaaagtgaaaactatctctcatgacctcttagagtgttccaatgctagatctgtgtggagaaagtcttcttttaaaaaaatttatcttgcaaatgttaattgtgatattaaggagttttttcttcgagattttgagagtttgcagaaagagaagttaggtctattttttgaaattatgtggatgatttggattaaaaaatgcttatttgtttcaaaaaagaacgacatgctgcacagatatagaaaattgtgtttttggtttgctgcaagattacttggagcccaaatggagcccttttgcaacaataactactcagcagggagagtcataacattttgaacaagtcagtgagaaaagtgcttgtctgttcgagactaccttcctcagattgttacaagttaaacacaaatgttgccttggatgaaaagagaagaaaaattagtatgggagctgttattagagactgtaacaacattgtggttgtaggtttttcctctccaaaggtaggagcattctctcccatttatgcagaagctcatgccctttatcaagtgatgctttggtgctctatagcgtgtttgttgattactctgatagaggtagattatcttcagctagccacaaagatcaagcataaatagaaaaattgttcctcgctttcaaatttggtgttcaagattgttgagtccctgtctttattttctaatttgtctctgtattatgtacctagaagtgtgaatattttggggcataattttaactagaaattcattaggctagatgagaatctggtttggaggaaaattctttcaaactaacttttagtaaattgtaactctgataataacacatagaaagtgctaagcaccattagtgacttttagcatttctcttatttaatatgtgcttgtgtttatttgataaaaattataaatggcttttgaatatacaccttatttaatatgtgcttatgtttatttgataaaaattatattttaaagtattgacactttttttttaaaaaaaaaaaacaataattcaaggaaatactaaattttttagtgacctgtcattgccacgtgggcaaaattaggacttaacgaggctggacagacgacaccttaaaaatataaacaaacagtacttt

SEQ ID NO: 163408 - DNA, 2746 bp, Cannabis sativa
gtgtgtgttatttaatataaatatttattattataggtgattgctggcgggattgcaattggagttggtgttcatgcaggggcacacttaacgtgtgattttcctaggctgctacatgcaactgatgagcaatataagccaatggaacaattctttgggaaagaacgacccaacaactattggtggttcttgaaaggcacagaggggtggactggtttggtcatggtgttcttaatggtcgttgctttcacctttgcaccatctttgttccgccaaaataagcgaaagctacccaaggccatgatcaagaggctacctaaggccctcaagggcctacctgaggcccttcagaagtttggtggtttcaacaccttttggtattctcaccacttgtttgtcattgtttacatcctctttctagttcacggttactatctctacttatctaagaagtggtacaaaaagactgtaagaacaactaattcttttaaatattattcctttggtaatttctaaaatcacaattttgatgttctaataaaattgttgttagacatggatgtatgtagctgttccaatccttttatatgcctgtgaacgtttaattcgagcatttagatatggtttccaagcagtgaatatcgaagaggtatgcaactatagttaattaatcttctttcttccaaggaataatgtatatatataaagtaatactgataaaagattaataccatatgtttttaatgtacagtttaaagtgtttcctggaaatgttctagccctacaaatgtcgaaacctcaaggatttgaatacagtagtgggcaatacatatacttgaattgttcatttatatctccttttgagtggtaacttgagtaattgaaacctatagctgtattcttattgctatattgttgttattttgattatgataataattgatcatctaattataaataatatatatatgtttaaatcaggcatcccttttcacttacttcggctcctgatgacgattacttaagcgtccacattcgcggatcgggtgactggacaaaaaaactcaattccactttctcaaaagttagaatctatttttctatgtagctaatcaaaatctgatatattttttttccttaaaccagaaatacatatatatatatataaaaatatataaataatgcatgcataatcttggtatgatgtgtattgttgtagttatgtgagtctccatctactaatcaaagtggcttcagtggtctaccaaggtatgtacatctaattatgtagtatccaatcgatcactatttttagctatttcagaacatattcattcattcttcatttatttatacctactaatatgatcactaatattctgttcttccaaactcatttactcacgctagagtatgtgtgtggaaatattattaataataataccataccctattctccactcattatcaatgaaatgaagcctcatatgcacatatacatcttaattgccatacacgctaataatattttactttttcaataatatttctttattctaacaactagaatattgattaattttaggctcttaattgatggagcgttcggtgcgccagcacaagactataaagagtacaaaactatccttcttgtaggacttggaattggcgccactcctctcatcagcattgtaaaagatgtgcttaacaagactaagcaaaagaatgaaaacgaattaaacgaaatggagagtggaaataagagggaaaataaaaaacctagttttgcaacggaacgagcctacttttactggagctccagagaagaaggctcgttccaatggttcaagggtgcgatggatgaggtagctgagaaggacatcgaccacatgattgaggtccacaactactgtactagtgtatatgaagaaggagatgctcgctcagctttcattactatgcttcaaactctttatcatgccaagaatggacttgatgctgtgtcacaaacaagattcaaaacccatttctcaagaccaaattgggaggatgctttcaacaacatagcagctaagcatgtcgatcaaaaagttggtacgtactatttcattgtttttcgtttgatttcaacatgagactatgtatattttgaggaatgttacgtgcacgattttctttttcttttcttttttttttttgaagaatatatacacaaaaattatgcacgaaagtatatatgatattcaaaataacacaatttgcttcatataagacccacaactttacaaatgtacaatgtgatatcattgtatataattattactttggtgcacaaacatttaattacattaaaataaaatgtgaaattctgtaaccaaattaattttttttgtaaaatgaatcccattaaatagaaaaaaaaaattaatatcacatgtagctagtgatttagtataaatttatgtgtgtacacatacatacaaaaaaaattatacaattcaggggtatctcaagatgataagaggtttagggcaaaaatttttaacagaggtctttcccttttataaaaattaaaaataagtattaattaaattttaatgtagtatcacttttaattcttttatctgtatataataaataattttttggtacttaagctaactcgataaaatgatatttaattattaagatcatctcttttgaattgatacatattttagtacttttgcaaataataataataata

SEQ ID NO: 163409 - DNA, 2842 bp, Cannabis sativa
tatatcaatcattttattgcgttatatttttgaaaagacaaacaaagaaagaaaattgcattcaagcatcgtaaaaatttcccattttttgtcggaaaagatatattgctagcaaaattaagctgcctaaaaattcaaaatatgggtgaaaatgtcgatttttgcttcctcgattgagataaaagagcctacttccataatcacaactagcggaaacaagctgaattttctaatccagctaaacaaagttctaaaattctgctgaaacccgaagctccaaagttgtaattcatcgaaaatcaacgaaaaagtgactaacctgacgccaaaaggaaaggacattagacttgacagcacaacctgggggaccatagtcataaagtccagcaacaccacgataaatcttgaaggaaggaatgtaaaacaaacggcgttctaatgtgttggagaccaactgccggaattcctctctgctaacggagccatcaccacctgaaccagtaacggttgcttgaaggtctttctcgagagtggtcttctcaagcttgagggcattgagagcttggatggcagcatcgatatcagacttggatgctttggaggctttgagagcacgtacgttgtttccttgagcttccacagccgataacttatcagccagtgcttgacgaagcgattcctcggaagccattgatgatgatggcctgagagtgagataattgagggtgagacgagtgagtaatttatgaccaaatgaagatattgatgaggttgttaggaaattcaatggcatgaaatgaaatctggttgaaaatggtagaaatttgagagagattacctgagagaaattgccggtgagagaggagagttgtggagcctgaaaatcagagatagaggcggcttagtgagtgagaggtttagggttaaggagagagagaagtggtgtttggataggaaagggatggtgtagtgttgtagttgagtttttgattcctatgtttggttgctacactacaattggaaaactctattcacttacatcctatgaatccatcctatgaatccaatccaattagaagtccgggtgttcaacaaaaattacaaaccgtccaactcaaataaattgttcaaaccaaattgaataagcagataaaaaatacaactcgaaataataccataaaaattcaaactgccaaatgaatgtattgggtggtttacaaattactttaaactgcccaattaacatgaataaaccgaattaagacgatttatatattttttaataaaaatatatatatatatattatattacataattacatttatttattaaactattttatatttaaagtttggacattttagtgtttaacttaaacttagaccataatagatagatacaattgaaattatatccctaatttcacatccattattaaatctcttatttgtttgttttatttattttttgcttagtttatttagtttcaaaatttatctatctagttgccaaatagaaacaagaattcaattgattggtacttacctatagtctttgtggaaacgatctcacttacctgagtattacttgttaaaataatatgtatacttgcgtgttggatttatcacaacatttatgctagtgagactctacatggggttggcaaccctagtatcgacgaaccccatgttgacctagaatgagagaggtcgtaggacaagtgcagggtcacacgaagttccttcatcatgaccaacaagaaacatgtgttgctatgggtgatgctttcacccagcagagatgcaaattccaagaatagatggatcggcaggccgcgatcctccaagcccatcaggaaaagttgaactgctgaagtagggaggctaacaaactgatcagatggttaaacgagagggttgaatcttaggttgaagagccacccctcataagggatcccttttagggaaaatgtccctatgtcccagagggaactcaacgccctaaggatcacgggaaaacttcacgaccagggggaccaactgtgtctcaaaccaggccgccacccttttagcccaatgacgatcaaatcttgcctagaagagcatatggcaggactgaccaatttcagggcttgtccaaagacgacgagagaatggaagatgtcccaccaaggcaagattggagtaggtcttgtagaggggagtcttaccccaatcccaataatgatagtgccaccagtcaccctatcagcgagtgcactaactagaggactcataaccacacaggtcgtgacaacgatgttccacctcagaatgctcaaacacgttctaacccgagacccaaattctgtgtttgatagaatgggcccccaagtaagactaaatctttaggctggcttaaactaaagaaaaaatgttcaggataggtacattccgccccaaacacactcaaccaattggataggacaggccaaatcctaccaaccccgaaagtgtaccccctgtcaagggcggacccacattgccccctaaaaaattaggaaaaaaatgtatatacattttagttagttacaacacatatttgtaataaaagatgatatttataaacataatactagctttggtgcaatggttaagctaaattgtatatatgttagagatcaaaggttaaaatcccaccaacaactctttttttttttctttttaagtttacttttgccccatgctttacaaaaaaaaaaaaaaaaaaaaaaaaaaaaaaaataccccccccccacaattcaattcctgcgtacttcagctttgggaaaacgtaaatatcgggatcatccttgaaatctgt

SEQ ID NO: 163410 - DNA, 1470 bp, Cannabis sativa
  modified_base (1426)..(1441): a, c, t, g, unknown or other
ttgtgttttgattagtatatcacataaatcaacaaacttgtaaaatagtgtgacacaaaaggtgatagtaattttatttgatctaaactaattattgttttcattattatttccattttgcataaaacttacggtcaccccataataacattctattgagtggaatgtgaacatttctttgcttcaaatggatatgccttggccttattctcttatccaaactgaacccaaaatactgaggaaacttattcacttcctctaagcttctctccatctcccaaactaaatactcacacttgggtctcaagttatcctctatactataaccgaatattgccggaacccgagcgcaaacccgacccgattcttcctccgaaagcccaatgctaatcagaaacctcatcttttcatcgagcttctcaacgcgcgtgttgagtagatgcgcgttcagattggtcggcgagctaagcccgctcaaacccagcttcctcaggtaagttagcgtcgggcggaggcagtagtcgacgtcggagaagagaatagcgggacaccggaggataattccgcaggattcctcaggcgaggcggagacttcggcggcgaggaaatcgaagacgggttcgagttgggcgaggtcgaatttgggggagaagagttgggggcggaggaaggcgagtctggagaaatgggagtcggtgaagcctttggatttgaggaaattgagtgtggtgatgatttgatggaggtggtgaggaaggggaaggttgttgggaggtgtgtggggatggattatgccgatggttttgaggtagcggagattttcacggtgggatgtacggaacttgatgaagggggtggagggaggaagaggaagaggaagagagtatggtttggatttggatttggatttgggattgggattaagatgaaggcagcactgtgtgtgtaggtgaagcatattgcatttgcttcttctcaatcttaatttctaactcaacttggttgaatggagtgagtggttcatatttttgtcttttggataaaataatcctctccaaagcttttcttttttaattcacaaattaaataattgggatttttgacttaagaaattaataagcaatcgaaaggagaaagatagagaaagaaagaagataggcttgcttgaaagtttaatattattataagtgtaattgccacaaaactcctcatattttttgtctctttagcaattaatctaaaaatttatttgctggtcataaaattcctaaaatttgtgttctatttttttttttctctttagaaaatttgtaatttaatattctatttatttttgggtgttaagtgttaagtgttatgtatgtccacctatatatgtatgttgacatagtgtatataaaatgtaattttattaagggtaaatacnnnnnnnnnnnnnnnnttttgcaaaagttacagattggatcctgt

SEQ ID NO: 163411 - DNA, 736 bp, Cannabis sativa
tctctctctctctctcaattctttacctctcttttgaacaaaaaaagcaaaagaattttacatatgtagaaaattcatagtgaaattcagatttcttcttaaagaaacccataataaaagaccctatatcctataaataaaattggtaaaaattccaaaacccccttgtacacaacatccaaaagaagctcctttttttttcctcataccctggttgcggcatcaaacaagttcacaaacttaataacctcacacatagattcacaaaacaaatatcccttccattattagcacaaattctactcaaacaaagcaaaataagcagaaaacaatataccaccataactaagaaaaggtaaagcaaaaatcaatgataaaaaaaaaaaataatcaaagacttaccgatcacatgaaccacaattagtccacgagtctaattttcagcaggaaattgaaaatgagagcttttagagagagaaaaagaagaagagagagaaggggaagtagctaagaagctgcagtggagacttgaagccacatggagaagcacagctgaaaaatgtaatgaacaaaagcgagtgatattaaagatatgtcttttattttaatttattttattgcattttgtaacatgtactttctcatacattgcattttagtccttgtttaaattttattttgagaaattaaatatcaaatcattatttacttattatttttttattagtatatttaa

SEQ ID NO: 163412 - DNA, 1832 bp, Cannabis sativa
taataattataattatttatttgctaataaattaatttacaatattgcgtactgcatacgaaacccaccatactcacaaattcttttccatgaaaaaagaaatcatgatggacttttataatttgtcaaaattctagcttaactaaatattatctaaataatctattaatctagctaagctaattagtaataactaatgaaaaaaaattcaagagaacatttgatccaacaacattagaaaagccatagcaaaagttggatcaaaattatggtgaacaataaggtgaaaaacctcattaccaaaggaaattccactaacacattcttgttttcttctaatttcagcaaccactttattattacaccatttatctaacactttacatgatctttcagtgtaagagccttcaatcacgtaatcaccatgatgatgatgatgatgatcttttagtattcttatcggacgaaccacatcgaaacacgtgggcaagaacatgtgatgatgatgatgacttgtaaagataattgatgttcttttttatgtagaaaattggcttttttgatgttgatgataatgattttgatcttctaataacattaatcttcttcttcttattatgatcaacatcaattgatctttctccttcgtacacaacccaactatccacaagtccaagcttctgtaaattaattaccaaaccaaattaattataattcaaaagaaaaaattcctaaatatataacattataatattttcttcaatatatataacattctattttatagttacagcaagcattctactaattttcggcaaatttcaaatgaaatacagtgccaaaaattgttactcttattttttttttataagatctaaacgtctctagtatacgtaagataatttaattattatgttaaaattaatattatatttatatttatcccaataattataaatatatattgtaactaattaaaaaatatatattttttttaagagagagagtgacggtctcttctcgcgggtcgtcgaccgtgtgctactaactattttaaaatttattttccacacctaaattattcataatttcaaaaaaattaagaaaattatgttgttaaaaaaaattatagtaagataataaggtttgttattacataatacacagttacatataaaaagaaaattattatgttgtaaaataccaaaaaccaaaaaaaaaatggtctttaaaattaaagcacccgaaaattatttataactgtactgcaaaaccatgatgaaactaagaaattttaaccctctaaagtgaaaatccagataaaaatgagaatagacaacagttaaaaatatctgacatttttgttagtaatatttatctaagataacagtttttaataactatatatatatagagagagagagagttatatataagaatattaaaagtatatatagtaataatatatgtaccgtaggacgatggttgaatgtgaggatagattttccagaggaatccatgagagtaatttcttgtggtcgaaatctcatgtaattatcaacacggtaaatcagatttccatgtgaatcgatcactgtaaaaccattgcaactcattaacagtgattttctccacactgtcaaaacgacatccttttcattgtcgtatttttcatcatgagcagcttcatcatcttcatcatggaccaccacaactgatcttgatcttgagaaagacttcatagaaagaaatttcttcattattattgttgatattttttgctaattaatatagtgtttcgatgaagtacttatgtgtgtatatatatatat

SEQ ID NO: 163413 - DNA, 703 bp, Cannabis sativa
acgccgaacaatgcctgatcctgtattatcagatgtcccaccaagaacacaactcacatttactccattcttctgcatacgcacatacattgtatataactatatatttatgtagcagaagaagaaaaagaaaattatgggttttgagggttgaggaatagcatacaggagaggtagtactagtaggcgctgctgcatacaaattgccaaattttgcagagttgcaaccaatccatacatatatctaaaaagtaacagcaaaattaaactccatatatataaaaaagaaaacaacaacaacaacaaaaaaaaaaaaatttaaccaaaagaaatacccaattcattgtttttatatttaagtatcaaaatggcctatggttctcttctctctaccagagtaagggaaaaaaaaaagagagagagagatcgtgtagtgttggacctgcctgggaagacggatgatttggaagtggacggtgacatcgttgacggcctcagtgaagcaggtgataggaacgacgtcgtcgcctttggatatatgtgcagagctcagggctgagttcaaagcttccatctccaaaccctttcagacccacgcaaaatctcaactctttcaactttcctctttacaatagtttttttttttttttttttaataaaaatcttattttttcaaaataacagtaaactaggttgatcaaat

SEQ ID NO: 163414 - DNA, 1093 bp, Cannabis sativa
tttaaaaaaaagtcacactatatcaagagcgcaatcaagaagataggcagcaatctattgataaaatctcaaaaatagaccattccagcatcttataccagttcccactatgtaaagaacagatagacaataatgggaaagaagtgatactagagtagataaaatagagaggtataaatggcattaaggtcaaaactgttagacgaaaaagttgtaaatttggcgaaagaaatgttaaaaaaggtcagaaataacgcatatgtttcaaaaaagttacaagcggtgatagcaggaaaagaaagtagtataagcgctgtggcaagaatatgtaaaatttcaaggactgctttgactgaatggataaagcatctaaaatttggtagagtagaaaaattattttccccttctcagcggcgaagaaaaagcaaattaaacaaaaatcaacgtgagcaaattgaaatatgggtagaaagaaatccaaatattactattaaggaagtgcaaataaaaatctcagaggaatttggcctaaacattagcaaatcaacagtgcatcgtgagatacaaaggatgaagttttcttatataacaccgaggccaattcaccataaacaagataaaaacaagcaagaagagtttaaaaaatacttcaataaaataatcaattcccaccctgaaaaggaggtatttttttgatgaatcacgatttggaactcattcaaaaatcggacacggatggtttaaaaaaggggtcagaacgcaggttaaatgaaaattggtagacaaaatttctatatctacagtgcggtaaatccaagaagtggtaagaaaattagcctacttgctccatatgtaaacactgattgtatgaatatatttctggagcagatgtcgaaagatttaggcacgaaaaaagcctttcttgtaatggattgtgcaggctggcatagatcaaaaagtttgaaaattcagaaaaacattaccattatatacttgcctccttattcaccagaactgaatcctcacttttacccacaagtataaaaagcaagtaagatagaagatcggaagagcgtcgtgtagggaaagagtg

SEQ ID NO: 163415 - DNA, 1537 bp, Cannabis sativa
aattaataaatgatctaaagacaaataagagactaacggtggtacttggggaagttcgagaactataactaaacctattattatccttaaaagaaaattatatgaatatataatttataattacatgccaatttcttagggtaaaaagaaagtttttgtataaggtggtgtctcaaacattattattcatatcctcgtcttgtttgatggttaaagccttagctttgacgtagaaaaatccaacaccatggccgatgacagcaacaatgaaaacaccgacattgaaagacatcaaagaaagcataaccaagtaagaaactgcaacccgaaagccatacacgcaagcgtgactcaaagccgccgtcatcggaggtacaccagtaccttctttgatggaggttatggaagagagaacctcaactatgacagccatgcaaaacactaaaaccagagccactatgtacttgccggggctatcgccgggccaccctgagtacaggattatagcgttggtaccccattcgaagctcatcccactttgcatattcatattcatattcatcgtcccatcactcgtggttcccatagccatatcgaaaattttactaattacatgaccacacatatatatatttatataattatatatttgagtttctttgatatgatcaaaatttgttgttgtatagtattattaattattatatacagtaggtatataccaaatatatatgatattataaactttttgaaaggttttttttatgtatgcatatagattcaatatatgtatgttgatgtaaacaaagtttgtgttgtgtataactccgtatgagagacaaaatcatgaacatattagattcttttttttactattatattgtctactcatgaggaaggtcttagagtcgatcgttacaaataaatgtagactaaaaaaaggaaaatcaaaacaaagaggatggtctgatgaaacaaactagttaataacttctttttcgcggtggatattcaatattttaaaaaaaaatgtatatatatgaaataaattatatatatattttatttatttaataataataataaaataataatattatatcaaattataattaaactactgtaaaaaagttagtatactatattttcacttctaactctttttaaaataaataaataatatgattagcactctcacttaattcaactacaatgtctttaatgtatatgtcacgataagatccatcagtcgactttaatgaacaaattgataaacataaataatacaactgagctagaacttaaccatctccagattgagatcactatcccagagacaataaggaaagttgtctaaccacacaagttgtttttccatccttcgcatgcactgttaatccatgcgcaactacattgattgttcgacgaacatgaattaggaatatccttaaaaatctggacaacaaatgtaaagactcgattttgaccgagtcaaatatgtatatatatataaaataataatatatatgtatgtata

SEQ ID NO: 163416 - DNA, 3124 bp, Cannabis sativa
gtgcttaagggagcttggcctgctacttagccctcgagtttatggcgcacaatctgaaagttaaaaatacctctgaaattttgcaattttttgtagagggttgcctcgggtgtttagggtaggaatccaatagatattgttttaatttcactaaagtgttaatttttattgctaaaaaaatgttatttttattcttacacttctgttttttatattctacatttcaacagataataaatataataatatttttaaaaaatcttccattttaatatttaattattggaattttttatttttgtacttcaaattttttttttttggtatttttacagaaattcatatagcaactaacggaacaacctaaatcgcaactaaaatccacatagcaatttatatagaaattgttggagcaacccaaatcgtaaatttaaaaagagaaaaaaaatcaaaaataaatatatatagagagagagagagagagagtaattccccttaattatttcccccctcataacctgatcttgggtcagctaaatttgtttgttggacagcattggaatgaccaactcgacacacaaaaaataaataaaaattcatgtttaaatccctttaaaaataaataatccatgtttttttttttaaacaatccatgtttacattacaggtcttttaccccagagtctggacatatttatgagacattatttgggctttggaatccttgttactctcaaactattttgccgcactgaattccaccgtcccgtcttctactttttttttctttttttttttttgaaaaaggccgtcttgtactttagagcaatgtacttgaaccaacaaataactttcattaaatacaggtcagtctgtctaatttcttggcttgaaatttaatgtgtcacacataccatttctatcacacacaactataaattttgtttgtttgcctgtccgctgtcgctcccttactggctggcatttcaataaagaataaaaaggaaaggaggcagcgcgtcacagatgaggcacaccgcgcgcgcacgcgttagatcggagaccgtgtgtgaaaccaaaagagaaaggacgtcatgaccatgcagagaaaagttccattgtaacatgtatacattcaacaactttatatgtatgtatatatataaatagacttataaaatgcatacaaattatacttatgagctttctttgattcttccttcgttttctgacattttattcgaagttgctgacttcattcactatgtaataatactaaaaacaagtcatgtactcaaatgtgaaaaagtcaaattctcctaccaccaaattaaaaataaaataaagaaacgattcaaagaaagacattatctaataatcaacgaacctaaaagcgaaaaagaaagaaaaaactaatataaactatataaggtctttagtcaaataactagtaaaaggtcccactaaacaaaactgctacaactcacaccgtcctcatcaactactatatcagcatacatatatatatatatgtattggtagacctagcctttatatcaaacattagtgagagtcggaaaagggaaaataagaaaaccacagcaagaaagagatttaaacgagagaggtgaaggctaattaattaagatgatgtcaatgatgatgtacaactcgaaaagcagctcagtgaagaccctctgttctgttctgggattaatactgataattgtgactgcacagttaaatgaagctgattgcagagcacttcgatcgatggagaacactactactactacagccatcgctggatgtgatcaacaaaacgagggaggtgagatgatggccggaatggcttctttcgcagtttcttccaacaattccagcagcagtagtaatcgtccttcggccagaagcttggcctttagattggcttctgggccaagcaaaaaaggcccaggccattagctatacaagctagtactcctgatcatcctcatcattaattatgattcttttgttcctttttgtttttcttttcttttattggctaaaagagattgtgactcgagatctccaatttagctggtttagaattatagttcctttcattatttataaaagaggcatataaatatatatatgtatacttacacacatgtacgatctagctagttgatttcgttgttgtttgttacttatcatatctcaatatgagcaaatacgtgagatattaaggttaattagaattcgaggctttgaagaaaactcccatttgtataaattatacgtacatacatgcatattcatatatatgcgccatatattgtacgtgttgcatattgtatgttctctataaaatgtttgatagagatcatttctgttgtgtattggttatattattttggaagcattagtttcattgttacagcaatttcttttctcctctttttcttttctgagtttgtggagtaaggaataagaaaaggtaactggaaaaattgaatccactaaattcagcagttttttcctcgttggagtcaaaagtgaaaagatcacaaaagggcgaggaaaaatataccccacttcatgttaaaatctttgaccagaattttgtgtatattcttacgcaacaattcagttaattaattattcaaaaaaaaatcagttaattaattgcttattataatttaaatgttatttttattatgaattcttaaacacactcttagagaatatgacttaaaaaaaataagatcagaacaataaaatagattatgaataggggctcctctaaattcttttaatagtattttaattaagtacattaatactgttttattagttttttttttaaattaatgtatatttaagaaattcattataaaaatattattaaaataagaaatctttagtaatttagaaagcatgaataaagtaaaattaagaaaaatagttctctacttcaatatattaattagtttaactaaaatttgaataaaaaataaagagtgcctagttacgtactcttatgagtaccaaaaatattgctattaggtactagtggtgactagcaccttctcgacatgtcgcattgcgattgactagcgatactccctaaaagtta

SEQ ID NO: 163417 - DNA, 1166 bp, Cannabis sativa
ctttttccatgagttcactcttctctgcatccgtgttggctttaatcttaccatcacaaagaattacatcctgaatttatagttgaaccatgacaactcgcatctttactctccataagttcaaattgtatttcccatcaaacttctcgatgtcaaacttggcattccccatttcttccctggatgttcttcacatttgatctcacactagcttgatttgatcaaagctccaagaacccatccagctctaataccacattgttgagtttcgagctcaaacgtcccacaaccataaccatttacaatgtgttcaaaagaataaaatctataactctttattgatggtagttaagtcttatacaattaagttacaatgtaatgtgtttcaagaaaatcagggactttatatatataattagtctaatttattttgacacttgaaactaactacttctaaactaatagtgcaaagagctaactagagctaattaatactaacggtcacaactaacaacattggccaaattggccttataatcctttgaaggagttaaagtttggtggcctcgtactagagtcccgagttcacatttggcctcatgcatttaataaaatccattcacttataattcaaaattttatatttttcaaaaaaaaaaataatagttaatcaaaagaaggtaaacacttggattggaaaaaaaaccaaatacatgggtagaggaaacacatacttgtagcatgtcgccagtgtatatatatgtataaatgttttttaatacaacaacatggagcaaaaaatatattcttcgataataaattatcgaagaaacttggttttaaggagaggaataaggtgagaggtgataatatgattagttttctcagttggatggaaagcgtcccaaaagatgtacttattagcgtcagtgcacgtcaatggacttttctcactacataggtaactcatctcaaatgtccccgttgagcaacatgccattcccgcaacctcaaatcctgcacccacttatatataaataaatattaataaattcaagcaataacatatttggattgtattaaaaaaatttgagtttttatacctaatttttttatctaattataaaaagttcttattacattatatgggcttgaattgttacatc

SEQ ID NO: 163418 - DNA, 1239 bp, Cannabis sativa
  modified_base (1179)..(1205): a, c, t, g, unknown or other
gggcataaaacccaacaaggagaaactgtctaaaaaaacctttgccattccagtatcctcatgccccagccattaccattgttgatgtagacctctctgatttgtcccaaggaggacaagtagtgaaccccattctcactcactctattggttttacacctcttcttaactcccatctagcctctgtttcatgcctaagtgcccccaaaaattcttgaagtggtatgatacctaccctagttaacccaattcagggtcaagttggtgggttttttaatcctctgagtattaattcccagtctactggtgtctccactgatccatctatgattagtggtgacttgatgaatcatgaagatgtcaattcccaccccatattgcaaactcggaactttaactctgtttctgctgactctgttattgtgagtgatactccatctttccccaacccagagttagttaatgttgcttgttctcctgttgatgctttgccatccttggttttgggtcatacgaatgctgccaacccaacttttcaagtcaaagcacctcggccaaaccctcatgtcaaaggaaaagttctcgcatgtgcttcgggtgtcaaaagaccttatttttaaccttctcaagttaatgtggggggctctatgaggtttatgctcaagcatgctagagctggagatgctaagtttgttgagtcgttgttccctgatgcttctgaacaagcgggtgatgctgagtttgataagctggaatgctcggggtttggggaacccttgagcattcaaatgactctccctccttgtcaagacccataggtctgctcttctttttttgatggaaactagattgaagcccaactctgtagataggtttaaaagggctctagattttactcatggtttgatgtcccaaggaaatattttggtgggggacttcttcttttgtgcgggggtggtgtttttgttaatattctaaattactctactaaccatatagattgtacaatgagtttctctagtaatactatttggcattttacttgtttctacagatcccctattactcaccaaaagcatgttacttggaaattgttgcataacatatattataatgctgcaaattttccatgattatgttggaatatttatttcaccaggatcttaaatctactcacannnnnnnnnnnnnnnnnnnnnnnnnnngaactttctaaaacgataaaagatcggaagagcg

SEQ ID NO: 163419 - DNA, 2550 bp, Cannabis sativa
  modified_base (2469)..(2471): a, c, t, g, unknown or other
tttcctctccccctatcaaagacaagactaattacaatagtgaaaatcgaatcgcaataacaaaacataaccctgaccaagccgcacctatgcccaggggaggccggtgggcctggccaaagaaaaatcacaacctcttgtagttataaatttagaaacgaaaaaccctgattttttaatttaattgatgataaagaaaagaattttttatttggccaagaacaacaaactataatatatattattattaaattagctctacatgcataattgttacccttcaaagttgaagaatatagaaaatttcataatgtactattgatatggtttttcgtcaacagatctaagaaaattataatcgagtaagatgaacacaagcaatcgttaatcaaagtaaatcaatttgtgaaaaaatttaacaaagatgaacaaggattttatagcggttcatcccctttaggcagtattaggctagtccgcttggagtgttattgatctctatgtttgagaagagttttctagagttatgttctgagtttaatcctcaattaagtttttacaatgagagagtgggagcttaagagaatgattttgtgagaatcaaaatcgaagtccctttacaagtgactttactccccttatataggtttgcatctagggtttaaaatatcttaatctcaggagcacctacccgtaactatgatcgggttaggtttaaaatacaaaaatcacatttcaaaataactatctaaaaaaaataataaaagattaaaatatcttctaacttcacgtgttgacatatttcactcacgaggaacacatgcgaaggccatgttattagtaggtcacgagaagaatgtgagatactcttcattttaggtcgagatgacaagcacaatgaggctcatcttgggctgaggtgatgagagtgtgaggccccatttaggccaagatgatgatgaggctaagatgaccatttttgtccgaggtaatggaggcataaggacccccatttggtcaaagatgatggaggtgtgagcccccctttaatttaggcagaaatgatgatgaggccaaggtgacataatggcgagcctccacttttggtccgagacgatatatatgttgaggcccctaagattgagatgattcgtgttgaggctcctagggccaaggtgatgcctattgaggcccccgggactgaggtgatgcatgtagagacccctagggccgatatgatgcattttgggcctctagggccaaggtgatatgtgctaggcccctagggccgagtagatatgtgctagggctgaggtctgcttcgacctctctcagtaaaacatacaaaactttctcattcaaactccaaactagttaattcaagatgcattttagaaaccgagaaaatatctaaaacttttatgttttgacttttttaaaaatttgaatagaacattgtatttaggtttaaattttggtccgagttgatgaggaagtatcgtgaggagacacctcctttttggtcctaagtgaggagatgccttctttttttgtcctatgtgaggagatgagacatgaagtcaccacctaggtgtctaggtgattagagatggtactagatagtctcttggcaatttaagttgttcaaagcaatatggagagatgctctaatttgaccatgttattgttgggtcactacctcatcacattaactctcacattagtatgatattgtccgctttgggctagactctcgagatcttatttttagacacttttttaaaagatctcatattaataaagtagtgaccattcttatatatccatgattttttttatttttaattaatgtgagactttgattacacacccaacagttattaatgagtgcaaggagttgttaagttttatgagatatatttttattacattttgttaaacattctacaaattaagctagacatgctattgctaaacaatctcaatattatggtacgttctctagggagaatgccccttttgaacttttatttgttattttgagcgattatacacttattaatgaagtttgaaatttattaaagcgtcatcctaattaatgataatatatatatatatatatatataatggatggaccataatatagtactatacattgttcaaatgcccaattaatcaacacatttaaatttccacgtaatatttaaggtccatacacaaatgatttaacaaatctctcttgtggttggtttcatattagtggtagagtatttcacttttgtttgccatttggaaacaaaatcagatttttttatttaaaaaaaaacaccctaaaacaatgaattaaaagggtattattacactaaaataataaaattttattgtttagttttattatggttcactataaaaactgttacagtgataattttttaatcaaaatataattttttgtgattaaatgtgannnttagtcacaacaaaatgttacttatgattgaaacatagtatttagatacaaaatatcactaatttaattttagccacaa

SEQ ID NO: 163420 - DNA, 1824 bp, Cannabis sativa
tctcttgagagaataccttatactaattattgtgcatttgggataatccatcatggattgttgtcgatcatcaagataggctcgaagtcttcaatgatgcttcgtttgacaacatactcaacaggaactacacttagagtatcagagtctgttgtactagctagtgtagctaggtaatttgcattcgcattttgttcacgtggcactgtgaatcactgtaaatctcaagtgtcttagtattgaattctagtgctaactttagtcatactaggagtgcctcataatttactttatagtttgttgtagtgaactcaaaacttagtgcacagtgggttcaaaatttttctagagttacaacgatgagtactacgctagagtcgtgctcattggaggattcatctaagtaaagattcctagaaggtccataatgccttcttgagctctagtcttaggcgtgtgggcttggttctcacaaaccatggtgtcgtcttattcgaggcaagtgcattcagcaatgaaatctgctaatgcatttcattaaattgtagtgcgagtctgataggtgatctcaagttgacctagctctactacccacttgagtagcaccctgacgcttctagtttggtcagaacttgtcatagtggtttattagttaacacctagactgaatgagcttgaaagtatgacatttccaataccacgaagtgcgccaacttctcaatgaggggatacctagactcaactccaatgagacagtttctggcgtagtacaccgcgtgttgtatcccattctcctcacgcaccagggaagcactgtctgcatgctcagtgataaccaaatagatgaactattcttcgccatctattggtttggataggataggaggacttgctaggttatgtttgagtgcttcgaaagcctgctcgtattcaccagtccattcaaacctcttattgcttccttttagtagattaaagaagagaacacacctgtcaatggacttggtgaagaatttgtttggtgtagaaattcgtatggaaaggctttgcacatcgtttacccatgatggtgacatcaaattttccaatgccttgatattttttgaattcacttcaatacctcttaagttgatactgaatctaagaaactttgctgattggaggccgaaggcacattttagagggttaagtttctttcgatattctcttaagatgttgaaccattcctctaagtctttggtgtggtcttaaaatatttttaacttgagtagcatgtcattggcatagacttccatattgtttctaatcaatttatgaaacatgcaattgactaatctctgatatgtagcatttgcattcttgagtttgaagggcattactgtgaagaaataaagtctgatgtctatttggaaacaagtatgatctttatctggtgcatgcatgctaatttgattgtagttaatataggcatgctttgtttatgttagtaaagtgggcaattcctctacttaccatttggtttaggcactagaacagggtttgatacccaaactgggtagaaagctttccttataaagttgttatctcatagcctttcaacttcttccttgagagctttagaatgctctttgtgaaggagcatgcgtttatgttgtacatgttcgaagttttctctttctatgttgagggcacgacagatgacctaggggtcgattccaatcatgtgctcatgtgaccaagcaaaaatgtcttatatctcctgatggcaagccatgagcatctcgctcaaaacctctgtcaggtttgttccaatcttgacaacct

SEQ ID NO: 163421 - DNA, 1079 bp, Cannabis sativa
ttattattaaaatacagtatactctattgatcttataggtaaggctagttatgacaatgatgagtttgggacaacctcatcctttgagtttcaagatggcgatgatcgctacgatgctattcttttggatattgaaaagctacgtttacgagtacaaaaattgattcccagagtgaagaagatggtttctgaaaactcgcaaaagatttcttctataaataagttgaacatagttgcaccttgtaatgggctgactagctcagctcaaaatactgtacctcctgaaaataggaatggattacttatacttaagagtgctgtttcaagtcatggggaggtgactcctcattctgaaatgactgtaagcaaaaatccctttcaaattggctgcttatatggaactgtaggttactctaaagctgctgtcatttactttattgtttgaagtattaactaagcccttatctaaccatttatgcatacagactgaggatgaagtgctgatagataatgagcaagccaaggaagagttacatgattttaagaaacttagagatcagctggcagagaagcctgacggatcaacaggagagcagaaagcaattcctaccctttcagaagctgtctcgcctttgaaagcggctgttcagaatgtgaaatctaatgcgaagaaaagataccgtggtaagcgaaaggctaagactggttcaagaagatgaagctggttctaggtaagcttggtaaatgtgctcgttatttgtttggaagtttaatatatcagctgggtctctaaagtttttatattgtatatgctaattctccttcccctctactgtaaatcgtctctccactatagtgtaaaaaaaagaaaatgttcttatctgcatttgttaattaaaagaaatacttagttttgagtccacctaacttctcaatttcggaagtctgtcgataaatactatatgttttcaatgttatccacttaaagttaaataccaaatattgtgttttaccctttccattattactatatatatatatatatactagtaaaaaactacgtgcgaggcacgtatact

SEQ ID NO: 163422 - DNA, 2001 bp, Cannabis sativa
  modified_base (1789)..(1803): a, c, t, g, unknown or other
  modified_base (1873)..(1876): a, c, t, g, unknown or other
  modified_base (1964)..(1972): a, c, t, g, unknown or other
aaaaaaaaaaaaatatattttaccgtactaaaaatagggttccttttattttattttaccgtgcatgttcaaaaaactcaaacttattttcggtaatgtaaattatttcaaaaaatttcaagaatgatattgttactataacaaaaatgttaatacaaaaaaaaaatgttatattatttcggtaaatttttcaaaaattttcaaaaatgatattgtcatgaaaaaaaataaaaataattaatacaaaaatgttacaacctttctaaaattatattgctttttcttttcttgtttccaaaaaggaagaatttcattataacacaatagttcgaaaggaatgggcattttcaagtaattgtttggtaaaattaaaggaaaataatcaacataaaattgttacatcttatatttcatttttattaagggagaaattttttagaaatgttggaaaattctgcaacaaaaaaaaaagtaattgaggatcgtatcttatgtgtttgacacatgtattctttttataattctaatgaatattaaaaaaaataattaacaaataatccttacaactcacatttctattttttgtttaagtatgaaataaaaggtttcacacgagctctccttctgcggcgtggcgacaggaccgatagagaattggctttgagtgtagataggataaaatttgcaagggttaagaagaatttcattcaaacccattacaactagtgctgtaaataagggctgagcttttagacacgacatgaaaccggcataagcacgactatgcaccaaaaaatacaggtttggacacgacacgacacgatgctacaaattggcacgacatgatacgaaaaatatatcattaaacatgacacgacacgagaagcacgaaagacacgacacgtaaaaacgaatagactagctcgaaaacacaacacacgacaagctcaaaaagcacgacacaacatattaaaaacccttataatttaataataataattattattcaaataataacaataataataataagatatgaatgtatcaattataaataaattaaaataataataaaatttaaatataatactaaatattataattctataataaatactattaaaacataaaaaattacgattatattaatttatttataaggtgtgatataaaaatttgagtatttaaatatttaaattctaataatgttaataatttttttatataattatctataaaactttaaaatatacatataatttagtaattgtaaaaaaaataatataaaaaagtaaagtataaatataagtccagatatgaaaacgagctggcttgtttaagaaatacaggatgacacgaatccaagcacgacacaaaaatattaggcctatgggccgtgctgggcctatcctttaaaaatattggcatgatacggcacgacccatatttttctgtggcacggtacgacacaatctatcttttaaaaaaaataaaaataaatacggactgggccaccacaacacgcgaacttaagcactagttacaatatatatttttaaaattatattgcttttagaatttcatttcaaaattgaaaaggaatggccatgtttgaaacaaaaacgcatcttcaaataattctaggtcatattttgtgtttcgacatatatattattggaaaattttataatgcacccctttaaaagggatataccgatacatctctttctgttttagtatccgaaataatattttagtcaatttttttctcatggtcatgtaaattatnnnnnnnnnnnnnnncctgcaaaattttaagaaatttgtaaaagtttaacacgccgaaaattgtgttcaagcagtgtgttgcacnnnngactattttattttatacgtgtgtaaaatagactatttgaacattgttttctttttttgatcaaaacattgttttctatattgtaaannnnnnnnnatttctcaaaattttgtaggatatcttaa
